(19) United States
(12) Patent Application Publication
(10) Pub. No.: US 2006/0040262 A1
(43) Pub. Date: Feb. 23, 2006

(54) Novel compositions and methods in cancer

(76) Inventors: David W. Morris, Davis, CA (US); Marc S. Malandro, Davis, CA (US)

Correspondence Address: Shantanu Basu;Morrison & Foerster LLP, 755 Page Mill Road, Palo Alto, CA, 94304-1018, US

(21) Appl. No.: 10/330,773

(22) Filed: Dec. 27, 2002

(51) Int. Cl. C12Q 1/68; C07H 21/04; C12P 21/06; C07K 14/82; C07K 16/30

(52) U.S. Cl. 435/6; 435/69.1; 435/320.1; 435/325; 530/350; 530/388.8; 536/23.5

(57) ABSTRACT

The present invention relates to novel sequences for use in detection, diagnosis and treatment of cancers. The invention provides cancer-associated (CA) polynucleotide sequences whose expression is associated with cancer. The present invention provides CA polypeptides associated with cancer and provides diagnostic compositions and methods for the detection of cancer. The present invention provides monoclonal and polyclonal antibodies specific for the CA polypeptides. The present invention also provides diagnostic tools and therapeutic compositions and methods for screening, prevention and treatment of cancer.

### CROSS-REFERENCE TO RELATED APPLICATIONS

[0001] This application is related to U.S. Applications entitled “Novel Compositions and Methods in Cancer,” U.S. Ser. No. 10/034,650, filed Dec. 20, 2001; U.S. Ser. No. 10/035,832, filed Dec. 26, 2001; U.S. Ser. No. 10/004,113, filed Oct. 23, 2001; U.S. Ser. No. 09/997,722, filed Nov. 30, 2001; U.S. Ser. No. 10/085,117, filed Feb. 27, 2002; U.S. Ser. No. 10/0387,192, filed Mar. 1, 2002; and attorney docket number 52945-20010.00 filed Dec. 16, 2002; and U.S. Application entitled “Novel Therapeutic Compositions in Cancer,” and attorney docket number 52945-20010.00 filed Dec. 16, 2002, all of which are expressly incorporated herein by reference in their entirety.

### DESCRIPTION OF ACCOMPANYING CD-ROMS

[0002] Tables 1-129 are filed herewith in CD-ROM in accordance with 37 C.F.R. §§ 1.52 and 1.58. Two identical copies (marked “Copy 1” and “Copy 2”) of this CD-ROM are submitted.

[0003] Contents of the CD-ROM disks submitted herewith are hereby incorporated by reference into the Specification.

### TECHNICAL FIELD OF THE INVENTION

[0004] This invention relates generally to the field of cancer-associated genes. Specifically, it relates to novel sequences for use in diagnosis and treatment of cancer and tumors, as well as the use of the novel compositions in screening methods. The present invention provides methods of using cancer associated polynucleotides, their corresponding gene products and antibodies specific for the gene products in the detection, diagnosis, prevention and/or treatment of associated cancers.

### BACKGROUND OF THE INVENTION

[0005] Oncogenes are genes that can cause cancer. Carcinogenesis can occur by a wide variety of mechanisms, including infection of cells by viruses containing oncogenes, activation of protooncogenes in the host genome, and mutations of protooncogenes and tumor suppressor genes. Carcinogenesis is fundamentally driven by somatic cell evolution (i.e. mutation and natural selection of variants with progressive loss of growth control). The genes that serve as targets for these somatic mutations are classified as either protooncogenes or tumor suppressor genes, depending on whether their mutant phenotypes are dominant or recessive, respectively.

[0006] There are a number of viruses known to be involved in human cancer as well as in animal cancer. Of particular interest here are viruses that do not contain oncogenes themselves; these are slow-transforming retroviruses. They induce tumors by integrating into the host genome and affecting neighboring protooncogenes in a variety of ways. Provirus insertion mutation is a normal consequence of the retroviral life cycle. In infected cells, a DNA copy of the retrovirus genome (called a provirus) is integrated into the host genome. A newly integrated provirus can affect gene expression in cis at or near the integration site by one of two mechanisms. Type I insertion mutations up-regulate transcription of proximal genes as a consequence of regulatory sequences (enhancers and/or promoters) within the proviral long terminal repeats (LTRs). Type II insertion mutations cause truncation of coding regions due to either integration directly within an open reading frame or integration within an intron flanked on both sides by coding sequences. The analysis of sequences at or near the insertion sites has led to the identification of a number of new protooncogenes.

[0007] With respect to lymphoma and leukemia, retroviruses such as AKV murine leukemia virus (MLV) or SL3-3 MLV, are potent inducers of tumors when inoculated into susceptible newborn mice, or when carried in the germline. A number of sequences have been identified as relevant in the induction of lymphoma and leukemia by analyzing the insertion sites; see Sorensen et al., J. of Virology 74:2161 (2000); Hansen et al., Genome Res. 10(2):237-43 (2000); Sorensen et al., J. Virology 70:4063 (1996); Sorensen et al., J. Virology 67:7118 (1993); Joosten et al., Virology 268:308 (2000); and Li et al., Nature Genetics 23:348 (1999); all of which are expressly incorporated by reference herein. With respect to cancers, especially breast cancer, prostate cancer and cancers with epithelial origin, the mammalian retrovirus, mouse mammary tumor virus (MMTV) is a potent inducer of tumors when inoculated into susceptible newborn mice, or when carried in the germ line. Mammary Tumors in the Mouse, edited by J. Hilgers and M. Sluyser; Elsevier/North-Holland Biomedical Press; New York, N.Y.

[0008] The pattern of gene expression in a particular living cell is characteristic of its current state. Nearly all differences in the state or type of a cell are reflected in the differences in RNA levels of one or more genes. Comparing expression patterns of uncharacterized genes may provide clues to their function. High throughput analysis of expression of hundreds or thousands of genes can help in (a) identification of complex genetic diseases, (b) analysis of differential gene expression over time, between tissues and disease states, and (c) drug discovery and toxicology studies. Increase or decrease in the levels of expression of certain genes correlate with cancer biology. For example, oncogenes are positive regulators of tumorigenesis, while tumor suppressor genes are negative regulators of tumorigenesis. (Marshall, Cell, 64: 313-326 (1991); Weinberg, Science, 254: 1138-1146 (1991)).

[0009] Accordingly, it is an object of the invention to provide polynucleotide and polypeptide sequences involved in cancer and, in particular, in oncogenesis.

[0010] Immunotherapy, or the use of antibodies for therapeutic purposes has been used in recent years to treat cancer. Passive immunotherapy involves the use of monoclonal antibodies in cancer treatments. See for example, Cancer: Principles and Practice of Oncology, 6^{th} Edition (2001) Ch. 20, pp. 495-508. Inherent therapeutic biological activity of these antibodies include direct inhibition of tumor cell growth or survival, and the ability to recruit the natural cell killing activity of the body's immune system. These agents are administered alone or in conjunction with radiation or chemotherapeutic agents. Rituxan® and Herceptin®, approved for treatment of lymphoma and breast cancer, respectively, are two examples of such therapeutics. Alternatively, antibodies are used to make antibody conjugates where the antibody is linked to a toxic agent and directs that agent to the tumor by specifically binding to the tumor. Mylotarg® is an example of an approved antibody conjugate used for the treatment of leukemia.

[0011] Accordingly, it is another object of this invention to provide antigens (cancer-associated polypeptides) associated with a variety of cancers as targets for diagnostic and/or therapeutic antibodies. These antigens are also useful for drug discovery (e.g., small molecules) and for further characterization of cellular regulation, growth, and differentiation.

### SUMMARY OF THE INVENTION

[0012] In accordance with the objects outlined above, the present invention provides methods for screening for compositions that modulate cancer, especially lymphoma and leukemia. The present invention also provides methods for screening for compositions which modulate carcinomas, especially mammary adenocarcinomas. Also provided herein are methods of inhibiting proliferation of a cell, preferably a lymphoma cell or a breast cancer cell. Methods of treatment of cancer, including diagnosis, are also provided herein.

[0013] In one aspect, a method of screening drug candidates comprises providing a cell that expresses a cancer-associated (CA) gene or fragments thereof. Preferred embodiments of CA genes are genes that are differentially expressed in cancer cells, preferably lymphatic, breast, prostate or epithelial cells, compared to other cells. Preferred embodiments of CA genes used in the methods herein include, but are not limited to the human nucleic acids selected from Tables 1-129 (hDxx-yyy and hRxx-yyy). The methods further include adding a drug candidate to the cell and determining the effect of the drug candidate on the expression of the CA gene.

[0014] In one embodiment, the method of screening drug candidates includes comparing the level of expression in the absence of the drug candidate to the level of expression in the presence of the drug candidate.

[0015] Also provided herein is a method of screening for a bioactive agent capable of binding to a CA protein (CAP), the method comprising combining the CAP and a candidate bioactive agent, and determining the binding of the candidate agent to the CAP.

[0016] Further provided herein is a method for screening for a bioactive agent capable of modulating the activity of a CAP. In one embodiment, the method comprises combining the CAP and a candidate bioactive agent, and determining the effect of the candidate agent on the bioactivity of the CAP.

[0017] Also provided is a method of evaluating the effect of a candidate cancer drug comprising administering the drug to a patient and removing a cell sample from the patient. The expression profile of the cell is then determined. This method may further comprise comparing the expression profile of the patient to an expression profile of a healthy individual.

[0018] In a further aspect, a method for inhibiting the activity of a CA protein is provided. In one embodiment, the method comprises administering to a patient an inhibitor of a CA protein preferably selected from the group consisting of the sequences outlined in Tables 1-129 (hPxx-yyy) or their complements.

[0019] A method of neutralizing the effect of a CA protein, preferably a protein encoded by a nucleic acid selected from the group of sequences outlined in Tables 1-129 (hDxx-yyy and hRxx-yyy), is also provided. Preferably, the method comprises contacting an agent specific for said protein with said protein in an amount sufficient to effect neutralization.

[0020] Moreover, provided herein is a biochip comprising a nucleic acid segment which encodes a CA protein, preferably selected from the sequences outlined in Tables 1-129 (hDxx-yyy and hRxx-yyy).

[0021] Also provided herein is a method for diagnosing or determining the propensity to cancers, especially lymphoma or leukemia or carcinoma by sequencing at least one carcinoma or lymphoma gene of an individual. In yet another aspect of the invention, a method is provided for determining cancer including lymphoma and leukemia gene copy numbers in an individual.

[0022] Novel sequences associated with cancer are also provided herein. Other aspects of the invention will become apparent to the skilled artisan by the following description of the invention.

### BRIEF DESCRIPTION OF THE FIGURES

[0023] FIG. 1 depicts PCR amplification of host-provirus junction fragments.

[0024] FIG. 2 shows an example of average threshold cycle (C_{T}) values for a housekeeper gene and target gene.

[0025] FIG. 3 shows an example of the calculated difference (ΔΔC_{T}) between the C_{T} values of target and housekeeper genes (ΔC_{T}) for various samples.

[0026] FIG. 4 shows the ΔΔC_{T} and comparative expression level for each sample from FIG. 3.

### DETAILED DESCRIPTION OF PREFERRED EMBODIMENTS

[0027] The present invention is directed to a number of sequences associated with cancers, especially lymphoma, breast cancer or prostate cancer. The relatively tight linkage between clonally-integrated proviruses and protooncogenes forms “provirus tagging”, in which slow-transforming retroviruses that act by an insertion mutation mechanism are used to isolate protooncogenes. In some models, uninfected animals have low cancer rates, and infected animals have high cancer rates. It is known that many of the retroviruses involved do not carry transduced host protooncogenes or pathogenic trans-acting viral genes, and thus the cancer incidence must therefore be a direct consequence of proviral integration effects into host protooncogenes. Since proviral integration is random, rare integrants will “activate” host protooncogenes that provide a selective growth advantage, and these rare events result in new proviruses at clonal stoichiometries in tumors. In contrast to mutations caused by chemicals, radiation, or spontaneous errors, protooncogene insertion mutations can be easily located by virtue of the fact that a convenient-sized genetic marker of known sequence (the provirus) is present at the site of mutation. Host sequences that flank clonally integrated proviruses can be cloned using a variety of strategies. Once these sequences are in hand, the tagged protooncogenes can be subsequently identified. The presence of provirus at the same locus in two or more independent tumors is prima facie evidence that a protooncogene is present at or very near the provirus integration sites. This is because the genome is too large for random integrations to result in observable clustering. Any clustering that is detected is unequivocal evidence for biological selection (i.e. the tumor phenotype). Moreover, the pattern of proviral integrants (including orientations) provides compelling positional information that makes localization of the target gene at each cluster relatively simple. The three mammalian retroviruses that are known to cause cancer by an insertion mutation mechanism are FeLV (leukemia/lymphoma in cats), MLV (leukemia/lymphoma in mice and rats), and MMTV (mammary cancer in mice).

[0028] Thus, the use of oncogenic retroviruses, whose sequences insert into the genome of the host organism resulting in cancer, allows the identification of host sequences involved in cancer. These sequences may then be used in a number of different ways, including diagnosis, prognosis, screening for modulators (including both agonists and antagonists), antibody generation (for immunotherapy and imaging), etc. However, as will be appreciated by those in the art, oncogenes that are identified in one type of cancer such as lymphoma or leukemia have a strong likelihood of being involved in other types of cancers as well. Thus, while the sequences outlined herein are initially identified as correlated with lymphoma, they can also be found in other types of cancers as well, outlined below.

Definitions

[0029] Accordingly, the present invention provides nucleic acid and protein sequences that are associated with cancer, herein termed “cancer associated” or “CA” sequences. In one embodiment, the present invention provides nucleic acid and protein sequences that are associated with cancers that originate in lymphatic tissue, herein termed “lymphoma associated,” “leukemia associated” or “LA” sequences. In another embodiment, the present invention provides nucleic acid and protein sequences that are associated with carcinomas which originate in breast tissue, herein termed “breast cancer associated” or “BC” sequences.

[0030] Suitable cancers that can be diagnosed or screened for using the methods of the present invention include cancers classified by site or by histological type. Cancers classified by site include cancer of the oral cavity and pharynx (lip, tongue, salivary gland, floor of mouth, gum and other mouth, nasopharynx, tonsil, oropharynx, hypopharynx, other oral/pharynx); cancers of the digestive system (esophagus; stomach; small intestine; colon and rectum; anus, anal canal, and anorectum; liver; intrahepatic bile duct; gallbladder; other biliary; pancreas; retroperitoneum; peritoneum, omentum, and mesentery; other digestive); cancers of the respiratory system (nasal cavity, middle ear, and sinuses; larynx; lung and bronchus; pleura; trachea, mediastinum, and other respiratory); cancers of the mesothelioma; bones and joints; and soft tissue, including heart; skin cancers, including melanomas and other non-epithelial skin cancers; Kaposi's sarcoma and breast cancer; cancer of the female genital system (cervix uteri; corpus uteri; uterus, nos; ovary; vagina; vulva; and other female genital); cancers of the male genital system (prostate gland; testis; penis; and other male genital); cancers of the urinary system (urinary bladder; kidney and renal pelvis; ureter; and other urinary); cancers of the eye and orbit; cancers of the brain and nervous system (brain; and other nervous system); cancers of the endocrine system (thyroid gland and other endocrine, including thymus); lymphomas (Hodgkin's disease and non-Hodgkin's lymphoma), multiple myeloma, and leukemias (lymphocytic leukemia; myeloid leukemia; monocytic leukemia; and other leukemias).

[0031] Other cancers, classified by histological type, that may be associated with the sequences of the invention include, but are not limited to, Neoplasm, malignant; Carcinoma, NOS; Carcinoma, undifferentiated, NOS; Giant and spindle cell carcinoma; Small cell carcinoma, NOS; Papillary carcinoma, NOS; Squamous cell carcinoma, NOS; Lymphoepithelial carcinoma; Basal cell carcinoma, NOS; Pilomatrix carcinoma; Transitional cell carcinoma, NOS; Papillary transitional cell carcinoma; Adenocarcinoma, NOS; Gastrinoma, malignant; Cholangiocarcinoma; Hepatocellular carcinoma, NOS; Combined hepatocellular carcinoma and cholangiocarcinoma; Trabecular adenocarcinoma; Adenoid cystic carcinoma; Adenocarcinoma in adenomatous polyp; Adenocarcinoma, familial polyposis coli; Solid carcinoma, NOS; Carcinoid tumor, malignant; Bronchiolo-alveolar adenocarcinoma; Papillary adenocarcinoma, NOS; Chromophobe carcinoma; Acidophil carcinoma; Oxyphilic adenocarcinoma; Basophil carcinoma; Clear cell adenocarcinoma, NOS; Granular cell carcinoma; Follicular adenocarcinoma, NOS; Papillary and follicular adenocarcinoma; Nonencapsulating sclerosing carcinoma; Adrenal cortical carcinoma; Endometroid carcinoma; Skin appendage carcinoma; Apocrine adenocarcinoma; Sebaceous adenocarcinoma; Ceruminous adenocarcinoma; Mucoepidermoid carcinoma; Cystadenocarcinoma, NOS; Papillary cystadenocarcinoma, NOS; Papillary serous cystadenocarcinoma; Mucinous cystadenocarcinoma, NOS; Mucinous adenocarcinoma; Signet ring cell carcinoma; Infiltrating duct carcinoma; Medullary carcinoma, NOS; Lobular carcinoma; Inflammatory carcinoma; Paget's disease, mammary; Acinar cell carcinoma; Adenosquamous carcinoma; Adenocarcinoma w/squamous metaplasia; Thymoma, malignant; Ovarian stromal tumor, malignant; Thecoma, malignant; Granulosa cell tumor, malignant; Androblastoma, malignant; Sertoli cell carcinoma; Leydig cell tumor, malignant; Lipid cell tumor, malignant; Paraganglioma, malignant; Extra-mammary paraganglioma, malignant; Pheochromocytoma; Glomangiosarcoma; Malignant melanoma, NOS; Amelanotic melanoma; Superficial spreading melanoma; Malig melanoma in giant pigmented nevus; Epithelioid cell melanoma; Blue nevus, malignant; Sarcoma, NOS; Fibrosarcoma, NOS; Fibrous histiocytoma, malignant; Myxosarcoma; Liposarcoma, NOS; Leiomyosarcoma, NOS; Rhabdomyosarcoma, NOS; Embryonal rhabdomyosarcoma; Alveolar rhabdomyosarcoma; Stromal sarcoma, NOS; Mixed tumor, malignant, NOS; Mullerian mixed tumor; Nephroblastoma; Hepatoblastoma; Carcinosarcoma, NOS; Mesenchymoma, malignant; Brenner tumor, malignant; Phyllodes tumor, malignant; Synovial sarcoma, NOS; Mesothelioma, malignant; Dysgerminoma; Embryonal carcinoma, NOS; Teratoma, malignant, NOS; Struma ovarii, malignant; Choriocarcinoma; Mesonephroma, malignant; Hemangiosarcoma; Hemangioendothelioma, malignant; Kaposi's sarcoma; Hemangiopericytoma, malignant; Lymphangiosarcoma; Osteosarcoma, NOS; Juxtacortical osteosarcoma; Chondrosarcoma, NOS; Chondroblastoma, malignant; Mesenchymal chondrosarcoma; Giant cell tumor of bone; Ewing's sarcoma; Odontogenic tumor, malignant; Ameloblastic odontosarcoma; Ameloblastoma, malignant; Ameloblastic fibrosarcoma; Pinealoma, malignant; Chordoma; Glioma, malignant; Ependymoma, NOS; Astrocytoma, NOS; Protoplasmic astrocytoma; Fibrillary astrocytoma; Astroblastoma; Glioblastoma, NOS; Oligodendroglioma, NOS; Oligodendroblastoma; Primitive neuroectodermal; Cerebellar sarcoma, NOS; Ganglioneuroblastoma; Neuroblastoma, NOS; Retinoblastoma, NOS; Olfactory neurogenic tumor; Meningioma, malignant; Neurofibrosarcoma; Neurilemmoma, malignant; Granular cell tumor, malignant; Malignant lymphoma, NOS; Hodgkin's disease, NOS; Hodgkin's; paragranuloma, NOS; Malignant lymphoma, small lymphocytic; Malignant lymphoma, large cell, diffuse; Malignant lymphoma, follicular, NOS; Mycosis fungoides; Other specified non-Hodgkin's lymphomas; Malignant histiocytosis; Multiple myeloma; Mast cell sarcoma; Immunoproliferative small intestinal disease; Leukemia, NOS; Lymphoid leukemia, NOS; Plasma cell leukemia; Erythroleukemia; Lymphosarcoma cell leukemia; Myeloid leukemia, NOS; Basophilic leukemia; Eosinophilic leukemia; Monocytic leukemia, NOS; Mast cell leukemia; Megakaryoblastic leukemia; Myeloid sarcoma; and Hairy cell leukemia.

[0032] In addition, the CA genes may be involved in other diseases such as, but not limited to, diseases associated with aging or neurodegeneration.

[0033] “Association” in this context means that the nucleotide or protein sequences are either differentially expressed, activated, inactivated or altered in cancers as compared to normal tissue. As outlined below, CA sequences include those that are up-regulated (i.e. expressed at a higher level), as well as those that are down-regulated (i.e. expressed at a lower level), in cancers. CA sequences also include sequences that have been altered (i.e., truncated sequences or sequences with substitutions, deletions or insertions, including point mutations) and show either the same expression profile or an altered profile. In a preferred embodiment, the CA sequences are from humans; however, as will be appreciated by those in the art, CA sequences from other organisms may be useful in animal models of disease and drug evaluation; thus, other CA sequences are provided, from vertebrates, including mammals, including rodents (rats, mice, hamsters, guinea pigs, etc.), primates, and farm animals (including sheep, goats, pigs, cows, horses, etc). In some cases, prokaryotic CA sequences may be useful. CA sequences from other organisms may be obtained using the techniques outlined below.

[0034] CA sequences include both nucleic acid and amino acid sequences. In a preferred embodiment, the CA sequences are recombinant nucleic acids. By the term “recombinant nucleic acid” herein is meant nucleic acid, originally formed in vitro, in general, by the manipulation of nucleic acid by polymerases and endonucleases, in a form not normally found in nature. Thus a recombinant nucleic acid is also an isolated nucleic acid, in a linear form, or cloned in a vector formed in vitro by ligating DNA molecules that are not normally joined, are both considered recombinant for the purposes of this invention. It is understood that once a recombinant nucleic acid is made and reintroduced into a host cell or organism, it will replicate using the in vivo cellular machinery of the host cell rather than in vitro manipulations; however, such nucleic acids, once produced recombinantly, although subsequently replicated in vivo, are still considered recombinant or isolated for the purposes of the invention. As used herein a “polynucleotide” or “nucleic acid” is a polymeric form of nucleotides of any length, either ribonucleotides or deoxyribonucleotides. This term refers only to the primary structure of the molecule. Thus, this term includes double- and single-stranded DNA and RNA. It also includes known types of modifications, for example, labels which are known in the art, methylation, “caps”, substitution of one or more of the naturally occurring nucleotides with an analog, internucleotide modifications such as, for example, those with uncharged linkages (e.g., phosphorothioates, phosphorodithioates, etc.), those containing pendant moieties, such as, for example proteins (including e.g., nucleases, toxins, antibodies, signal peptides, poly-L-lysine, etc.), those with intercalators (e.g., acridine, psoralen, etc.), those containing chelators (e.g., metals, radioactive metals, etc.), those containing alkylators, those with modified linkages (e.g., alpha anomeric nucleic acids, etc.), as well as unmodified forms of the polynucleotide.

[0035] As used herein, a polynucleotide “derived from” a designated sequence refers to a polynucleotide sequence which is comprised of a sequence of approximately at least about 6 nucleotides, preferably at least about 8 nucleotides, more preferably at least about 10-12 nucleotides, and even more preferably at least about 15-20 nucleotides corresponding to a region of the designated nucleotide sequence. “Corresponding” means homologous to or complementary to the designated sequence. Preferably, the sequence of the region from which the polynucleotide is derived is homologous to or complementary to a sequence that is unique to a CA gene.

[0036] Similarly, a “recombinant protein” is a protein made using recombinant techniques, i.e. through the expression of a recombinant nucleic acid as depicted above. A recombinant protein is distinguished from naturally occurring protein by at least one or more characteristics. For example, the protein may be isolated or purified away from some or all of the proteins and compounds with which it is normally associated in its wild type host, and thus may be substantially pure. For example, an isolated protein is unaccompanied by at least some of the material with which it is normally associated in its natural state, preferably constituting at least about 0.5%, more preferably at least about 5% by weight of the total protein in a given sample. A substantially pure protein comprises about 50-75% by weight of the total protein, with about 80% being preferred, and about 90% being particularly preferred. The definition includes the production of a CA protein from one organism in a different organism or host cell. Alternatively, the protein may be made at a significantly higher concentration than is normally seen, through the use of an inducible promoter or high expression promoter, such that the protein is made at increased concentration levels. Alternatively, the protein may be in a form not normally found in nature, as in the addition of an epitope tag or amino acid substitutions, insertions and deletions, as discussed below.

[0037] In a preferred embodiment, the CA sequences are nucleic acids. As will be appreciated by those in the art and is more fully outlined below, CA sequences are useful in a variety of applications, including diagnostic applications, which will detect naturally occurring nucleic acids, as well as screening applications; for example, biochips comprising nucleic acid probes to the CA sequences can be generated. In the broadest sense, use of “nucleic acid,” “polynucleotide” or “oligonucleotide” or equivalents herein means at least two nucleotides covalently linked together. In some embodiments, an oligonucleotide is an oligomer of 6, 8, 10, 12, 20, 30 or up to 100 nucleotides. A “polynucleotide” or “oligonucleotide” may comprise DNA, RNA, PNA or a polymer of nucleotides linked by phosphodiester and/or any alternate bonds.

[0038] A nucleic acid of the present invention generally contains phosphodiester bonds, although in some cases, as outlined below (for example, in antisense applications or when a nucleic acid is a candidate drug agent), nucleic acid analogs may have alternate backbones, comprising, for example, phosphoramidate (Beaucage et al., Tetrahedron 49(10):1925 (1993) and references therein; Letsinger, J. Org. Chem. 35:3800 (1970); Sprinzl et al., Eur. J. Biochem. 81:579 (1977); Letsinger et. al., Nucl. Acids Res. 14:3487 (1986); Sawai et al, Chem. Lett. 805 (1984), Letsinger et al., J. Am. Chem. Soc. 110:4470 (1988); and Pauwels et al., Chemica Scripta 26:141 91986)), phosphorothioate (Mag et al., Nucleic Acids Res. 19:1437 (1991); and U.S. Pat. No. 5,644,048), phosphorodithioate (Briu et al., J. Am. Chem. Soc. 111:2321 (1989), O-methylphosphoroamidite linkages (see Eckstein, Oligonucleotides and Analogues: A Practical Approach, Oxford University Press), and peptide nucleic acid backbones and linkages (see Egholm, J. Am. Chem. Soc. 114:1895 (1992); Meier et al., Chem. Int. Ed. Engl. 31:1008 (1992); Nielsen, Nature, 365:566 (1993); Carlsson et al., Nature 380:207 (1996), all of which are incorporated by reference). Other analog nucleic acids include those with positive backbones (Denpcy et al., Proc. Natl. Acad. Sci. USA 92:6097 (1995); non-ionic backbones (U.S. Pat. Nos. 5,386,023, 5,637,684, 5,602,240, 5,216,141 and 4,469,863; Kiedrowshi et al., Angew. Chem. Intl. Ed. English 30:423 (1991); Letsinger et al., J. Am. Chem. Soc. 110:4470 (1988); Letsinger et al., Nucleoside & Nucleotide 13:1597 (1994); Chapters 2 and 3, ASC Symposium Series 580, “Carbohydrate Modifications in Antisense Research”, Ed. Y. S. Sanghui and P. Dan Cook; Mesmaeker et al., Bioorganic & Medicinal Chem. Lett. 4:395 (1994); Jeffs et al., J. Biomolecular NMR 34:17 (1994); Tetrahedron Lett. 37:743 (1996)) and non-ribose backbones, including those described in U.S. Pat. Nos. 5,235,033 and 5,034,506, and Chapters 6 and 7, ASC Symposium Series 580, “Carbohydrate Modifications in Antisense Research”, Ed. Y. S. Sanghui and P. Dan Cook. Nucleic acids containing one or more carbocyclic sugars are also included within one definition of nucleic acids (see Jenkins et al., Chem. Soc. Rev. (1995) pp 169-176). Several nucleic acid analogs are described in Rawls, C & E News Jun. 2, 1997 page 35. All of these references are hereby expressly incorporated by reference. These modifications of the ribose-phosphate backbone may be done for a variety of reasons, for example to increase the stability and half-life of such molecules in physiological environments for use in anti-sense applications or as probes on a biochip.

[0039] As will be appreciated by those in the art, all of these nucleic acid analogs may find use in the present invention. In addition, mixtures of naturally occurring nucleic acids and analogs can be made; alternatively, mixtures of different nucleic acid analogs, and mixtures of naturally occurring nucleic acids and analogs may be made.

[0040] The nucleic acids may be single stranded or double stranded, as specified, or contain portions of both double stranded or single stranded sequence. As will be appreciated by those in the art, the depiction of a single strand “Watson” also defines the sequence of the other strand “Crick”; thus the sequences described herein also includes the complement of the sequence. The nucleic acid may be DNA, both genomic and cDNA, RNA, or a hybrid, where the nucleic acid contains any combination of deoxyribo- and ribo-nucleotides, and any combination of bases, including uracil, adenine, thymine, cytosine, guanine, inosine, xanthine, hypoxanthine, isocytosine, isoguanine, etc. As used herein, the term “nucleoside” includes nucleotides and nucleoside and nucleotide analogs, and modified nucleosides such as amino modified nucleosides. In addition, “nucleoside” includes non-naturally occurring analog structures. Thus for example the individual units of a peptide nucleic acid, each containing a base, are referred to herein as a nucleoside.

[0041] As used herein, the term “tag,” “sequence tag” or “primer tag sequence” refers to an oligonucleotide with specific nucleic acid sequence that serves to identify a batch of polynucleotides bearing such tags therein. Polynucleotides from the same biological source are covalently tagged with a specific sequence tag so that in subsequent analysis the polynucleotide can be identified according to its source of origin. The sequence tags also serve as primers for nucleic acid amplification reactions.

[0042] A “microarray” is a linear or two-dimensional array of preferably discrete regions, each having a defined area, formed on the surface of a solid support. The density of the discrete regions on a microarray is determined by the total numbers of target polynucleotides to be detected on the surface of a single solid phase support, preferably at least about 50/cm², more preferably at least about 100/cm², even more preferably at least about 500/cm², and still more preferably at least about 1,000/cm². As used herein, a DNA microarray is an array of oligonucleotide primers placed on a chip or other surfaces used to amplify or clone target polynucleotides. Since the position of each particular group of primers in the array is known, the identities of the target polynucleotides can be determined based on their binding to a particular position in the microarray.

[0043] A “linker” is a synthetic oligodeoxyribonucleotide that contains a restriction site. A linker may be blunt end-ligated onto the ends of DNA fragments to create restriction sites that can be used in the subsequent cloning of the fragment into a vector molecule.

[0044] The term “label” refers to a composition capable of producing a detectable signal indicative of the presence of the target polynucleotide in an assay sample. Suitable labels include radioisotopes, nucleotide chromophores, enzymes, substrates, fluorescent molecules, chemiluminescent moieties, magnetic particles, bioluminescent moieties, and the like. As such, a label is any composition detectable by spectroscopic, photochemical, biochemical, immunochemical, electrical, optical, chemical, or any other appropriate means. The term “label” is used to refer to any chemical group or moiety having a detectable physical property or any compound capable of causing a chemical group or moiety to exhibit a detectable physical property, such as an enzyme that catalyzes conversion of a substrate into a detectable product. The term “label” also encompasses compounds that inhibit the expression of a particular physical property. The label may also be a compound that is a member of a binding pair, the other member of which bears a detectable physical property.

[0045] The term “support” refers to conventional supports such as beads, particles, dipsticks, fibers, filters, membranes, and silane or silicate supports such as glass slides.

[0046] The term “amplify” is used in the broad sense to mean creating an amplification product which may include, for example, additional target molecules, or target-like molecules or molecules complementary to the target molecule, which molecules are created by virtue of the presence of the target molecule in the sample. In the situation where the target is a nucleic acid, an amplification product can be made enzymatically with DNA or RNA polymerases or reverse transcriptases.

[0047] As used herein, a “biological sample” refers to a sample of tissue or fluid isolated from an individual, including but not limited to, for example, blood, plasma, serum, spinal fluid, lymph fluid, skin, respiratory, intestinal and genitourinary tracts, tears, saliva, milk, cells (including but not limited to blood cells), tumors, organs, and also samples of in vitro cell culture constituents.

[0048] The term “biological sources” as used herein refers to the sources from which the target polynucleotides are derived. The source can be of any form of “sample” as described above, including but not limited to, cell, tissue or fluid. “Different biological sources” can refer to different cells/tissues/organs of the same individual, or cells/tissues/organs from different individuals of the same species, or cells/tissues/organs from different species.

Cancer-Associated Sequences

[0049] The CA sequences of the invention were initially identified by infection of mice with a retrovirus such as murine leukemia virus (MLV) resulting in lymphoma. Retroviruses have a genome that is made out of RNA. After a retrovirus infects a host cell, a double stranded DNA copy of the retrovirus genome (a “provirus”) is inserted into the genomic DNA of the host cell. The integrated provirus may affect the expression of host genes at or near the site of integration—a phenomenon known as retroviral insertional mutagenesis. Possible changes in the expression of host cell genes include: (i) increased expression of genes near the site of integration resulting from the proximity of elements in the provirus that act as transcriptional promoters and enhancers, (ii) functional inactivation of a gene caused by the integration of a provirus into the gene itself thus preventing the synthesis of a functional gene product, or (iii) expression of a mutated protein that has a different activity to the normal protein. Typically such a protein would be prematurely truncated and lack a regulatory domain near the C terminus. Such a protein might be constitutively active, or act as a dominant negative inhibitor of the normal protein. For example, retrovirus enhancers, including that of SL3-3, are known to act on genes up to approximately 200 kilobases from the insertion site. Moreover, many of these sequences are also involved in other cancers and disease states. Sequences of mouse genes according to this invention, that are identified in this manner are shown as mDxx-yyy in Tables 1-129.

[0050] A CA sequence can be initially identified by substantial nucleic acid and/or amino acid sequence homology to the CA sequences outlined herein. Such homology can be based upon the overall nucleic acid or amino acid sequence, and is generally determined as outlined below, using either homology programs or hybridization conditions.

[0051] In one embodiment, CA sequences are those that are up-regulated in cancers; that is, the expression of these genes is higher in cancer tissue as compared to normal tissue of the same differentiation stage. “Up-regulation” as used herein means increased expression by about 50%, preferably about 100%, more preferably about 150% to about 200%, with up-regulation from 300% to 1000% being preferred.

[0052] In another embodiment, CA sequences are those that are down-regulated in cancers; that is, the expression of these genes is lower in cancer tissue as compared to normal tissue of the same differentiation stage. “Down-regulation” as used herein means decreased expression by about 50%, preferably about 100%, more preferably about 150% to about 200%, with down-regulation from 300% to 1000% to no expression being preferred.

[0053] In yet another embodiment, CA sequences are those that have altered sequences but show either the same or an altered expression profile as compared to normal lymphoid tissue of the same differentiation stage. “Altered CA sequences” as used herein also refers to sequences that are truncated, contain insertions or contain point mutations.

[0054] CA proteins of the present invention may be classified as secreted proteins, transmembrane proteins or intracellular proteins. In a preferred embodiment the CA protein is an intracellular protein. Intracellular proteins may be found in the cytoplasm and/or in the nucleus. Intracellular proteins are involved in all aspects of cellular function and replication (including, for example, signaling pathways); aberrant expression of such proteins results in unregulated or disregulated cellular processes. For example, many intracellular proteins have enzymatic activity such as protein kinase activity, protein phosphatase activity, protease activity, nucleotide cyclase activity, polymerase activity and the like. Intracellular proteins also serve as docking proteins that are involved in organizing complexes of proteins, or targeting proteins to various subcellular localizations, and are involved in maintaining the structural integrity of organelles.

[0055] An increasingly appreciated concept in characterizing intracellular proteins is the presence in the proteins of one or more motifs for which defined functions have been attributed. In addition to the highly conserved sequences found in the enzymatic domain of proteins, highly conserved sequences have been identified in proteins that are involved in protein-protein interaction. For example, Src-homology-2 (SH2) domains bind tyrosine-phosphorylated targets in a sequence dependent manner. PTB domains, which are distinct from SH2 domains, also bind tyrosine phosphorylated targets. SH3 domains bind to proline-rich targets. In addition, PH domains, tetratricopeptide repeats and WD domains to name only a few, have been shown to mediate protein-protein interactions. Some of these may also be involved in binding to phospholipids or other second messengers. As will be appreciated by one of ordinary skill in the art, these motifs can be identified on the basis of primary sequence; thus, an analysis of the sequence of proteins may provide insight into both the enzymatic potential of the molecule and/or molecules with which the protein may associate.

[0056] In a preferred embodiment, the CA sequences are transmembrane proteins. Transmembrane proteins are molecules that span the phospholipid bilayer of a cell. They may have an intracellular domain, an extracellular domain, or both. The intracellular domains of such proteins may have a number of functions including those already described for intracellular proteins. For example, the intracellular domain may have enzymatic activity and/or may serve as a binding site for additional proteins. Frequently the intracellular domain of transmembrane proteins serves both roles. For example certain receptor tyrosine kinases have both protein kinase activity and SH2 domains. In addition, autophosphorylation of tyrosines on the receptor molecule itself creates binding sites for additional SH2 domain containing proteins.

[0057] Transmembrane proteins may contain from one to many transmembrane domains. For example, receptor tyrosine kinases, certain cytokine receptors, receptor guanylyl cyclases and receptor serine/threonine protein kinases contain a single transmembrane domain. However, various other proteins including channels and adenylyl cyclases contain numerous transmembrane domains. Many important cell surface receptors are classified as “seven transmembrane domain” proteins, as they contain 7 membrane spanning regions. Important transmembrane protein receptors include, but are not limited to insulin receptor, insulin-like growth factor receptor, human growth hormone receptor, glucose transporters, transferrin receptor, epidermal growth factor receptor, low density lipoprotein receptor, leptin receptor, interleukin receptors, e.g. IL-1 receptor, IL-2 receptor, etc. CA proteins may be derived from genes that regulate apoptosis (IL-3, GM-CSF and Bcl-x) or are shown to have a role in the regulation of apoptosis.

[0058] Characteristics of transmembrane domains include approximately 20 consecutive hydrophobic amino acids that may be followed by charged amino acids. Therefore, upon analysis of the amino acid sequence of a particular protein, the localization and number of transmembrane domains within the protein may be predicted.

[0059] The extracellular domains of transmembrane proteins are diverse; however, conserved motifs are found repeatedly among various extracellular domains. Conserved structure and/or functions have been ascribed to different extracellular motifs. For example, cytokine receptors are characterized by a cluster of cysteines and a WSXWS (W=tryptophan, S=serine, X=any amino acid) motif. Immunoglobulin-like domains are highly conserved. Mucin-like domains may be involved in cell adhesion and leucine-rich repeats participate in protein-protein interactions.

[0060] Many extracellular domains are involved in binding to other molecules. In one aspect, extracellular domains are receptors. Factors that bind the receptor domain include circulating ligands, which may be peptides, proteins, or small molecules such as adenosine and the like. For example, growth factors such as EGF, FGF and PDGF are circulating growth factors that bind to their cognate receptors to initiate a variety of cellular responses. Other factors include cytokines, mitogenic factors, neurotrophic factors and the like. Extracellular domains also bind to cell-associated molecules. In this respect, they mediate cell-cell interactions. Cell-associated ligands can be tethered to the cell for example via a glycosylphosphatidylinositol (GPI) anchor, or may themselves be transmembrane proteins. Extracellular domains also associate with the extracellular matrix and contribute to the maintenance of the cell structure.

[0061] CA proteins that are transmembrane are particularly preferred in the present invention as they are good targets for immunotherapeutics, as are described herein. In addition, as outlined below, transmembrane proteins can be also useful in imaging modalities.

[0062] It will also be appreciated by those in the art that a transmembrane protein can be made soluble by removing transmembrane sequences, for example through recombinant methods. Furthermore, transmembrane proteins that have been made soluble can be made to be secreted through recombinant means by adding an appropriate signal sequence.

[0063] In a preferred embodiment, the CA proteins are secreted proteins; the secretion of which can be either constitutive or regulated. These proteins have a signal peptide or signal sequence that targets the molecule to the secretory pathway. Secreted proteins are involved in numerous physiological events; by virtue of their circulating nature, they serve to transmit signals to various other cell types. The secreted protein may function in an autocrine manner (acting on the cell that secreted the factor), a paracrine manner (acting on cells in close proximity to the cell that secreted the factor) or an endocrine manner (acting on cells at a distance). Thus secreted molecules find use in modulating or altering numerous aspects of physiology. CA proteins that are secreted proteins are particularly preferred in the present invention as they serve as good targets for diagnostic markers, for example for blood tests.

CA Sequences and Homologs

[0064] A CA sequence is initially identified by substantial nucleic acid and/or amino acid sequence homology to the CA sequences outlined herein. Such homology can be based upon the overall nucleic acid or amino acid sequence, and is generally determined as outlined below, using either homology programs or hybridization conditions.

[0065] As used herein, a nucleic acid is a “CA nucleic acid” if the overall homology of the nucleic acid sequence to one of the nucleic acids of Tables 1-129 is preferably greater than about 75%, more preferably greater than about 80%, even more preferably greater than about 85% and most preferably greater than 90%. In some embodiments the homology will be as high as about 93 to 95 or 98%. In a preferred embodiment, the sequences that are used to determine sequence identity or similarity are selected from those of the nucleic acids of Tables 1-129. In another embodiment, the sequences are naturally occurring allelic variants of the sequences of the nucleic acids of Tables 1-129. In another embodiment, the sequences are sequence variants as further described herein.

[0066] Homology in this context means sequence similarity or identity, with identity being preferred. A preferred comparison for homology purposes is to compare the sequence containing sequencing errors to the correct sequence. This homology will be determined using standard techniques known in the art, including, but not limited to, the local homology algorithm of Smith & Waterman, Adv. Appl. Math. 2:482 (1981), by the homology alignment algorithm of Needleman & Wunsch, J. Mol. Biol. 48:443 (1970), by the search for similarity method of Pearson & Lipman, PNAS USA 85:2444 (1988), by computerized implementations of these algorithms (GAP, BESTFIT, FASTA, and TFASTA in the Wisconsin Genetics Software Package, Genetics Computer Group, 575 Science Drive, Madison, Wis.), the Best Fit sequence program described by Devereux et al., Nucl. Acid Res. 12:387-395 (1984), preferably using the default settings, or by inspection.

[0067] One example of a useful algorithm is PILEUP. PILEUP creates a multiple sequence alignment from a group of related sequences using progressive, pairwise alignments. It can also plot a tree showing the clustering relationships used to create the alignment. PILEUP uses a simplification of the progressive alignment method of Feng & Doolittle, J. Mol. Evol. 35:351-360 (1987); the method is similar to that described by Higgins & Sharp CABIOS 5:151-153 (1989). Useful PILEUP parameters include a default gap weight of 3.00, a default gap length weight of 0.10, and weighted end gaps.

[0068] Another example of a useful algorithm is the BLAST (Basic Local Alignment Search Tool) algorithm, described in Altschul et al., J. Mol. Biol. 215, 403-410, (1990) and Karlin et al., PNAS USA 90:5873-5787 (1993). A particularly useful BLAST program is the WU-BLAST-2 program which was obtained from Altschul et al., Methods in Enzymology, 266: 460-480 (1996); http://blast.wustl.edu/]. WU-BLAST-2 uses several search parameters, most of which are set to the default values. The adjustable parameters are set with the following values: overlap span=1, overlap fraction=0.125, word threshold (T)=11. The HSP S and HSP S2 parameters are dynamic values and are established by the program itself depending upon the composition of the particular sequence and composition of the particular database against which the sequence of interest is being searched; however, the values may be adjusted to increase sensitivity. A percent amino acid sequence identity value is determined by the number of matching identical residues divided by the total number of residues of the “longer” sequence in the aligned region. The “longer” sequence is the one having the most actual residues in the aligned region (gaps introduced by WU-Blast-2 to maximize the alignment score are ignored).

[0069] Thus, “percent (%) nucleic acid sequence identity” is defined as the percentage of nucleotide residues in a candidate sequence that are identical with the nucleotide residues of the nucleic acids of Tables 1-129. A preferred method utilizes the BLASTN module of WU-BLAST-2 set to the default parameters, with overlap span and overlap fraction set to 1 and 0.125, respectively.

[0070] The alignment may include the introduction of gaps in the sequences to be aligned. In addition, for sequences which contain either more or fewer nucleotides than those of the nucleic acids of Tables 1-129, it is understood that the percentage of homology will be determined based on the number of homologous nucleosides in relation to the total number of nucleosides. Thus homology of sequences shorter than those of the sequences identified herein will be determined using the number of nucleosides in the shorter sequence.

[0071] In another embodiment of the invention, polynucleotide compositions are provided that are capable of hybridizing under moderate to high stringency conditions to a polynucleotide sequence provided herein, or a fragment thereof, or a complementary sequence thereof. Hybridization techniques are well known in the art of molecular biology. For purposes of illustration, suitable moderately stringent conditions for testing the hybridization of a polynucleotide of this invention with other polynucleotides include prewashing in a solution of 5×SSC (“saline sodium citrate”; 9 mM NaCl, 0.9 mM sodium citrate), 0.5% SDS, 1.0 mM EDTA (pH 8.0); hybridizing at 50-60° C., 5×SSC, overnight; followed by washing twice at 65° C. for 20 minutes with each of 2×, 0.5× and 0.2×SSC containing 0.1% SDS. One skilled in the art will understand that the stringency of hybridization can be readily manipulated, such as by altering the salt content of the hybridization solution and/or the temperature at which the hybridization is performed. For example, in another embodiment, suitable highly stringent hybridization conditions include those described above, with the exception that the temperature of hybridization is increased, e.g., to 60-65° C., or 65-70° C. Stringent conditions may also be achieved with the addition of destabilizing agents such as formamide.

[0072] Thus nucleic acids that hybridize under high stringency to the nucleic acids identified in the figures, or their complements, are considered CA sequences. High stringency conditions are known in the art; see for example Maniatis et al., Molecular Cloning: A Laboratory Manual, 2d Edition, 1989, and Short Protocols in Molecular Biology, ed. Ausubel, et al., both of which are hereby incorporated by reference. Stringent conditions are sequence-dependent and will be different in different circumstances. Longer sequences hybridize specifically at higher temperatures. An extensive guide to the hybridization of nucleic acids is found in Tijssen, Techniques in Biochemistry and Molecular Biology—Hybridization with Nucleic Acid Probes, “Overview of principles of hybridization and the strategy of nucleic acid assays” (1993). Generally, stringent conditions are selected to be about 5-10° C. lower than the thermal melting point (Tₘ) for the specific sequence at a defined ionic strength pH. The Tₘ is the temperature (under defined ionic strength, pH and nucleic acid concentration) at which 50% of the probes complementary to the target hybridize to the target sequence at equilibrium (as the target sequences are present in excess, at Tₘ, 50% of the probes are occupied at equilibrium). Stringent conditions will be those in which the salt concentration is less than about 1.0 M sodium ion, typically about 0.01 to 1.0 M sodium ion concentration (or other salts) at pH 7.0 to 8.3 and the temperature is at least about 30° C. for short probes (e.g. 10 to 50 nucleotides) and at least about 60° C. for longer probes (e.g. greater than 50 nucleotides). In another embodiment, less stringent hybridization conditions are used; for example, moderate or low stringency conditions may be used, as are known in the art; see Maniatis and Ausubel, supra, and Tijssen, supra.

[0073] In addition, the CA nucleic acid sequences of the invention are fragments of larger genes, i.e. they are nucleic acid segments. Alternatively, the CA nucleic acid sequences can serve as indicators of oncogene position, for example, the CA sequence may be an enhancer that activates a protooncogene. “Genes” in this context includes coding regions, non-coding regions, and mixtures of coding and non-coding regions. Accordingly, as will be appreciated by those in the art, using the sequences provided herein, additional sequences of the CA genes can be obtained, using techniques well known in the art for cloning either longer sequences or the full-length sequences; see Maniatis et al., and Ausubel, et al., supra, hereby expressly incorporated by reference. In general, this is done using PCR, for example, kinetic PCR.

Detection of CA Expression

[0074] Once the CA nucleic acid is identified, it can be cloned and, if necessary, its constituent parts recombined to form the entire CA nucleic acid. Once isolated from its natural source, e.g., contained within a plasmid or other vector or excised therefrom as a linear nucleic acid segment, the recombinant CA nucleic acid can be further used as a probe to identify and isolate other CA nucleic acids, for example additional coding regions. It can also be used as a “precursor” nucleic acid to make modified or variant CA nucleic acids and proteins. In a preferred embodiment, once a CA gene is identified its nucleotide sequence is used to design probes specific for the CA gene.

[0075] The CA nucleic acids of the present invention are used in several ways. In a first embodiment, nucleic acid probes hybridizable to CA nucleic acids are made and attached to biochips to be used in screening and diagnostic methods, or for gene therapy and/or antisense applications. Alternatively, the CA nucleic acids that include coding regions of CA proteins can be put into expression vectors for the expression of CA proteins, again either for screening purposes or for administration to a patient.

[0076] Recent developments in DNA microarray technology make it possible to conduct a large scale assay of a plurality of target CA nucleic acid molecules on a single solid phase support. U.S. Pat. No. 5,837,832 (Chee et al.) and related patent applications describe immobilizing an array of oligonucleotide probes for hybridization and detection of specific nucleic acid sequences in a sample. Target polynucleotides of interest isolated from a tissue of interest are hybridized to the DNA chip and the specific sequences detected based on the target polynucleotides' preference and degree of hybridization at discrete probe locations. One important use of arrays is in the analysis of differential gene expression, where the profile of expression of genes in different cells, often a cell of interest and a control cell, is compared and any differences in gene expression among the respective cells are identified. Such information is useful for the identification of the types of genes expressed in a particular cell or tissue type and diagnosis of cancer conditions based on the expression profile.

[0077] Typically, RNA from the sample of interest is subjected to reverse transcription to obtain labeled cDNA. See U.S. Pat. No. 6,410,229 (Lockhart et al.) The cDNA is then hybridized to oligonucleotides or cDNAs of known sequence arrayed on a chip or other surface in a known order. The location of the oligonucleotide to which the labeled cDNA hybridizes provides sequence information on the cDNA, while the amount of labeled hybridized RNA or cDNA provides an estimate of the relative representation of the RNA or cDNA of interest. See Schena, et al. Science 270:467-470 (1995). For example, use of a cDNA microarray to analyze gene expression patterns in human cancer is described by DeRisi, et al. (Nature Genetics 14:457-460 (1996)).

[0078] In a preferred embodiment, nucleic acid probes corresponding to CA nucleic acids (both the nucleic acid sequences outlined in the figures and/or the complements thereof) are made. Typically, these probes are synthesized based on the disclosed sequences of this invention. The nucleic acid probes attached to the biochip are designed to be substantially complementary to the CA nucleic acids, i.e. the target sequence (either the target sequence of the sample or to other probe sequences, for example in sandwich assays), such that specific hybridization of the target sequence and the probes of the present invention occurs. As outlined below, this complementarity need not be perfect, in that there may be any number of base pair mismatches that will interfere with hybridization between the target sequence and the single stranded nucleic acids of the present invention. It is expected that the overall homology of the genes at the nucleotide level probably will be about 40% or greater, probably about 60% or greater, and even more probably about 80% or greater; and in addition that there will be corresponding contiguous sequences of about 8-12 nucleotides or longer. However, if the number of mutations is so great that no hybridization can occur under even the least stringent of hybridization conditions, the sequence is not a complementary target sequence. Thus, by “substantially complementary” herein is meant that the probes are sufficiently complementary to the target sequences to hybridize under normal reaction conditions, particularly high stringency conditions, as outlined herein. Whether or not a sequence is unique to a CA gene according to this invention can be determined by techniques known to those of skill in the art. For example, the sequence can be compared to sequences in databanks, e.g., GeneBank, to determine whether it is present in the uninfected host or other organisms. The sequence can also be compared to the known sequences of other viral agents, including those that are known to induce cancer.

[0079] A nucleic acid probe is generally single stranded but can be partly single and partly double stranded. The strandedness of the probe is dictated by the structure, composition, and properties of the target sequence. In general, the oligonucleotide probes range from about 6, 8, 10, 12, 15, 20, 30 to about 100 bases long, with from about 10 to about 80 bases being preferred, and from about 30 to about 50 bases being particularly preferred. That is, generally entire genes are rarely used as probes. In some embodiments, much longer nucleic acids can be used, up to hundreds of bases. The probes are sufficiently specific to hybridize to complementary template sequence under conditions known by those of skill in the art. The number of mismatches between the probes sequences and their complementary template (target) sequences to which they hybridize during hybridization generally do not exceed 15%, usually do not exceed 10% and preferably do not exceed 5%, as determined by FASTA (default settings).

[0080] Oligonucleotide probes can include the naturally-occurring heterocyclic bases normally found in nucleic acids (uracil, cytosine, thymine, adenine and guanine), as well as modified bases and base analogues. Any modified base or base analogue compatible with hybridization of the probe to a target sequence is useful in the practice of the invention. The sugar or glycoside portion of the probe can comprise deoxyribose, ribose, and/or modified forms of these sugars, such as, for example, 2′-O-alkyl ribose. In a preferred embodiment, the sugar moiety is 2′-deoxyribose; however, any sugar moiety that is compatible with the ability of the probe to hybridize to a target sequence can be used.

[0081] In one embodiment, the nucleoside units of the probe are linked by a phosphodiester backbone, as is well known in the art. In additional embodiments, internucleotide linkages can include any linkage known to one of skill in the art that is compatible with specific hybridization of the probe including, but not limited to phosphorothioate, methylphosphonate, sulfamate (e.g., U.S. Pat. No. 5,470,967) and polyamide (i.e., peptide nucleic acids). Peptide nucleic acids are described in Nielsen et al. (1991) Science 254: 1497-1500, U.S. Pat. No. 5,714,331, and Nielsen (1999) Curr. Opin. Biotechnol. 10:71-75.

[0082] In certain embodiments, the probe can be a chimeric molecule; i.e., can comprise more than one type of base or sugar subunit, and/or the linkages can be of more than one type within the same primer. The probe can comprise a moiety to facilitate hybridization to its target sequence, as are known in the art, for example, intercalators and/or minor groove binders. Variations of the bases, sugars, and internucleoside backbone, as well as the presence of any pendant group on the probe, will be compatible with the ability of the probe to bind, in a sequence-specific fashion, with its target sequence. A large number of structural modifications, both known and to be developed, are possible within these bounds. Advantageously, the probes according to the present invention may have structural characteristics such that they allow the signal amplification, such structural characteristics being, for example, branched DNA probes as those described by Urdea et al. (Nucleic Acids Symp. Ser., 24:197-200 (1991)) or in the European Patent No. EP-0225,807. Moreover, synthetic methods for preparing the various heterocyclic bases, sugars, nucleosides and nucleotides that form the probe, and preparation of oligonucleotides of specific predetermined sequence, are well-developed and known in the art. A preferred method for oligonucleotide synthesis incorporates the teaching of U.S. Pat. No. 5,419,966.

[0083] Multiple probes may be designed for a particular target nucleic acid to account for polymorphism and/or secondary structure in the target nucleic acid, redundancy of data and the like. In some embodiments, where more than one probe per sequence is used, either overlapping probes or probes to different sections of a single target CA gene are used. That is, two, three, four or more probes, with three being preferred, are used to build in a redundancy for a particular target. The probes can be overlapping (i.e. have some sequence in common), or specific for distinct sequences of a CA gene. When multiple target polynucleotides are to be detected according to the present invention, each probe or probe group corresponding to a particular target polynucleotide is situated in a discrete area of the microarray.

[0084] Probes may be in solution, such as in wells or on the surface of a micro-array, or attached to a solid support. Examples of solid support materials that can be used include a plastic, a ceramic, a metal, a resin, a gel and a membrane. Useful types of solid supports include plates, beads, magnetic material, microbeads, hybridization chips, membranes, crystals, ceramics and self-assembling monolayers. A preferred embodiment comprises a two-dimensional or three-dimensional matrix, such as a gel or hybridization chip with multiple probe binding sites (Pevzner et al., J. Biomol. Struc. & Dyn. 9:399-410, 1991; Maskos and Southern, Nuc. Acids Res. 20:1679-84, 1992). Hybridization chips can be used to construct very large probe arrays that are subsequently hybridized with a target nucleic acid. Analysis of the hybridization pattern of the chip can assist in the identification of the target nucleotide sequence. Patterns can be manually or computer analyzed, but it is clear that positional sequencing by hybridization lends itself to computer analysis and automation. Algorithms and software, which have been developed for sequence reconstruction, are applicable to the methods described herein (R. Drmanac et al., J. Biomol. Struc. & Dyn. 5:1085-1102, 1991; P. A. Pevzner, J. Biomol. Struc. & Dyn. 7:63-73, 1989).

[0085] As will be appreciated by those in the art, nucleic acids can be attached or immobilized to a solid support in a wide variety of ways. By “immobilized” herein is meant the association or binding between the nucleic acid probe and the solid support is sufficient to be stable under the conditions of binding, washing, analysis, and removal as outlined below. The binding can be covalent or non-covalent. By “non-covalent binding” and grammatical equivalents herein is meant one or more of either electrostatic, hydrophilic, and hydrophobic interactions. Included in non-covalent binding is the covalent attachment of a molecule, such as streptavidin, to the support and the non-covalent binding of the biotinylated probe to the streptavidin. By “covalent binding” and grammatical equivalents herein is meant that the two moieties, the solid support and the probe, are attached by at least one bond, including sigma bonds, pi bonds and coordination bonds. Covalent bonds can be formed directly between the probe and the solid support or can be formed by a cross linker or by inclusion of a specific reactive group on either the solid support or the probe or both molecules. Immobilization may also involve a combination of covalent and non-covalent interactions.

[0086] Nucleic acid probes may be attached to the solid support by covalent binding such as by conjugation with a coupling agent or by, covalent or non-covalent binding such as electrostatic interactions, hydrogen bonds or antibody-antigen coupling, or by combinations thereof. Typical coupling agents include biotin/avidin, biotin/streptavidin, Staphylococcus aureus protein A/IgG antibody F_{c} fragment, and streptavidin/protein A chimeras (T. Sano and C. R. Cantor, Bio/Technology 9:1378-81 (1991)), or derivatives or combinations of these agents. Nucleic acids may be attached to the solid support by a photocleavable bond, an electrostatic bond, a disulfide bond, a peptide bond, a diester bond or a combination of these sorts of bonds. The array may also be attached to the solid support by a selectively releasable bond such as 4,4′-dimethoxytrityl or its derivative. Derivatives which have been found to be useful include 3 or 4 [bis-(4-methoxyphenyl)]-methyl-benzoic acid, N-succinimidyl-3 or 4 [bis-(4-methoxyphenyl)]-methyl-benzoic acid, N-succinimidyl-3 or 4 [bis-(4-methoxyphenyl)]-hydroxymethyl-benzoic acid, N-succinimidyl-3 or 4 [bis-(4-methoxyphenyl)]-chloromethyl-benzoic acid, and salts of these acids.

[0087] In general, the probes are attached to the biochip in a wide variety of ways, as will be appreciated by those in the art. As described herein, the nucleic acids can either be synthesized first, with subsequent attachment to the biochip, or can be directly synthesized on the biochip.

[0088] The biochip comprises a suitable solid substrate. By “substrate” or “solid support” or other grammatical equivalents herein is meant any material that can be modified to contain discrete individual sites appropriate for the attachment or association of the nucleic acid probes and is amenable to at least one detection method. The solid phase support of the present invention can be of any solid materials and structures suitable for supporting nucleotide hybridization and synthesis. Preferably, the solid phase support comprises at least one substantially rigid surface on which the primers can be immobilized and the reverse transcriptase reaction performed. The substrates with which the polynucleotide microarray elements are stably associated may be fabricated from a variety of materials, including plastics, ceramics, metals, acrylamide, cellulose, nitrocellulose, glass, polystyrene, polyethylene vinyl acetate, polypropylene, polymethacrylate, polyethylene, polyethylene oxide, polysilicates, polycarbonates, Teflon®, fluorocarbons, nylon, silicon rubber, polyanhydrides, polyglycolic acid, polylactic acid, polyorthoesters, polypropylfumerate, collagen, glycosaminoglycans, and polyamino acids. Substrates may be two-dimensional or three-dimensional in form, such as gels, membranes, thin films, glasses, plates, cylinders, beads, magnetic beads, optical fibers, woven fibers, etc. A preferred form of array is a three-dimensional array. A preferred three-dimensional array is a collection of tagged beads. Each tagged bead has different primers attached to it. Tags are detectable by signaling means such as color (Luminex, Illumina) and electromagnetic field (Pharmaseq) and signals on tagged beads can even be remotely detected (e.g., using optical fibers). The size of the solid support can be any of the standard microarray sizes, useful for DNA microarray technology, and the size may be tailored to fit the particular machine being used to conduct a reaction of the invention. In general, the substrates allow optical detection and do not appreciably fluoresce.

[0089] In a preferred embodiment, the surface of the biochip and the probe may be derivatized with chemical functional groups for subsequent attachment of the two. Thus, for example, the biochip is derivatized with a chemical functional group including, but not limited to, amino groups, carboxy groups, oxo groups and thiol groups, with amino groups being particularly preferred. Using these functional groups, the probes can be attached using functional groups on the probes. For example, nucleic acids containing amino groups can be attached to surfaces comprising amino groups, for example using linkers as are known in the art; for example, homo- or hetero-bifunctional linkers as are well known (see 1994 Pierce Chemical Company catalog, technical section on cross-linkers, pages 155-200, incorporated herein by reference). In addition, in some cases, additional linkers, such as alkyl groups (including substituted and heteroalkyl groups) may be used.

[0090] In this embodiment, the oligonucleotides are synthesized as is known in the art, and then attached to the surface of the solid support. As will be appreciated by those skilled in the art, either the 5′ or 3′ terminus may be attached to the solid support, or attachment may be via an internal nucleoside. In an additional embodiment, the immobilization to the solid support may be very strong, yet non-covalent. For example, biotinylated oligonucleotides can be made, which bind to surfaces covalently coated with streptavidin, resulting in attachment.

[0091] The arrays may be produced according to any convenient methodology, such as preforming the polynucleotide microarray elements and then stably associating them with the surface. Alternatively, the oligonucleotides may be synthesized on the surface, as is known in the art. A number of different array configurations and methods for their production are known to those of skill in the art and disclosed in WO 95/25116 and WO 95/35505 (photolithographic techniques), U.S. Pat. No. 5,445,934 (in situ synthesis by photolithography), U.S. Pat. No. 5,384,261 (in situ synthesis by mechanically directed flow paths); and U.S. Pat. No. 5,700,637 (synthesis by spotting, printing or coupling); the disclosure of which are herein incorporated in their entirety by reference. Another method for coupling DNA to beads uses specific ligands attached to the end of the DNA to link to ligand-binding molecules attached to a bead. Possible ligand-binding partner pairs include biotin-avidin/streptavidin, or various antibody/antigen pairs such as digoxygenin-antidigoxygenin antibody (Smith et al., “Direct Mechanical Measurements of the Elasticity of Single DNA Molecules by Using Magnetic Beads,” Science 258:1122-1126 (1992)). Covalent chemical attachment of DNA to the support can be accomplished by using standard coupling agents to link the 5′-phosphate on the DNA to coated microspheres through a phosphoamidate bond. Methods for immobilization of oligonucleotides to solid-state substrates are well established. See Pease et al., Proc. Natl. Acad. Sci. USA 91(11):5022-5026 (1994). A preferred method of attaching oligonucleotides to solid-state substrates is described by Guo et al., Nucleic Acids Res. 22:5456-5465 (1994). Immobilization can be accomplished either by in situ DNA synthesis (Maskos and Southern, Nucleic Acids Research, 20:1679-1684 (1992) or by covalent attachment of chemically synthesized oligonucleotides (Guo et al., supra) in combination with robotic arraying technologies.

[0092] In addition to the solid-phase technology represented by biochip arrays, gene expression can also be quantified using liquid-phase arrays. One such system is kinetic polymerase chain reaction (PCR). Kinetic PCR allows for the simultaneous amplification and quantification of specific nucleic acid sequences. The specificity is derived from synthetic oligonucleotide primers designed to preferentially adhere to single-stranded nucleic acid sequences bracketing the target site. This pair of oligonucleotide primers form specific, non-covalently bound complexes on each strand of the target sequence. These complexes facilitate in vitro transcription of double-stranded DNA in opposite orientations. Temperature cycling of the reaction mixture creates a continuous cycle of primer binding, transcription, and re-melting of the nucleic acid to individual strands. The result is an exponential increase of the target dsDNA product. This product can be quantified in real time either through the use of an intercalating dye or a sequence specific probe. SYBR® Greene I, is an example of an intercalating dye, that preferentially binds to dsDNA resulting in a concomitant increase in the fluorescent signal. Sequence specific probes, such as used with TaqMan® technology, consist of a fluorochrome and a quenching molecule covalently bound to opposite ends of an oligonucleotide. The probe is designed to selectively bind the target DNA sequence between the two primers. When the DNA strands are synthesized during the PCR reaction, the fluorochrome is cleaved from the probe by the exonuclease activity of the polymerase resulting in signal dequenching. The probe signaling method can be more specific than the intercalating dye method, but in each case, signal strength is proportional to the dsDNA product produced. Each type of quantification method can be used in multi-well liquid phase arrays with each well representing primers and/or probes specific to nucleic acid sequences of interest. When used with messenger RNA preparations of tissues or cell lines, an array of probe/primer reactions can simultaneously quantify the expression of multiple gene products of interest. See Germer, S., et al., Genome Res. 10:258-266 (2000); Heid, C. A., et al., Genome Res. 6, 986-994 (1996).

Expression of CA Proteins

[0093] In a preferred embodiment, CA nucleic acids encoding CA proteins are used to make a variety of expression vectors to express CA proteins which can then be used in screening assays, as described below. The expression vectors may be either self-replicating extrachromosomal vectors or vectors which integrate into a host genome. Generally, these expression vectors include transcriptional and translational regulatory nucleic acid operably linked to the nucleic acid encoding the CA protein. The term “control sequences” refers to DNA sequences necessary for the expression of an operably linked coding sequence in a particular host organism. The control sequences that are suitable for prokaryotes, for example, include a promoter, optionally an operator sequence, and a ribosome binding site. Eukaryotic cells are known to utilize promoters, polyadenylation signals, and enhancers.

[0094] Nucleic acid is “operably linked” when it is placed into a functional relationship with another nucleic acid sequence. For example, DNA for a presequence or secretory leader is operably linked to DNA for a polypeptide if it is expressed as a preprotein that participates in the secretion of the polypeptide; a promoter or enhancer is operably linked to a coding sequence if it affects the transcription of the sequence; or a ribosome binding site is operably linked to a coding sequence if it is positioned so as to facilitate translation. Generally, “operably linked” means that the DNA sequences being linked are contiguous, and, in the case of a secretory leader, contiguous and in reading phase. However, enhancers do not have to be contiguous. Linking is accomplished by ligation at convenient restriction sites. If such sites do not exist, synthetic oligonucleotide adaptors or linkers are used in accordance with conventional practice. The transcriptional and translational regulatory nucleic acid will generally be appropriate to the host cell used to express the CA protein; for example, transcriptional and translational regulatory nucleic acid sequences from Bacillus are preferably used to express the CA protein in Bacillus. Numerous types of appropriate expression vectors, and suitable regulatory sequences are known in the art for a variety of host cells.

[0095] In general, the transcriptional and translational regulatory sequences may include, but are not limited to, promoter sequences, ribosomal binding sites, transcriptional start and stop sequences, translational start and stop sequences, and enhancer or activator sequences. In a preferred embodiment, the regulatory sequences include a promoter and transcriptional start and stop sequences.

[0096] Promoter sequences encode either constitutive or inducible promoters. The promoters may be either naturally occurring promoters or hybrid promoters. Hybrid promoters, which combine elements of more than one promoter, are also known in the art, and are useful in the present invention.

[0097] In addition, the expression vector may comprise additional elements. For example, the expression vector may have two replication systems, thus allowing it to be maintained in two organisms, for example in mammalian or insect cells for expression and in a prokaryotic host for cloning and amplification. Furthermore, for integrating expression vectors, the expression vector contains at least one sequence homologous to the host cell genome, and preferably two homologous sequences that flank the expression construct. The integrating vector may be directed to a specific locus in the host cell by selecting the appropriate homologous sequence for inclusion in the vector. Constructs for integrating vectors are well known in the art.

[0098] In addition, in a preferred embodiment, the expression vector contains a selectable marker gene to allow the selection of transformed host cells. Selection genes are well known in the art and will vary with the host cell used.

[0099] The CA proteins of the present invention are produced by culturing a host cell transformed with an expression vector containing nucleic acid encoding a CA protein, under the appropriate conditions to induce or cause expression of the CA protein. The conditions appropriate for CA protein expression will vary with the choice of the expression vector and the host cell, and will be easily ascertained by one skilled in the art through routine experimentation. For example, the use of constitutive promoters in the expression vector will require optimizing the growth and proliferation of the host cell, while the use of an inducible promoter requires the appropriate growth conditions for induction. In addition, in some embodiments, the timing of the harvest is important. For example, the baculoviral systems used in insect cell expression are lytic viruses, and thus harvest time selection can be crucial for product yield.

[0100] Appropriate host cells include yeast, bacteria, archaebacteria, fungi, and insect, plant and animal cells, including mammalian cells. Of particular interest are Drosophila melanogaster cells, Saccharomyces cerevisiae and other yeasts, E. coli, Bacillus subtilis, Sf9 cells, C129 cells, 293 cells, Neurospora, BHK, CHO, COS, HeLa cells, THP1 cell line (a macrophage cell line) and human cells and cell lines.

[0101] In a preferred embodiment, the CA proteins are expressed in mammalian cells. Mammalian expression systems are also known in the art, and include retroviral systems. A preferred expression vector system is a retroviral vector system such as is generally described in PCT/US97/01019 and PCT/US97/01048, both of which are hereby expressly incorporated by reference. Of particular use as mammalian promoters are the promoters from mammalian viral genes, since the viral genes are often highly expressed and have a broad host range. Examples include the SV40 early promoter, mouse mammary tumor virus LTR promoter, adenovirus major late promoter, herpes simplex virus promoter, and the CMV promoter. Typically, transcription termination and polyadenylation sequences recognized by mammalian cells are regulatory regions located 3′ to the translation stop codon and thus, together with the promoter elements, flank the coding sequence. Examples of transcription terminator and polyadenylation signals include those derived form SV40.

[0102] The methods of introducing exogenous nucleic acid into mammalian hosts, as well as other hosts, are well known in the art, and will vary with the host cell used. Techniques include dextran-mediated transfection, calcium phosphate precipitation, polybrene mediated transfection, protoplast fusion, electroporation, viral infection, encapsulation of the polynucleotide(s) in liposomes, and direct microinjection of the DNA into nuclei.

[0103] In a preferred embodiment, CA proteins are expressed in bacterial systems. Bacterial expression systems are well known in the art. Promoters from bacteriophage may also be used and are known in the art. In addition, synthetic promoters and hybrid promoters are also useful; for example, the tac promoter is a hybrid of the trp and lac promoter sequences. Furthermore, a bacterial promoter can include naturally occurring promoters of non-bacterial origin that have the ability to bind bacterial RNA polymerase and initiate transcription. In addition to a functioning promoter sequence, an efficient ribosome binding site is desirable. The expression vector may also include a signal peptide sequence that provides for secretion of the CA protein in bacteria. The protein is either secreted into the growth media (gram-positive bacteria) or into the periplasmic space, located between the inner and outer membrane of the cell (gram-negative bacteria). The bacterial expression vector may also include a selectable marker gene to allow for the selection of bacterial strains that have been transformed. Suitable selection genes include genes that render the bacteria resistant to drugs such as ampicillin, chloramphenicol, erythromycin, kanamycin, neomycin and tetracycline. Selectable markers also include biosynthetic genes, such as those in the histidine, tryptophan and leucine biosynthetic pathways. These components are assembled into expression vectors. Expression vectors for bacteria are well known in the art, and include vectors for Bacillus subtilis, E. coli, Streptococcus cremoris, and Streptococcus lividans, among others. The bacterial expression vectors are transformed into bacterial host cells using techniques well known in the art, such as calcium chloride treatment, electroporation, and others.

[0104] In one embodiment, CA proteins are produced in insect cells. Expression vectors for the transformation of insect cells, and in particular, baculovirus-based expression vectors, are well known in the art.

[0105] In a preferred embodiment, CA protein is produced in yeast cells. Yeast expression systems are well known in the art, and include expression vectors for Saccharomyces cerevisiae, Candida albicans and C. maltosa, Hansenula polymorpha, Kluyveromyces fragilis and K. lactis, Pichia guillerimondii and P. pastoris, Schizosaccharomyces pombe, and Yarrowia lipolytica.

[0106] The CA protein may also be made as a fusion protein, using techniques well known in the art. Thus, for example, for the creation of monoclonal antibodies. If the desired epitope is small, the CA protein may be fused to a carrier protein to form an immunogen. Alternatively, the CA protein may be made as a fusion protein to increase expression, or for other reasons. For example, when the CA protein is a CA peptide, the nucleic acid encoding the peptide may be linked to other nucleic acid for expression purposes.

[0107] In one embodiment, the CA nucleic acids, proteins and antibodies of the invention are labeled. By “labeled” herein is meant that a compound has at least one element, isotope or chemical compound attached to enable the detection of the compound. In general, labels fall into three classes: a) isotopic labels, which may be radioactive or heavy isotopes; b) immune labels, which may be antibodies or antigens; and c) colored or fluorescent dyes. The labels may be incorporated into the CA nucleic acids, proteins and antibodies at any position. For example, the label should be capable of producing, either directly or indirectly, a detectable signal. The detectable moiety may be a radioisotope, such as ³H, ¹⁴C, ³²P, ³⁵S, or ¹²⁵I, a fluorescent or chemiluminescent compound, such as fluorescein isothiocyanate, rhodamine, or luciferin, or an enzyme, such as alkaline phosphatase, beta-galactosidase or horseradish peroxidase. Any method known in the art for conjugating the antibody to the label may be employed, including those methods described by Hunter et al., Nature, 144:945 (1962); David et al., Biochemistry, 13:1014 (1974); Pain et al., J. Immunol. Meth., 40:219 (1981); and Nygren, J. Histochem. and Cytochem., 30:407 (1982).

[0108] Accordingly, the present invention also provides CA protein sequences. A CA protein of the present invention may be identified in several ways. “Protein” in this sense includes proteins, polypeptides, and peptides. As will be appreciated by those in the art, the nucleic acid sequences of the invention can be used to generate protein sequences. There are a variety of ways to do this, including cloning the entire gene and verifying its frame and amino acid sequence, or by comparing it to known sequences to search for homology to provide a frame, assuming the CA protein has homology to some protein in the database being used. Generally, the nucleic acid sequences are input into a program that will search all three frames for homology. This is done in a preferred embodiment using the following NCBI Advanced BLAST parameters. The program is blastx or blastn. The database is nr. The input data is as “Sequence in FASTA format”. The organism list is “none”. The “expect” is 10; the filter is default. The “descriptions” is 500, the “alignments” is 500, and the “alignment view” is pairwise. The “query Genetic Codes” is standard (1). The matrix is BLOSUM 62; gap existence cost is 11, per residue gap cost is 1; and the lambda ratio is 0.85 default. This results in the generation of a putative protein sequence.

[0109] In general, the term “polypeptide” as used herein refers to both the full-length polypeptide encoded by the recited polynucleotide, the polypeptide encoded by the gene represented by the recited polynucleotide, as well as portions or fragments thereof. The present invention encompasses variants of the naturally occurring proteins, wherein such variants are homologous or substantially similar to the naturally occurring protein, and can be of an origin of the same or different species as the naturally occurring protein (e.g., human, murine, or some other species that naturally expresses the recited polypeptide, usually a mammalian species). In general, variant polypeptides have a sequence that has at least about 80%, at least about 81%, at least about 82%, at least about 83%, at least about 84%, at least about 85%, at least about 86%, at least about 87%, at least about 88%, at least about 89%, usually at least about 90%, at least 91%, at least 92%, at least 93%, at least 94%, at least 95%, at least 96%, at least 97%, at least 98% and more usually at least about 99% sequence identity with a differentially expressed polypeptide described herein, as determined by the Smith-Waterman homology search algorithm using an affine gap search with a gap open penalty of 12 and a gap extension penalty of 2, BLOSUM matrix of 62. The Smith-Waterman homology search algorithm is taught in Smith and Waterman, Adv. Appl. Math. (1981) 2: 482-489. The variant polypeptides can be naturally or non-naturally glycosylated, i.e., the polypeptide has a glycosylation pattern that differs from the glycosylation pattern found in the corresponding naturally occurring protein.

[0110] Also within the scope of the invention are variants. Variants of polypeptides include mutants, fragments, and fusions. Mutants can include amino acid substitutions, additions or deletions. The amino acid substitutions can be conservative amino acid substitutions or substitutions to eliminate non-essential amino acids, such as to alter a glycosylation site, a phosphorylation site or an acetylation site, or to minimize misfolding by substitution or deletion of one or more cysteine residues that are not necessary for function. Conservative amino acid substitutions are those that preserve the general charge, hydrophobicity/hydrophilicity, and/or steric bulk of the amino acid substituted. Variants can be designed so as to retain or have enhanced biological activity of a particular region of the protein (e.g., a functional domain and/or, where the polypeptide is a member of a protein family, a region associated with a consensus sequence). Selection of amino acid alterations for production of variants can be based upon the accessibility (interior vs. exterior) of the amino acid (see, e.g., Go et. al, Int. J. Peptide Protein Res. (1980) 15:211), the thermostability of the variant polypeptide (see, e.g., Querol et al., Prot. Eng. (1996) 9:265), desired glycosylation sites (see, e.g., Olsen and Thomsen, J. Gen. Microbiol. (1991) 137:579), desired disulfide bridges (see, e.g., Clarke et al., Biochemistry (1993) 32:4322; and Wakarchuk et al., Protein Eng. (1994) 7:1379), desired metal binding sites (see, e.g., Toma et al., Biochemistry (1991) 30:97, and Haezerbrouck et al., Protein Eng. (1993) 6:643), and desired substitutions within proline loops (see, e.g., Masul et al., Appl. Env. Microbiol. (1994) 60:3579). Cysteine-depleted muteins can be produced as disclosed in U.S. Pat. No. 4,959,314.

[0111] Variants also include fragments of the polypeptides disclosed herein, particularly biologically active fragments and/or fragments corresponding to functional domains. Fragments of interest will typically be at least about 8 amino acids (aa) 10 aa, 15 aa, 20 aa, 25 aa, 30 aa, 35 aa, 40 aa, to at least about 45 aa in length, usually at least about 50 aa in length, at least about 75 aa, at least about 100 aa, at least about 125 aa, at least about 150 aa in length, at least about 200 aa, at least about 300 aa, at least about 400 aa and can be as long as 500 aa in length or longer, but will usually not exceed about 1000 aa in length, where the fragment will have a stretch of amino acids that is identical to a polypeptide encoded by a polynucleotide having a sequence of any one of the polynucleotide sequences provided herein, or a homolog thereof. The protein variants described herein are encoded by polynucleotides that are within the scope of the invention. The genetic code can be used to select the appropriate codons to construct the corresponding variants.

[0112] While altered expression of the polynucleotides associated with cancer is observed, altered levels of expression of the polypeptides encoded by these polynucleotides may likely play a role in cancers.

[0113] Also included within one embodiment of CA proteins are amino acid variants of the naturally occurring sequences, as determined herein. Preferably, the variants are preferably greater than about 75% homologous to the wild-type sequence, more preferably greater than about 80%, even more preferably greater than about 85% and most preferably greater than 90%. The present application is also directed to proteins containing polypeptides at least 80%, 85%, 90%, 95%, 96%, 97%, 98% or 99% identical to a CA polypeptide sequence set forth herein. As for nucleic acids, homology in this context means sequence similarity or identity, with identity being preferred. This homology will be determined using standard techniques known in the art as are outlined above for the nucleic acid homologies.

[0114] CA proteins of the present invention may be shorter or longer than the wild type amino acid sequences. Thus, in a preferred embodiment, included within the definition of CA proteins are portions or fragments of the wild type sequences herein. In addition, as outlined above, the CA nucleic acids of the invention may be used to obtain additional coding regions, and thus additional protein sequence, using techniques known in the art.

[0115] In a preferred embodiment, the CA proteins are derivative or variant CA proteins as compared to the wild-type sequence. That is, as outlined more fully below, the derivative CA peptide will contain at least one amino acid substitution, deletion or insertion, with amino acid substitutions being particularly preferred. The amino acid substitution, insertion or deletion may occur at any residue within the CA peptide.

[0116] Also included in an embodiment of CA proteins of the present invention are amino acid sequence variants. These variants fall into one or more of three classes: substitutional, insertional or deletional variants. These variants ordinarily are prepared by site-specific mutagenesis of nucleotides in the DNA encoding the CA protein, using cassette or PCR mutagenesis or other techniques well known in the art, to produce DNA encoding the variant, and thereafter expressing the DNA in recombinant cell culture as outlined above. However, variant CA protein fragments having up to about 100-150 residues may be prepared by in vitro synthesis using established techniques. Amino acid sequence variants are characterized by the predetermined nature of the variation, a feature that sets them apart from naturally occurring allelic or interspecies variation of the CA protein amino acid sequence. The variants typically exhibit the same qualitative biological activity as the naturally occurring analogue, although variants can also be selected which have modified characteristics as will be more fully outlined below.

[0117] While the site or region for introducing an amino acid sequence variation is predetermined, the mutation per se need not be predetermined. For example, in order to optimize the performance of a mutation at a given site, random mutagenesis may be conducted at the target codon or region and the expressed CA variants screened for the optimal combination of desired activity. Techniques for making substitution mutations at predetermined sites in DNA having a known sequence are well known, for example, M13 primer mutagenesis and LAR mutagenesis. Screening of the mutants is done using assays of CA protein activities.

[0118] Amino acid substitutions are typically of single residues; insertions usually will be on the order of from about 1 to 20 amino acids, although considerably larger insertions may be tolerated. Deletions range from about 1 to about 20 residues, although in some cases deletions may be much larger.

[0119] Substitutions, deletions, insertions or any combination thereof may be used to arrive at a final derivative. Generally these changes are done on a few amino acids to minimize the alteration of the molecule. However, larger changes may be tolerated in certain circumstances. When small alterations in the characteristics of the CA protein are desired, substitutions are generally made in accordance with the following chart:

CHART 1

| Original Residue | Exemplary Substitutions |
|---|---|
| Ala | Ser |
| Arg | Lys |
| Asn | Gln, His |
| Asp | Glu |
| Cys | Ser |
| Gln | Asn |
| Glu | Asp |
| Gly | Pro |
| His | Asn, Gln |
| Ile | Leu, Val |
| Leu | Ile, Val |
| Lys | Arg, Gln, Glu |
| Met | Leu, Ile |
| Phe | Met, Leu, Tyr |
| Ser | Thr |
| Thr | Ser |
| Trp | Tyr |
| Tyr | Trp, Phe |
| Val | Ile, Leu |

[0120] Substantial changes in function or immunological identity are made by selecting substitutions that are less conservative than those shown in Chart I. For example, substitutions may be made full length to more significantly affect one or more of the following: the structure of the polypeptide backbone in the area of the alteration (e.g., the alpha-helical or beta-sheet structure); the charge or hydrophobicity of the molecule at the target site; and the bulk of the side chain. The substitutions which in general are expected to produce the greatest changes in the polypeptide's properties are those in which (a) a hydrophilic residue, e.g. seryl or threonyl is substituted for (or by) a hydrophobic residue, e.g. leucyl, isoleucyl, phenylalanyl, valyl or alanyl; (b) a cysteine or proline is substituted for (or by) any other residue; (c) a residue having an electropositive side chain, e.g. lysyl, arginyl, or histidyl, is substituted for (or by) an electronegative residue, e.g. glutamyl or aspartyl; or (d) a residue having a bulky side chain, e.g. phenylalanine, is substituted for (or by) one not having a side chain, e.g. glycine.

[0121] The variants typically exhibit the same qualitative biological activity and will elicit the same immune response as the naturally-occurring analogue, although variants also are selected to modify the characteristics of the CA proteins as needed. Alternatively, the variant may be designed such that the biological activity of the CA protein is altered. For example, glycosylation sites may be altered or removed, dominant negative mutations created, etc.

[0122] Covalent modifications of CA polypeptides are included within the scope of this invention, for example for use in screening. One type of covalent modification includes reacting targeted amino acid residues of a CA polypeptide with an organic derivatizing agent that is capable of reacting with selected side chains or the N- or C-terminal residues of a CA polypeptide. Derivatization with bifunctional agents is useful, for instance, for crosslinking CA polypeptides to a water-insoluble support matrix or surface for use in the method for purifying anti-CA antibodies or screening assays, as is more fully described below. Commonly used crosslinking agents include, e.g., 1,1-bis(diazoacetyl)-2-phenylethane, glutaraldehyde, N-hydroxysuccinimide esters, for example, esters with 4-azidosalicylic acid, homobifunctional imidoesters, including disuccinimidyl esters such as 3,3′-dithiobis(succinimidylpropionate), bifunctional maleimides such as bis-N-maleimido-1,8-octane and agents such as methyl-3-[(p-azidophenyl)dithio]propioimidate.

[0123] Other modifications include deamidation of glutaminyl and asparaginyl residues to the corresponding glutamyl and aspartyl residues, respectively, hydroxylation of proline and lysine, phosphorylation of hydroxyl groups of seryl, threonyl or tyrosyl residues, methylation of the a-amino groups of lysine, arginine, and histidine side chains [T. E. Creighton, Proteins: Structure and Molecular Properties, W.H. Freeman & Co., San Francisco, pp. 79-86 (1983)], acetylation of the N-terminal amine, and amidation of any C-terminal carboxyl group.

[0124] Another type of covalent modification of the CA polypeptide included within the scope of this invention comprises altering the native glycosylation pattern of the polypeptide. “Altering the native glycosylation pattern” is intended for purposes herein to mean deleting one or more carbohydrate moieties found in native sequence CA polypeptide, and/or adding one or more glycosylation sites that are not present in the native sequence CA polypeptide.

[0125] Addition of glycosylation sites to CA polypeptides may be accomplished by altering the amino acid sequence thereof. The alteration may be made, for example, by the addition of, or substitution by, one or more serine or threonine residues to the native sequence CA polypeptide (for O-linked glycosylation sites). The CA amino acid sequence may optionally be altered through changes at the DNA level, particularly by mutating the DNA encoding the CA polypeptide at preselected bases such that codons are generated that will translate into the desired amino acids.

[0126] Another means of increasing the number of carbohydrate moieties on the CA polypeptide is by chemical or enzymatic coupling of glycosides to the polypeptide. Such methods are described in the art, e.g., in WO 87/05330 published 11 Sep. 1987, and in Aplin and Wriston, La. Crit. Rev. Biochem., pp. 259-306 (1981).

[0127] Removal of carbohydrate moieties present on the CA polypeptide may be accomplished chemically or enzymatically or by mutational substitution of codons encoding for amino acid residues that serve as targets for glycosylation. Chemical deglycosylation techniques are known in the art and described, for instance, by Hakimuddin, et al., Arch. Biochem. Biophys., 259:52 (1987) and by Edge et al., Anal. Biochem., 118:131 (1981). Enzymatic cleavage of carbohydrate moieties on polypeptides can be achieved by the use of a variety of endo- and exo-glycosidases as described by Thotakura et al., Meth. Enzymol., 138:350 (1987).

[0128] Another type of covalent modification of CA comprises linking the CA polypeptide to one of a variety of nonproteinaceous polymers, e.g., polyethylene glycol, polypropylene glycol, or polyoxyalkylenes, in the manner set forth in U.S. Pat. No. 4,640,835; 4,496,689; 4,301,144; 4,670,417; 4,791,192 or 4,179,337.

[0129] CA polypeptides of the present invention may also be modified in a way to form chimeric molecules comprising a CA polypeptide fused to another, heterologous polypeptide or amino acid sequence. In one embodiment, such a chimeric molecule comprises a fusion of a CA polypeptide with a tag polypeptide that provides an epitope to which an anti-tag antibody can selectively bind. The epitope tag is generally placed at the amino- or carboxyl-terminus of the CA polypeptide, although internal fusions may also be tolerated in some instances. The presence of such epitope-tagged forms of a CA polypeptide can be detected using an antibody against the tag polypeptide. Also, provision of the epitope tag enables the CA polypeptide to be readily purified by affinity purification using an anti-tag antibody or another type of affinity matrix that binds to the epitope tag. In an alternative embodiment, the chimeric molecule may comprise a fusion of a CA polypeptide with an immunoglobulin or a particular region of an immunoglobulin. For a bivalent form of the chimeric molecule, such a fusion could be to the Fc region of an IgG molecule.

[0130] Various tag polypeptides and their respective antibodies are well known in the art. Examples include poly-histidine (poly-his) or poly-histidine-glycine (poly-his-gly) tags; the flu HA tag polypeptide and its antibody 12CA5 [Field et al., Mol. Cell. Biol., 8:2159-2165 (1988)]; the c-myc tag and the 8F9, 3C7, 6E10, G4, B7 and 9E10 antibodies thereto [Evan et al., Molecular and Cellular Biology, 5:3610-3616 (1985)]; and the Herpes Simplex virus glycoprotein D (gD) tag and its antibody [Paborsky et al., Protein Engineering, 3(6):547-553 (1990)]. Other tag polypeptides include the Flag-peptide [Hopp et al., BioTechnology, 6:1204-1210 (1988)]; the KT3 epitope peptide [Martin et al., Science, 255:192-194 (1992)]; tubulin epitope peptide [Skinner et al., J. Biol. Chem., 266:15163-15166 (1991)]; and the T7 gene 10 protein peptide tag [Lutz-Freyermuth et al., Proc. Natl. Acad. Sci. USA, 87:6393-6397 (1990)].

[0131] Also included with the definition of CA protein in one embodiment are other CA proteins of the CA family, and CA proteins from other organisms, which are cloned and expressed as outlined below. Thus, probe or degenerate polymerase chain reaction (PCR) primer sequences may be used to find other related CA proteins from humans or other organisms. As will be appreciated by those in the art, particularly useful probe and/or PCR primer sequences include the unique areas of the CA nucleic acid sequence. As is generally known in the art, preferred PCR primers are from about 15 to about 35 nucleotides in length, with from about 20 to about 30 being preferred, and may contain inosine as needed. The conditions for the PCR reaction are well known in the art.

[0132] In addition, as is outlined herein, CA proteins can be made that are longer than those encoded by the nucleic acids of the figures, for example, by the elucidation of additional sequences, the addition of epitope or purification tags, the addition of other fusion sequences, etc.

[0133] CA proteins may also be identified as being encoded by CA nucleic acids. Thus, CA proteins are encoded by nucleic acids that will hybridize to the sequences of the sequence listings, or their complements, as outlined herein.

CA Antigens and Antibodies Thereto

[0134] In one embodiment, the invention provides CA specific antibodies. In a preferred embodiment, when the CA protein is to be used to generate antibodies, for example for immunotherapy, the CA protein should share at least one epitope or determinant with the full-length protein. By “epitope” or “determinant” herein is meant a portion of a protein that will generate and/or bind an antibody or T-cell receptor in the context of MHC. Thus, in most instances, antibodies made to a smaller CA protein will be able to bind to the full-length protein. In a preferred embodiment, the epitope is unique; that is, antibodies generated to a unique epitope show little or no cross-reactivity.

[0135] Any polypeptide sequence encoded by the CA polynucleotide sequences may be analyzed to determine certain preferred regions of the polypeptide. Regions of high antigenicity are determined from data by DNASTAR analysis by choosing values that represent regions of the polypeptide that are likely to be exposed on the surface of the polypeptide in an environment in which antigen recognition may occur in the process of initiation of an immune response. For example, the amino acid sequence of a polypeptide encoded by a CA polynucleotide sequence may be analyzed using the default parameters of the DNASTAR computer algorithm (DNASTAR, Inc., Madison, Wis.; http://www.dnastar.com/).

[0136] Polypeptide features that may be routinely obtained using the DNASTAR computer algorithm include, but are not limited to, Garnier-Robson alpha-regions, beta-regions, turn-regions, and coil-regions (Garnier et al. J. Mol. Biol., 120: 97 (1978)); Chou-Fasman alpha-regions, beta-regions, and turn-regions (Adv. in Enzymol., 47:45-148 (1978)); Kyte-Doolittle hydrophilic regions and hydrophobic regions (J. Mol. Biol., 157:105-132 (1982)); Eisenberg alpha- and beta-amphipathic regions; Karplus-Schulz flexible regions; Emini surface-forming regions (J. Virol., 55(3):836-839 (1985)); and Jameson-Wolf regions of high antigenic index (CABIOS, 4(1):181-186 (1988)). Kyte-Doolittle hydrophilic regions and hydrophobic regions, Emini surface-forming regions, and Jameson-Wolf regions of high antigenic index (i.e., containing four or more contiguous amino acids having an antigenic index of greater than or equal to 1.5, as identified using the default parameters of the Jameson-Wolf program) can routinely be used to determine polypeptide regions that exhibit a high degree of potential for antigenicity. One approach for preparing antibodies to a protein is the selection and preparation of an amino acid sequence of all or part of the protein, chemically synthesizing the sequence and injecting it into an appropriate animal, typically a rabbit, hamster or a mouse. Oligopeptides can be selected as candidates for the production of an antibody to the CA protein based upon the oligopeptides lying in hydrophilic regions, which are thus likely to be exposed in the mature protein. Additional oligopeptides can be determined using, for example, the Antigenicity Index, Welling, G. W. et al., FEBS Lett. 188:215-218 (1985), incorporated herein by reference.

[0137] In one embodiment, the term “antibody” includes antibody fragments, as are known in the art, including Fab, Fab₂, single chain antibodies (Fv for example), chimeric antibodies, etc., either produced by the modification of whole antibodies or those synthesized de novo using recombinant DNA technologies.

[0138] Methods of preparing polyclonal antibodies are known to the skilled artisan. Polyclonal antibodies can be raised in a mammal, for example, by one or more injections of an immunizing agent and, if desired, an adjuvant. Typically, the immunizing agent and/or adjuvant will be injected in the mammal by multiple subcutaneous or intraperitoneal injections. The immunizing agent may include a protein encoded by a nucleic acid of the figures or fragment thereof or a fusion protein thereof. It may be useful to conjugate the immunizing agent to a protein known to be immunogenic in the mammal being immunized. Examples of such immunogenic proteins include but are not limited to keyhole limpet hemocyanin, serum albumin, bovine thyroglobulin, and soybean trypsin inhibitor. Examples of adjuvants that may be employed include Freund's complete adjuvant and MPL-TDM adjuvant (monophosphoryl Lipid A, synthetic trehalose dicorynomycolate). The immunization protocol may be selected by one skilled in the art without undue experimentation.

[0139] The antibodies may, alternatively, be monoclonal antibodies. Monoclonal antibodies may be prepared using hybridoma methods, such as those described by Kohler and Milstein, Nature, 256:495 (1975). In a hybridoma method, a mouse, hamster, or other appropriate host animal, is typically immunized with an immunizing agent to elicit lymphocytes that produce or are capable of producing antibodies that will specifically bind to the immunizing agent. Alternatively, the lymphocytes may be immunized in vitro. The immunizing agent will typically include a polypeptide encoded by a nucleic acid of Tables 1-129, or fragment thereof or a fusion protein thereof. Generally, either peripheral blood lymphocytes (“PBLs”) are used if cells of human origin are desired, or spleen cells or lymph node cells are used if non-human mammalian sources are desired. The lymphocytes are then fused with an immortalized cell line using a suitable fusing agent, such as polyethylene glycol, to form a hybridoma cell (Goding, Monoclonal Antibodies: Principles and Practice, Academic Press, (1986) pp. 59-103). Immortalized cell lines are usually transformed mammalian cells, particularly myeloma cells of rodent, bovine and human origin. Usually, rat or mouse myeloma cell lines are employed. The hybridoma cells may be cultured in a suitable culture medium that preferably contains one or more substances that inhibit the growth or survival of the unfused, immortalized cells. For example, if the parental cells lack the enzyme hypoxanthine guanine phosphoribosyl transferase (HGPRT or HPRT), the culture medium for the hybridomas typically will include hypoxanthine, aminopterin, and thymidine (“HAT medium”), which substances prevent the growth of HGPRT-deficient cells.

[0140] Monoclonal antibody technology is used in implementing research, diagnosis and therapy. Monoclonal antibodies are used in radioimmunoassays, enzyme-linked immunosorbent assays, immunocytopathology, and flow cytometry for in vitro diagnosis, and in vivo for diagnosis and immunotherapy of human disease. Waldmann, T. A. (1991) Science 252:1657-1662. In particular, monoclonal antibodies have been widely applied to the diagnosis and therapy of cancer, wherein it is desirable to target malignant lesions while avoiding normal tissue. See, e.g., U.S. Pat. No. 4,753,894 to Frankel, et al.; U.S. Pat. No. 4,938,948 to Ring et al.; and U.S. Pat. No. 4,956,453 to Bjorn et al.

[0141] In one embodiment, the antibodies are bispecific antibodies. Bispecific antibodies are monoclonal, preferably human or humanized, antibodies that have binding specificities for at least two different antigens. A number of “humanized” antibody molecules comprising an antigen-binding site derived from a non-human immunoglobulin have been described, including chimeric antibodies having rodent V regions and their associated CDRs fused to human constant domains (Winter et al. (1991) Nature 349:293-299; Lobuglio et al. (1989) Proc. Nat. Acad. Sci. USA 86:4220-4224; Shaw et al. (1987) J. Immunol. 138:4534-4538; and Brown et al. (1987) Cancer Res. 47:3577-3583), rodent CDRs grafted into a human supporting FR prior to fusion with an appropriate human antibody constant domain (Riechmann et al. (1988) Nature 332:323-327; Verhoeyen et al. (1988) Science 239:1534-1536; and Jones et al. (1986) Nature 321:522-525), and rodent CDRs supported by recombinantly veneered rodent FRs (European Patent Publication No. 519,596, published Dec. 23, 1992). These “humanized” molecules are designed to minimize unwanted immunological response toward rodent antihuman antibody molecules which limits the duration and effectiveness of therapeutic applications of those moieties in human recipients. In the present case, one of the binding specificities is for a protein encoded by a nucleic acid of Tables 1-129, or a fragment thereof, the other one is for any other antigen, and preferably for a cell-surface protein or receptor or receptor subunit, preferably one that is tumor specific.

[0142] In a preferred embodiment, the antibodies to CA are capable of reducing or eliminating the biological function of CA, as is described below. That is, the addition of anti-CA antibodies (either polyclonal or preferably monoclonal) to CA (or cells containing CA) may reduce or eliminate the CA activity. Generally, at least a 25% decrease in activity is preferred, with at least about 50% being particularly preferred and about a 95-100% decrease being especially preferred.

[0143] In a preferred embodiment the antibodies to the CA proteins are humanized antibodies. “Humanized” antibodies refer to a molecule having an antigen binding site that is substantially derived from an immunoglobulin from a non-human species and the remaining immunoglobulin structure of the molecule based upon the structure and/or sequence of a human immunoglobulin. The antigen binding site may comprise either complete variable domains fused onto constant domains or only the complementarity determining regions (CDRs) grafted onto appropriate framework regions in the variable domains. Antigen binding sites may be wild type or modified by one or more amino acid substitutions, e.g., modified to resemble human immunoglobulin more closely. Alternatively, a humanized antibody may be derived from a chimeric antibody that retains or substantially retains the antigen-binding properties of the parental, non-human, antibody but which exhibits diminished immunogenicity as compared to the parental antibody when administered to humans. The phrase “chimeric antibody,” as used herein, refers to an antibody containing sequence derived from two different antibodies (see, e.g., U.S. Pat. No. 4,816,567) that typically originate from different species. Typically, in these chimeric antibodies, the variable region of both light and heavy chains mimics the variable regions of antibodies derived from one species of mammals, while the constant portions are homologous to the sequences in antibodies derived from another. Most typically, chimeric antibodies comprise human and murine antibody fragments, generally human constant and mouse variable regions. Humanized antibodies include human immunoglobulins (recipient antibody) in which residues form a complementary determining region (CDR) of the recipient are replaced by residues from a CDR of a non-human species (donor antibody) such as mouse, rat or rabbit having the desired specificity, affinity and capacity. In some instances, Fv framework residues of the human immunoglobulin are replaced by corresponding non-human residues. Humanized antibodies may also comprise residues that are found neither in the recipient antibody nor in the imported CDR or framework sequences. In general, the humanized antibody will comprise substantially all of at least one, and typically two, variable domains, in which all or substantially all of the CDR regions correspond to those of a non-human immunoglobulin and all or substantially all of the framework residues (FR) regions are those of a human immunoglobulin consensus sequence. The humanized antibody optimally also will comprise at least a portion of an immunoglobulin constant region (Fc), typically that of a human immunoglobulin (Jones et al., Nature, 321:522-525 (1986); Riechmann et al., Nature, 332:323-329 (1988); and Presta, Curr. Op. Struct. Biol., 2:593-596 (1992)). One clear advantage to such chimeric forms is that, for example, the variable regions can conveniently be derived from presently known sources using readily available hybridomas or B cells from non human host organisms in combination with constant regions derived from, for example, human cell preparations. While the variable region has the advantage of ease of preparation, and the specificity is not affected by its source, the constant region being human, is less likely to elicit an immune response from a human subject when the antibodies are injected than would the constant region from a non-human source. However, the definition is not limited to this particular example.

[0144] Because humanized antibodies are far less immunogenic in humans than the parental mouse monoclonal antibodies, they can be used for the treatment of humans with far less risk of anaphylaxis. Thus, these antibodies may be preferred in therapeutic applications that involve in vivo administration to a human such as, e.g., use as radiation sensitizers for the treatment of neoplastic disease or use in methods to reduce the side effects of, e.g., cancer therapy. Methods for humanizing non-human antibodies are well known in the art. Generally, a humanized antibody has one or more amino acid residues introduced into it from a source that is non-human. These non-human amino acid residues are often referred to as import residues, which are typically taken from an import variable domain. Humanization can be essentially performed following the method of Winter and co-workers (Jones et al., Nature 321:522-525 (1986); Riechmann et al., Nature 332:323-327 (1988); Verhoeyen et al., Science 239:1534-1536 (1988)), by substituting rodent CDRs or CDR sequences for the corresponding sequences of a human antibody. Accordingly, such humanized antibodies are chimeric antibodies (U.S. Pat. No. 4,816,567), wherein substantially less than an intact human variable domain has been substituted by the corresponding sequence from a non-human species. In practice, humanized antibodies are typically human antibodies in which some CDR residues and possibly some FR residues are substituted by residues from analogous sites in rodent antibodies.

[0145] Human antibodies can also be produced using various techniques known in the art, including phage display libraries [Hoogenboom and Winter, J. Mol. Biol., 227:381 (1991); Marks et al., J. Mol. Biol., 222:581 (1991)]. The techniques of Cole et al. and Boemer et al. are also available for the preparation of human monoclonal antibodies [Cole et al., Monoclonal Antibodies and Cancer Therapy, Alan R. Liss, p. 77 (1985) and Boerner et al., J. Immunol., 147(1):86-95 (1991)]. Humanized antibodies may be achieved by a variety of methods including, for example: (1) grafting the non-human complementarity determining regions (CDRs) onto a human framework and constant region (a process referred to in the art as “humanizing”), or, alternatively, (2) transplanting the entire non-human variable domains, but “cloaking” them with a human-like surface by replacement of surface residues (a process referred to in the art as “veneering”). In the present invention, humanized antibodies will include both “humanized” and “veneered” antibodies. Similarly, human antibodies can be made by introducing human immunoglobulin loci into transgenic animals, e.g., mice in which the endogenous immunoglobulin genes have been partially or completely inactivated. Upon challenge, human antibody production is observed, which closely resembles that seen in humans in all respects, including gene rearrangement, assembly, and antibody repertoire. This approach is described, for example, in U.S. Pat. Nos. 5,545,807; 5,545,806; 5,569,825; 5,625,126; 5,633,425; 5,661,016, and in the following scientific publications: Marks et al., Bio/Technology 10, 779-783 (1992); Lonberg et al., Nature 368 856-859 (1994); Morrison, Nature 368, 812-13 (1994); Fishwild et al., Nature Biotechnology 14, 845-51 (1996); Neuberger, Nature Biotechnology 14, 826 (1996); Lonberg and Huszar, Intern. Rev. Immunol. 13 65-93 (1995); Jones et al., Nature 321:522-525 (1986); Morrison et al., Proc. Natl. Acad. Sci, U.S.A., 81:6851-6855 (1984); Morrison and Oi, Adv. Immunol., 44:65-92 (1988); Verhoeyer et. al., Science 239:1534-1536 (1988); Padlan, Molec. Immun. 28:489-498 (1991); Padlan, Molec. Immunol. 31(3):169-217 (1994); and Kettleborough, C. A. et al., Protein Eng. 4(7):773-83 (1991) each of which is incorporated herein by reference.

[0146] The phrase “complementarity determining region” refers to amino acid sequences which together define the binding affinity and specificity of the natural Fv region of a native immunoglobulin binding site. See, e.g., Chothia et al., J. Mol. Biol. 196:901-917 (1987); Kabat et al., U.S. Dept. of Health and Human Services NIH Publication No. 91-3242 (1991). The phrase “constant region” refers to the portion of the antibody molecule that confers effector functions. In the present invention, mouse constant regions are substituted by human constant regions. The constant regions of the subject humanized antibodies are derived from human immunoglobulins. The heavy chain constant region can be selected from any of the five isotypes: alpha, delta, epsilon, gamma or mu. One method of humanizing antibodies comprises aligning the non-human heavy and light chain sequences to human heavy and light chain sequences, selecting and replacing the non-human framework with a human framework based on such alignment, molecular modeling to predict the conformation of the humanized sequence and comparing to the conformation of the parent antibody. This process is followed by repeated back mutation of residues in the CDR region that disturb the structure of the CDRs until the predicted conformation of the humanized sequence model closely approximates the conformation of the non-human CDRs of the parent non-human antibody. Such humanized antibodies may be further derivatized to facilitate uptake and clearance, e.g., via Ashwell receptors. See, e.g., U.S. Pat. Nos. 5,530,101 and 5,585,089 which are incorporated herein by reference.

[0147] Humanized antibodies to CA polypeptides can also be produced using transgenic animals that are engineered to contain human immunoglobulin loci. For example, WO 98/24893 discloses transgenic animals having a human Ig locus wherein the animals do not produce functional endogenous immunoglobulins due to the inactivation of endogenous heavy and light chain loci. WO 91/10741 also discloses transgenic non-primate mammalian hosts capable of mounting an immune response to an immunogen, wherein the antibodies have primate constant and/or variable regions, and wherein the endogenous immunoglobulin-encoding loci are substituted or inactivated. WO 96/30498 discloses the use of the Cre/Lox system to modify the immunoglobulin locus in a mammal, such as to replace all or a portion of the constant or variable region to form a modified antibody molecule. WO 94/02602 discloses non-human mammalian hosts having inactivated endogenous Ig loci and functional human Ig loci. U.S. Pat. No. 5,939,598 discloses methods of making transgenic mice in which the mice lack endogenous heavy chains, and express an exogenous immunoglobulin locus comprising one or more xenogeneic constant regions.

[0148] Using a transgenic animal described above, an immune response can be produced to a selected antigenic molecule, and antibody-producing cells can be removed from the animal and used to produce hybridomas that secrete human monoclonal antibodies. Immunization protocols, adjuvants, and the like are known in the art, and are used in immunization of, for example, a transgenic mouse as described in WO 96/33735. The monoclonal antibodies can be tested for the ability to inhibit or neutralize the biological activity or physiological effect of the corresponding protein.

[0149] In the present invention, CA polypeptides of the invention and variants thereof are used to immunize a transgenic animal as described above. Monoclonal antibodies are made using methods known in the art, and the specificity of the antibodies is tested using isolated CA polypeptides. Methods for preparation of the human or primate CA or an epitope thereof include, but are not limited to chemical synthesis, recombinant DNA techniques or isolation from biological samples. Chemical synthesis of a peptide can be performed, for example, by the classical Merrifeld method of solid phase peptide synthesis (Merrifeld, J. Am. Chem. Soc. 85:2149, 1963 which is incorporated by reference) or the FMOC strategy on a Rapid Automated Multiple Peptide Synthesis system (E. I. du Pont de Nemours Company, Wilmington, Del.) (Caprino and Han, J. Org. Chem. 37:3404, 1972 which is incorporated by reference).

[0150] Polyclonal antibodies can be prepared by immunizing rabbits or other animals by injecting antigen followed by subsequent boosts at appropriate intervals. The animals are bled and sera assayed against purified CA proteins usually by ELISA or by bioassay based upon the ability to block the action of CA proteins. When using avian species, e.g., chicken, turkey and the like, the antibody can be isolated from the yolk of the egg. Monoclonal antibodies can be prepared after the method of Milstein and Kohler by fusing splenocytes from immunized mice with continuously replicating tumor cells such as myeloma or lymphoma cells. (Milstein and Kohler, Nature 256:495-497, 1975; Gulfre and Milstein, Methods in Enzymology: Immunochemical Techniques 73:1-46, Langone and Banatis eds., Academic Press, 1981 which are incorporated by reference). The hybridoma cells so formed are then cloned by limiting dilution methods and supernates assayed for antibody production by ELISA, RIA or bioassay.

[0151] The unique ability of antibodies to recognize and specifically bind to target proteins provides an approach for treating an overexpression of the protein. Thus, another aspect of the present invention provides for a method for preventing or treating diseases involving overexpression of a CA polypeptide by treatment of a patient with specific antibodies to the CA protein.

[0152] Specific antibodies, either polyclonal or monoclonal, to the CA proteins can be produced by any suitable method known in the art as discussed above. For example, murine or human monoclonal antibodies can be produced by hybridoma technology or, alternatively, the CA proteins, or an immunologically active fragment thereof, or an anti-idiotypic antibody, or fragment thereof can be administered to an animal to elicit the production of antibodies capable of recognizing and binding to the CA proteins. Such antibodies can be from any class of antibodies including, but not limited to IgG, IgA, IgM, IgD, and IgE or in the case of avian species, IgY and from any subclass of antibodies.

[0153] By immunotherapy is meant treatment of a cancer with an antibody raised against a CA protein. As used herein, immunotherapy can be passive or active. Passive immunotherapy as defined herein is the passive transfer of antibody to a recipient (patient). Active immunization is the induction of antibody and/or T-cell responses in a recipient (patient). Induction of an immune response is the result of providing the recipient with an antigen to which antibodies are raised. As appreciated by one of ordinary skill in the art, the antigen may be provided by injecting a polypeptide against which antibodies are desired to be raised into a recipient, or contacting the recipient with a nucleic acid capable of expressing the antigen and under conditions for expression of the antigen.

[0154] In a preferred embodiment, oncogenes which encode secreted growth factors may be inhibited by raising antibodies against CA proteins that are secreted proteins as described above. Without being bound by theory, antibodies used for treatment, bind and prevent the secreted protein from binding to its receptor, thereby inactivating the secreted CA protein.

[0155] In another preferred embodiment, the CA protein to which antibodies are raised is a transmembrane protein. Without being bound by theory, antibodies used for treatment, bind the extracellular domain of the CA protein and prevent it from binding to other proteins, such as circulating ligands or cell-associated molecules. The antibody may cause down-regulation of the transmembrane CA protein. As will be appreciated by one of ordinary skill in the art, the antibody may be a competitive, non-competitive or uncompetitive inhibitor of protein binding to the extracellular domain of the CA protein. The antibody is also an antagonist of the CA protein. Further, the antibody prevents activation of the transmembrane CA protein. In one aspect, when the antibody prevents the binding of other molecules to the CA protein, the antibody prevents growth of the cell. The antibody may also sensitize the cell to cytotoxic agents, including, but not limited to TNF-α, TNF-β, IL-1, INF-γ and IL-2, or chemotherapeutic agents including 5FU, vinblastine, actinomycin D, cisplatin, methotrexate, and the like. In some instances the antibody belongs to a sub-type that activates serum complement when complexed with the transmembrane protein thereby mediating cytotoxicity. Thus, cancers may be treated by administering to a patient antibodies directed against the transmembrane CA protein.

[0156] In another preferred embodiment, the antibody is conjugated to a therapeutic moiety. In one aspect the therapeutic moiety is a small molecule that modulates the activity of the CA protein. In another aspect the therapeutic moiety modulates the activity of molecules associated with or in close proximity to the CA protein. The therapeutic moiety may inhibit enzymatic activity such as protease or protein kinase activity associated with cancer.

[0157] In a preferred embodiment, the therapeutic moiety may also be a cytotoxic agent. In this method, radioisotopes, natural toxins, chemotherapy agents, or other substances (such as biological response modifiers) are chemically linked or conjugated to a monoclonal antibody to form “immunoconjugates” and “immunotoxins” which target the cytotoxic agent to tumor tissue or cells resulting in a reduction in the number of afflicted cells, thereby reducing symptoms associated with cancers, including lymphoma. Cytotoxic agents are numerous and varied and include, but are not limited to, cytotoxic drugs or toxins or active fragments of such toxins. Suitable toxins and their corresponding fragments include diphtheria A chain, exotoxin A chain, ricin A chain, abrin A chain, curcin, crotin, phenomycin, enomycin and the like. Cytotoxic agents also include radiochemicals made by conjugating radioisotopes to antibodies raised against CA proteins, or binding of a radionuclide to a chelating agent that has been covalently attached to the antibody. Targeting the therapeutic moiety to transmembrane CA proteins not only serves to increase the local concentration of therapeutic moiety in the cancer of interest, i.e., lymphoma, but also serves to reduce deleterious side effects that may be associated with the therapeutic moiety. A number of investigators have used monoclonal antibodies as carriers of cytotoxic substances in attempts to selectively direct those agents to malignant tissue. More particularly, a number of monoclonal antibodies have been conjugated to toxins such as ricin, abrin, diphtheria toxin and Pseudomonas exotoxin or to enzymatically active portions (A chains) thereof via heterobifunctional agents. See, e.g., U.S. Pat. No. 4,753,894 to Frankel et al.; Nevelle, et al. (1982) Immunol Rev 62:75-91; Ross et al. (1980) Eur. J Biochem 104; Vitteta et al. (1982) Immunol Rev 62:158-183; Raso et al. (1982) Cancer Res 42:457-464, and Trowbridge et al. (1981) Nature 294:171-173.

[0158] In another preferred embodiment, the CA protein against which the antibodies are raised is an intracellular protein. In this case, the antibody may be conjugated to a protein that facilitates entry into the cell. In one case, the antibody enters the cell by endocytosis. In another embodiment, a nucleic acid encoding the antibody is administered to the individual or cell. Moreover, wherein the CA protein can be targeted within a cell, e.g., the nucleus, an antibody thereto contains a signal for that target localization, e.g., a nuclear localization signal.

[0159] The CA antibodies of the invention specifically bind to CA proteins. By “specifically bind” herein is meant that the antibodies bind to the protein with a binding constant in the range of 10⁻⁴-10⁻⁶ M⁻¹, with a preferred range being 10⁻⁷-10⁻⁹ M⁻¹.

[0160] In a preferred embodiment, the CA protein is purified or isolated after expression. CA proteins may be isolated or purified in a variety of ways known to those skilled in the art depending on what other components are present in the sample. Standard purification methods include electrophoretic, molecular, immunological and chromatographic techniques, including ion exchange, hydrophobic, affinity, and reverse-phase HPLC chromatography, and chromatofocusing. For example, the CA protein may be purified using a standard anti-CA antibody column. Ultrafiltration and diafiltration techniques, in conjunction with protein concentration, are also useful. For general guidance in suitable purification techniques, see Scopes, R., Protein Purification, Springer-Verlag, NY (1982). The degree of purification necessary will vary depending on the use of the CA protein. In some instances no purification will be necessary.

Detection of Cancer Phenotype

[0161] Once expressed and purified if necessary, the CA proteins and nucleic acids are useful in a number of applications. In one aspect, the expression levels of genes are determined for different cellular states in the cancer phenotype; that is, the expression levels of genes in normal tissue and in cancer tissue (and in some cases, for varying severities of lymphoma that relate to prognosis, as outlined below) are evaluated to provide expression profiles. An expression profile of a particular cell state or point of development is essentially a “fingerprint” of the state; while two states may have any particular gene similarly expressed, the evaluation of a number of genes simultaneously allows the generation of a gene expression profile that is unique to the state of the cell. By comparing expression profiles of cells in different states, information regarding which genes are important (including both up- and down-regulation of genes) in each of these states is obtained. Then, diagnosis may be done or confirmed: does tissue from a particular patient have the gene expression profile of normal or cancer tissue.

[0162] “Differential expression,” or equivalents used herein, refers to both qualitative as well as quantitative differences in the temporal and/or cellular expression patterns of genes, within and among the cells. Thus, a differentially expressed gene can qualitatively have its expression altered, including an activation or inactivation, in, for example, normal versus cancer tissue. That is, genes may be turned on or turned off in a particular state, relative to another state. As is apparent to the skilled artisan, any comparison of two or more states can be made. Such a qualitatively regulated gene will exhibit an expression pattern within a state or cell type which is detectable by standard techniques in one such state or cell type, but is not detectable in both. Alternatively, the determination is quantitative in that expression is increased or decreased; that is, the expression of the gene is either up-regulated, resulting in an increased amount of transcript, or down-regulated, resulting in a decreased amount of transcript. The degree to which expression differs need only be large enough to quantify via standard characterization techniques as outlined below, such as by use of Affymetrix GeneChip® expression arrays, Lockhart, Nature Biotechnology, 14:1675-1680 (1996), hereby expressly incorporated by reference. Other techniques include, but are not limited to, quantitative reverse transcriptase PCR, Northern analysis and RNase protection. As outlined above, preferably the change in expression (i.e. upregulation or downregulation) is at least about 50%, more preferably at least about 100%, more preferably at least about 150%, more preferably, at least about 200%, with from 300 to at least 1000% being especially preferred.

[0163] As will be appreciated by those in the art, this may be done by evaluation at either the gene transcript, or the protein level; that is, the amount of gene expression may be monitored using nucleic acid probes to the DNA or RNA equivalent of the gene transcript, and the quantification of gene expression levels, or, alternatively, the final gene product itself (protein) can be monitored, for example through the use of antibodies to the CA protein and standard immunoassays (ELISAs, etc.) or other techniques, including mass spectroscopy assays, 2D gel electrophoresis assays, etc. Thus, the proteins corresponding to CA genes, i.e. those identified as being important in a particular cancer phenotype, i.e., lymphoma, can be evaluated in a diagnostic test specific for that cancer.

[0164] In a preferred embodiment, gene expression monitoring is done and a number of genes, i.e. an expression profile, is monitored simultaneously, although multiple protein expression monitoring can be done as well. Similarly, these assays may be done on an individual basis as well.

[0165] In this embodiment, the CA nucleic acid probes may be attached to biochips as outlined herein for the detection and quantification of CA sequences in a particular cell. The assays are done as is known in the art. As will be appreciated by those in the art, any number of different CA sequences may be used as probes, with single sequence assays being used in some cases, and a plurality of the sequences described herein being used in other embodiments. In addition, while solid-phase assays are described, any number of solution based assays may be done as well.

[0166] In a preferred embodiment, both solid and solution based assays may be used to detect CA sequences that are up-regulated or down-regulated in cancers as compared to normal tissue. In instances where the CA sequence has been altered but shows the same expression profile or an altered expression profile, the protein will be detected as outlined herein.

[0167] In a preferred embodiment nucleic acids encoding the CA protein are detected. Although DNA or RNA encoding the CA protein may be detected, of particular interest are methods wherein the mRNA encoding a CA protein is detected. The presence of mRNA in a sample is an indication that the CA gene has been transcribed to form the mRNA, and suggests that the protein is expressed. Probes to detect the mRNA can be any nucleotide/deoxynucleotide probe that is complementary to and base pairs with the mRNA and includes but is not limited to oligonucleotides, cDNA or RNA. Probes also should contain a detectable label, as defined herein. In one method the mRNA is detected after immobilizing the nucleic acid to be examined on a solid support such as nylon membranes and hybridizing the probe with the sample. Following washing to remove the non-specifically bound probe, the label is detected. In another method detection of the mRNA is performed in situ. In this method permeabilized cells or tissue samples are contacted with a detectably labeled nucleic acid probe for sufficient time to allow the probe to hybridize with the target mRNA. Following washing to remove the non-specifically bound probe, the label is detected. For example a digoxygenin labeled riboprobe (RNA probe) that is complementary to the mRNA encoding a CA protein is detected by binding the digoxygenin with an anti-digoxygenin secondary antibody and developed with nitro blue tetrazolium and 5-bromo-4-chloro-3-indoyl phosphate.

[0168] In a preferred embodiment, any of the three classes of proteins as described herein (secreted, transmembrane or intracellular proteins) are used in diagnostic assays. The CA proteins, antibodies, nucleic acids, modified proteins and cells containing CA sequences are used in diagnostic assays. This can be done on an individual gene or corresponding polypeptide level, or as sets of assays.

[0169] As described and defined herein, CA proteins find use as markers of cancers, including lymphomas such as, but not limited to, Hodgkin's and non-Hodgkin's lymphoma. Detection of these proteins in putative cancer tissue or patients allows for a determination or diagnosis of the type of cancer. Numerous methods known to those of ordinary skill in the art find use in detecting cancers. In one embodiment, antibodies are used to detect CA proteins. A preferred method separates proteins from a sample or patient by electrophoresis on a gel (typically a denaturing and reducing protein gel, but may be any other type of gel including isoelectric focusing gels and the like). Following separation of proteins, the CA protein is detected by immunoblotting with antibodies raised against the CA protein. Methods of immunoblotting are well known to those of ordinary skill in the art.

[0170] In another preferred method, antibodies to the CA protein find use in in situ imaging techniques. In this method cells are contacted with from one to many antibodies to the CA protein(s). Following washing to remove non-specific antibody binding, the presence of the antibody or antibodies is detected. In one embodiment the antibody is detected by incubating with a secondary antibody that contains a detectable label. In another method the primary antibody to the CA protein(s) contains a detectable label. In another preferred embodiment each one of multiple primary antibodies contains a distinct and detectable label. This method finds particular use in simultaneous screening for a plurality of CA proteins. As will be appreciated by one of ordinary skill in the art, numerous other histological imaging techniques are useful in the invention.

[0171] In a preferred embodiment the label is detected in a fluorometer that has the ability to detect and distinguish emissions of different wavelengths. In addition, a fluorescence activated cell sorter (FACS) can be used in the method.

[0172] In another preferred embodiment, antibodies find use in diagnosing cancers from blood samples. As previously described, certain CA proteins are secreted/circulating molecules. Blood samples, therefore, are useful as samples to be probed or tested for the presence of secreted CA proteins. Antibodies can be used to detect the CA proteins by any of the previously described immunoassay techniques including ELISA, immunoblotting (Western blotting), immunoprecipitation, BIACORE technology and the like, as will be appreciated by one of ordinary skill in the art.

[0173] In a preferred embodiment, in situ hybridization of labeled CA nucleic acid probes to tissue arrays is done. For example, arrays of tissue samples, including CA tissue and/or normal tissue, are made. In situ hybridization as is known in the art can then be done.

[0174] It is understood that when comparing the expression fingerprints between an individual and a standard, the skilled artisan can make a diagnosis as well as a prognosis. It is further understood that the genes that indicate diagnosis may differ from those that indicate prognosis.

[0175] In a preferred embodiment, the CA proteins, antibodies, nucleic acids, modified proteins and cells containing CA sequences are used in prognosis assays. As above, gene expression profiles can be generated that correlate to cancer, especially lymphoma, severity, in terms of long term prognosis. Again, this may be done on either a protein or gene level, with the use of genes being preferred. As above, the CA probes are attached to biochips for the detection and quantification of CA sequences in a tissue or patient. The assays proceed as outlined for diagnosis.

Screening for CA-Targeted Drugs

[0176] In one embodiment, any of the CA sequences as described herein are used in drug screening assays. The CA proteins, antibodies, nucleic acids, modified proteins and cells containing CA sequences are used in drug screening assays or by evaluating the effect of drug candidates on a “gene expression profile” or expression profile of polypeptides. In one embodiment, the expression profiles are used, preferably in conjunction with high throughput screening techniques to allow monitoring for expression profile genes after treatment with a candidate agent, Zlokarnik, et al., Science 279, 84-8 (1998), Heid, et al., Genome Res., 6:986-994 (1996).

[0177] In another embodiment, the CA proteins, antibodies, nucleic acids, modified proteins and cells containing the native or modified CA proteins are used in screening assays. That is, the present invention provides novel methods for screening for compositions that modulate the cancer phenotype. As above, this can be done by screening for modulators of gene expression or for modulators of protein activity. Similarly, this may be done on an individual gene or protein level or by evaluating the effect of drug candidates on a “gene expression profile”. In a preferred embodiment, the expression profiles are used, preferably in conjunction with high throughput screening techniques to allow monitoring for expression profile genes after treatment with a candidate agent, see Zlokarnik, supra.

[0178] Having identified the CA genes herein, a variety of assays to evaluate the effects of agents on gene expression may be executed. In a preferred embodiment, assays may be run on an individual gene or protein level. That is, having identified a particular gene as aberrantly regulated in cancer, candidate bioactive agents may be screened to modulate the gene's regulation. “Modulation” thus includes both an increase and a decrease in gene expression or activity. The preferred amount of modulation will depend on the original change of the gene expression in normal versus tumor tissue, with changes of at least 10%, preferably 50%, more preferably 100-300%, and in some embodiments 300-1000% or greater. Thus, if a gene exhibits a 4 fold increase in tumor compared to normal tissue, a decrease of about four fold is desired; a 10 fold decrease in tumor compared to normal tissue gives a 10 fold increase in expression for a candidate agent is desired, etc. Alternatively, where the CA sequence has been altered but shows the same expression profile or an altered expression profile, the protein will be detected as outlined herein.

[0179] As will be appreciated by those in the art, this may be done by evaluation at either the gene or the protein level; that is, the amount of gene expression may be monitored using nucleic acid probes and the quantification of gene expression levels, or, alternatively, the level of the gene product itself can be monitored, for example through the use of antibodies to the CA protein and standard immunoassays. Alternatively, binding and bioactivity assays with the protein may be done as outlined below.

[0180] In a preferred embodiment, gene expression monitoring is done and a number of genes, i.e. an expression profile, is monitored simultaneously, although multiple protein expression monitoring can be done as well.

[0181] In this embodiment, the CA nucleic acid probes are attached to biochips as outlined herein for the detection and quantification of CA sequences in a particular cell. The assays are further described below.

[0182] Generally, in a preferred embodiment, a candidate bioactive agent is added to the cells prior to analysis. Moreover, screens are provided to identify a candidate bioactive agent that modulates a particular type of cancer, modulates CA proteins, binds to a CA protein, or interferes between the binding of a CA protein and an antibody.

[0183] The term “candidate bioactive agent” or “drug candidate” or grammatical equivalents as used herein describes any molecule, e.g., protein, oligopeptide, small organic or inorganic molecule, polysaccharide, polynucleotide, etc., to be tested for bioactive agents that are capable of directly or indirectly altering either the cancer phenotype, binding to and/or modulating the bioactivity of a CA protein, or the expression of a CA sequence, including both nucleic acid sequences and protein sequences. In a particularly preferred embodiment, the candidate agent suppresses a CA phenotype, for example to a normal tissue fingerprint. Similarly, the candidate agent preferably suppresses a severe CA phenotype. Generally a plurality of assay mixtures are run in parallel with different agent concentrations to obtain a differential response to the various concentrations. Typically, one of these concentrations serves as a negative control, i.e., at zero concentration or below the level of detection.

[0184] In one aspect, a candidate agent will neutralize the effect of a CA protein. By “neutralize” is meant that activity of a protein is either inhibited or counter acted against so as to have substantially no effect on a cell.

[0185] Candidate agents encompass numerous chemical classes, though typically they are organic or inorganic molecules, preferably small organic compounds having a molecular weight of more than 100 and less than about 2,500 Daltons. Preferred small molecules are less than 2000, or less than 1500 or less than 1000 or less than 500 D. Candidate agents comprise functional groups necessary for structural interaction with proteins, particularly hydrogen bonding, and typically include at least an amine, carbonyl, hydroxyl or carboxyl group, preferably at least two of the functional chemical groups. The candidate agents often comprise cyclical carbon or heterocyclic structures and/or aromatic or polyaromatic structures substituted with one or more of the above functional groups. Candidate agents are also found among biomolecules including peptides, saccharides, fatty acids, steroids, purines, pyrimidines, derivatives, structural analogs or combinations thereof. Particularly preferred are peptides.

[0186] Candidate agents are obtained from a wide variety of sources including libraries of synthetic or natural compounds. For example, numerous means are available for random and directed synthesis of a wide variety of organic compounds and biomolecules, including expression of randomized oligonucleotides. Alternatively, libraries of natural compounds in the form of bacterial, fungal, plant and animal extracts are available or readily produced. Additionally, natural or synthetically produced libraries and compounds are readily modified through conventional chemical, physical and biochemical means. Known pharmacological agents may be subjected to directed or random chemical modifications, such as acylation, alkylation, esterification, or amidification to produce structural analogs.

[0187] In one embodiment, the candidate bioactive agents are proteins. By “protein” herein is meant at least two covalently attached amino acids, which includes proteins, polypeptides, oligopeptides and peptides. The protein may be made up of naturally occurring amino acids and peptide bonds, or synthetic peptidomimetic structures. Thus “amino acid”, or “peptide residue”, as used herein means both naturally occurring and synthetic amino acids. For example, homo-phenylalanine, citrulline and norleucine are considered amino acids for the purposes of the invention. “Amino acid” also includes imino acid residues such as proline and hydroxyproline. The side chains may be in either the (R) or the (S) configuration. In the preferred embodiment, the amino acids are in the (S) or L-configuration. If non-naturally occurring side chains are used, non-amino acid substituents may be used, for example to prevent or retard in vivo degradations.

[0188] In a preferred embodiment, the candidate bioactive agents are naturally occurring proteins or fragments of naturally occurring proteins. Thus, for example, cellular extracts containing proteins, or random or directed digests of proteinaceous cellular extracts, may be used. In this way libraries of prokaryotic and eukaryotic proteins may be made for screening in the methods of the invention. Particularly preferred in this embodiment are libraries of bacterial, fungal, viral, and mammalian proteins, with the latter being preferred, and human proteins being especially preferred.

[0189] In another preferred embodiment, the candidate bioactive agents are peptides of from about 5 to about 30 amino acids, with from about 5 to about 20 amino acids being preferred, and from about 7 to about 15 being particularly preferred. The peptides may be digests of naturally occurring proteins as is outlined above, random peptides, or “biased” random peptides. By “randomized” or grammatical equivalents herein is meant that each nucleic acid and peptide consists of essentially random nucleotides and amino acids, respectively. Since generally these random peptides (or nucleic acids, discussed below) are chemically synthesized, they may incorporate any nucleotide or amino acid at any position. The synthetic process can be designed to generate randomized proteins or nucleic acids, to allow the formation of all or most of the possible combinations over the length of the sequence, thus forming a library of randomized candidate bioactive proteinaceous agents.

[0190] In one embodiment, the library is fully randomized, with no sequence preferences or constants at any position. In a preferred embodiment, the library is biased. That is, some positions within the sequence are either held constant, or are selected from a limited number of possibilities. For example, in a preferred embodiment, the nucleotides or amino acid residues are randomized within a defined class, for example, of hydrophobic amino acids, hydrophilic residues, sterically biased (either small or large) residues, towards the creation of nucleic acid binding domains, the creation of cysteines, for cross-linking, prolines for SH-3 domains, serines, threonines, tyrosines or histidines for phosphorylation sites, etc., or to purines, etc.

[0191] In one embodiment, the candidate bioactive agents are nucleic acids. As described generally for proteins, nucleic acid candidate bioactive agents may be naturally occurring nucleic acids, random nucleic acids, or “biased” random nucleic acids. In another embodiment, the candidate bioactive agents are organic chemical moieties, a wide variety of which are available in the literature.

[0192] In assays for testing alteration of the expression profile of one or more CA genes, after the candidate agent has been added and the cells allowed to incubate for some period of time, a nucleic acid sample containing the target sequences to be analyzed is prepared. The target sequence is prepared using known techniques (e.g., converted from RNA to labeled cDNA, as described above) and added to a suitable microarray. For example, an in vitro reverse transcription with labels covalently attached to the nucleosides is performed. Generally, the nucleic acids are labeled with a label as defined herein, especially with biotin-FITC or PE, Cy3 and Cy5.

[0193] As will be appreciated by those in the art, these assays can be direct hybridization assays or can comprise “sandwich assays”, which include the use of multiple probes, as is generally outlined in U.S. Pat. Nos. 5,681,702, 5,597,909, 5,545,730, 5,594,117, 5,591,584, 5,571,670, 5,580,731, 5,571,670, 5,591,584, 5,624,802, 5,635,352, 5,594,118, 5,359,100, 5,124,246 and 5,681,697, all of which are hereby incorporated by reference. In this embodiment, in general, the target nucleic acid is prepared as outlined above, and then added to the biochip comprising a plurality of nucleic acid probes, under conditions that allow the formation of a hybridization complex.

[0194] A variety of hybridization conditions may be used in the present invention, including high, moderate and low stringency conditions as outlined above. The assays are generally run under stringency conditions that allow formation of the label probe hybridization complex only in the presence of target. Stringency can be controlled by altering a step parameter that is a thermodynamic variable, including, but not limited to, temperature, formamide concentration, salt concentration, chaotropic salt concentration, pH, organic solvent concentration, etc. These parameters may also be used to control non-specific binding, as is generally outlined in U.S. Pat. No. 5,681,697. Thus it may be desirable to perform certain steps at higher stringency conditions to reduce non-specific binding.

[0195] The reactions outlined herein may be accomplished in a variety of ways, as will be appreciated by those in the art. Components of the reaction may be added simultaneously, or sequentially, in any order, with preferred embodiments outlined below. In addition, the reaction may include a variety of other reagents in the assays. These include reagents like salts, buffers, neutral proteins, e.g. albumin, detergents, etc which may be used to facilitate optimal hybridization and detection, and/or reduce non-specific or background interactions. Also reagents that otherwise improve the efficiency of the assay, such as protease inhibitors, nuclease inhibitors, anti-microbial agents, etc., may be used, depending on the sample preparation methods and purity of the target. In addition, either solid phase or solution based (i.e., kinetic PCR) assays may be used.

[0196] Once the assay is run, the data are analyzed to determine the expression levels, and changes in expression levels as between states, of individual genes, forming a gene expression profile.

[0197] In a preferred embodiment, as for the diagnosis and prognosis applications, having identified the differentially expressed gene(s) or mutated gene(s) important in any one state, screens can be run to test for alteration of the expression of the CA genes individually. That is, screening for modulation of regulation of expression of a single gene can be done. Thus, for example, in the case of target genes whose presence or absence is unique between two states, screening is done for modulators of the target gene expression.

[0198] In addition, screens can be done for novel genes that are induced in response to a candidate agent. After identifying a candidate agent based upon its ability to suppress a CA expression pattern leading to a normal expression pattern, or modulate a single CA gene expression profile so as to mimic the expression of the gene from normal tissue, a screen as described above can be performed to identify genes that are specifically modulated in response to the agent. Comparing expression profiles between normal tissue and agent treated CA tissue reveals genes that are not expressed in normal tissue or CA tissue, but are expressed in agent treated tissue. These agent specific sequences can be identified and used by any of the methods described herein for CA genes or proteins. In particular these sequences and the proteins they encode find use in marking or identifying agent-treated cells. In addition, antibodies can be raised against the agent-induced proteins and used to target novel therapeutics to the treated CA tissue sample.

[0199] Thus, in one embodiment, a candidate agent is administered to a population of CA cells, that thus has an associated CA expression profile. By “administration” or “contacting” herein is meant that the candidate agent is added to the cells in such a manner as to allow the agent to act upon the cell, whether by uptake and intracellular action, or by action at the cell surface. In some embodiments, nucleic acid encoding a proteinaceous candidate agent (i.e. a peptide) may be put into a viral construct such as a retroviral construct and added to the cell, such that expression of the peptide agent is accomplished; see PCT US97/01019, hereby expressly incorporated by reference.

[0200] Once the candidate agent has been administered to the cells, the cells can be washed if desired and are allowed to incubate under preferably physiological conditions for some period of time. The cells are then harvested and a new gene expression profile is generated, as outlined herein.

[0201] Thus, for example, CA tissue may be screened for agents that reduce or suppress the CA phenotype. A change in at least one gene of the expression profile indicates that the agent has an effect on CA activity. By defining such a signature for the CA phenotype, screens for new drugs that alter the phenotype can be devised. With this approach, the drug target need not be known and need not be represented in the original expression screening platform, nor does the level of transcript for the target protein need to change.

[0202] In a preferred embodiment, as outlined above, screens may be done on individual genes and gene products (proteins). That is, having identified a particular differentially expressed gene as important in a particular state, screening of modulators of either the expression of the gene or the gene product itself can be done. The gene products of differentially expressed genes are sometimes referred to herein as “CA proteins” or “CAP”. The CAP may be a fragment, or alternatively, be the full-length protein to the fragment encoded by the nucleic acids of Tables 1-129 (hDxx-yyy and hRxx-yyy). In a preferred embodiment, the CAP is selected from the human protein sequences shown in Tables 1-129 (hPxx-yyy). In another embodiment, the sequences are sequence variants as further described herein.

[0203] Preferably, the CAP is a fragment approximately 14 to 24 amino acids in length. More preferably the fragment is a soluble fragment. Preferably, the fragment includes a non-transmembrane region. In a preferred embodiment, the fragment has an N-terminal Cys to aid in solubility. In one embodiment, the C-terminus of the fragment is kept as a free acid and the N-terminus is a free amine to aid in coupling, e.g., to a cysteine.

[0204] In one embodiment the CA proteins are conjugated to an immunogenic agent as discussed herein. In one embodiment the CA protein is conjugated to BSA.

[0205] In a preferred embodiment, screening is done to alter the biological function of the expression product of the CA gene. Again, having identified the importance of a gene in a particular state, screening for agents that bind and/or modulate the biological activity of the gene product can be run as is more fully outlined below.

[0206] In a preferred embodiment, screens are designed to first find candidate agents that can bind to CA proteins, and then these agents may be used in assays that evaluate the ability of the candidate agent to modulate the CAP activity and the cancer phenotype. Thus, as will be appreciated by those in the art, there are a number of different assays that may be run; binding assays and activity assays.

[0207] In a preferred embodiment, binding assays are done. In general, purified or isolated gene product is used; that is, the gene products of one or more CA nucleic acids are made. In general, this is done as is known in the art. For example, antibodies are generated to the protein gene products, and standard immunoassays are run to determine the amount of protein present. Alternatively, cells comprising the CA proteins can be used in the assays.

[0208] Thus, in a preferred embodiment, the methods comprise combining a CA protein and a candidate bioactive agent, and determining the binding of the candidate agent to the CA protein. Preferred embodiments utilize the human or mouse CA protein, although other mammalian proteins may also be used, for example for the development of animal models of human disease. In some embodiments, as outlined herein, variant or derivative CA proteins may be used.

[0209] Generally, in a preferred embodiment of the methods herein, the CA protein or the candidate agent is non-diffusably bound to an insoluble support having isolated sample receiving areas (e.g. a microtiter plate, an array, etc.). The insoluble support may be made of any composition to which the compositions can be bound, is readily separated from soluble material, and is otherwise compatible with the overall method of screening. The surface of such supports may be solid or porous and of any convenient shape. Examples of suitable insoluble supports include microtiter plates, arrays, membranes and beads. These are typically made of glass, plastic (e.g., polystyrene), polysaccharides, nylon or nitrocellulose, Teflon®, etc. Microtiter plates and arrays are especially convenient because a large number of assays can be carried out simultaneously, using small amounts of reagents and samples.

[0210] The particular manner of binding of the composition is not crucial so long as it is compatible with the reagents and overall methods of the invention, maintains the activity of the composition and is nondiffusable. Preferred methods of binding include the use of antibodies (which do not sterically block either the ligand binding site or activation sequence when the protein is bound to the support), direct binding to “sticky” or ionic supports, chemical crosslinking, the synthesis of the protein or agent on the surface, etc. Following binding of the protein or agent, excess unbound material is removed by washing. The sample receiving areas may then be blocked through incubation with bovine serum albumin (BSA), casein or other innocuous protein or other moiety.

[0211] In a preferred embodiment, the CA protein is bound to the support, and a candidate bioactive agent is added to the assay. Alternatively, the candidate agent is bound to the support and the CA protein is added. Novel binding agents include specific antibodies, non-natural binding agents identified in screens of chemical libraries, peptide analogs, etc. Of particular interest are screening assays for agents that have a low toxicity for human cells. A wide variety of assays may be used for this purpose, including labeled in vitro protein-protein binding assays, electrophoretic mobility shift assays, immunoassays for protein binding, functional assays (phosphorylation assays, etc.) and the like.

[0212] The determination of the binding of the candidate bioactive agent to the CA protein may be done in a number of ways. In a preferred embodiment, the candidate bioactive agent is labeled, and binding determined directly. For example, this may be done by attaching all or a portion of the CA protein to a solid support, adding a labeled candidate agent (for example a fluorescent label), washing off excess reagent, and determining whether the label is present on the solid support. Various blocking and washing steps may be utilized as is known in the art.

[0213] By “labeled” herein is meant that the compound is either directly or indirectly labeled with a label which provides a detectable signal, e.g. radioisotope, fluorescers, enzyme, antibodies, particles such as magnetic particles, chemiluminescers, or specific binding molecules, etc. Specific binding molecules include pairs, such as biotin and streptavidin, digoxin and antidigoxin etc. For the specific binding members, the complementary member would normally be labeled with a molecule which provides for detection, in accordance with known procedures, as outlined above. The label can directly or indirectly provide a detectable signal.

[0214] In some embodiments, only one of the components is labeled. For example, the proteins (or proteinaceous candidate agents) may be labeled at tyrosine positions using ¹²⁵I, or with fluorophores. Alternatively, more than one component may be labeled with different labels; using ¹²⁵I for the proteins, for example, and a fluorophore for the candidate agents.

[0215] In a preferred embodiment, the binding of the candidate bioactive agent is determined through the use of competitive binding assays. In this embodiment, the competitor is a binding moiety known to bind to the target molecule (i.e. CA protein), such as an antibody, peptide, binding partner, ligand, etc. Under certain circumstances, there may be competitive binding as between the bioactive agent and the binding moiety, with the binding moiety displacing the bioactive agent.

[0216] In one embodiment, the candidate bioactive agent is labeled. Either the candidate bioactive agent, or the competitor, or both, is added first to the protein for a time sufficient to allow binding, if present. Incubations may be performed at any temperature which facilitates optimal activity, typically between 4 and 40° C. Incubation periods are selected for optimum activity, but may also be optimized to facilitate rapid high throughput screening. Typically between 0.1 and 1 hour will be sufficient. Excess reagent is generally removed or washed away. The second component is then added, and the presence or absence of the labeled component is followed, to indicate binding.

[0217] In a preferred embodiment, the competitor is added first, followed by the candidate bioactive agent. Displacement of the competitor is an indication that the candidate bioactive agent is binding to the CA protein and thus is capable of binding to, and potentially modulating, the activity of the CA protein. In this embodiment, either component can be labeled. Thus, for example, if the competitor is labeled, the presence of label in the wash solution indicates displacement by the agent. Alternatively, if the candidate bioactive agent is labeled, the presence of the label on the support indicates displacement.

[0218] In an alternative embodiment, the candidate bioactive agent is added first, with incubation and washing, followed by the competitor. The absence of binding by the competitor may indicate that the bioactive agent is bound to the CA protein with a higher affinity. Thus, if the candidate bioactive agent is labeled, the presence of the label on the support, coupled with a lack of competitor binding, may indicate that the candidate agent is capable of binding to the CA protein.

[0219] In a preferred embodiment, the methods comprise differential screening to identity bioactive agents that are capable of modulating the activity of the CA proteins. In this embodiment, the methods comprise combining a CA protein and a competitor in a first sample. A second sample comprises a candidate bioactive agent, a CA protein and a competitor. The binding of the competitor is determined for both samples, and a change, or difference in binding between the two samples indicates the presence of an agent capable of binding to the CA protein and potentially modulating its activity. That is, if the binding of the competitor is different in the second sample relative to the first sample, the agent is capable of binding to the CA protein.

[0220] Alternatively, a preferred embodiment utilizes differential screening to identify drug candidates that bind to the native CA protein, but cannot bind to modified CA proteins. The structure of the CA protein may be modeled, and used in rational drug design to synthesize agents that interact with that site. Drug candidates that affect CA bioactivity are also identified by screening drugs for the ability to either enhance or reduce the activity of the protein.

[0221] Positive controls and negative controls may be used in the assays. Preferably all control and test samples are performed in at least triplicate to obtain statistically significant results. Incubation of all samples is for a time sufficient for the binding of the agent to the protein. Following incubation, all samples are washed free of non-specifically bound material and the amount of bound, generally labeled agent determined. For example, where a radiolabel is employed, the samples may be counted in a scintillation counter to determine the amount of bound compound.

[0222] A variety of other reagents may be included in the screening assays. These include reagents like salts, neutral proteins, e.g. albumin, detergents, etc which may be used to facilitate optimal protein-protein binding and/or reduce non-specific or background interactions. Also reagents that otherwise improve the efficiency of the assay, such as protease inhibitors, nuclease inhibitors, anti-microbial agents, etc., may be used. The mixture of components may be added in any order that provides for the requisite binding.

[0223] Screening for agents that modulate the activity of CA proteins may also be done. In a preferred embodiment, methods for screening for a bioactive agent capable of modulating the activity of CA proteins comprise the steps of adding a candidate bioactive agent to a sample of CA proteins, as above, and determining an alteration in the biological activity of CA proteins. “Modulating the activity of a CA protein” includes an increase in activity, a decrease in activity, or a change in the type or kind of activity present. Thus, in this embodiment, the candidate agent should both bind to CA proteins (although this may not be necessary), and alter its biological or biochemical activity as defined herein. The methods include both in vitro screening methods, as are generally outlined above, and in vivo screening of cells for alterations in the presence, distribution, activity or amount of CA proteins.

[0224] Thus, in this embodiment, the methods comprise combining a CA sample and a candidate bioactive agent, and evaluating the effect on CA activity. By “CA activity” or grammatical equivalents herein is meant one of the CA protein's biological activities, including, but not limited to, its role in tumorigenesis, including cell division, preferably in lymphatic tissue, cell proliferation, tumor growth and transformation of cells. In one embodiment, CA activity includes activation of or by a protein encoded by a nucleic acid of Tables 1-129. An inhibitor of CA activity is the inhibition of any one or more CA activities.

[0225] In a preferred embodiment, the activity of the CA protein is increased; in another preferred embodiment, the activity of the CA protein is decreased. Thus, bioactive agents that are antagonists are preferred in some embodiments, and bioactive agents that are agonists may be preferred in other embodiments.

[0226] In a preferred embodiment, the invention provides methods for screening for bioactive agents capable of modulating the activity of a CA protein. The methods comprise adding a candidate bioactive agent, as defined above, to a cell comprising CA proteins. Preferred cell types include almost any cell. The cells contain a recombinant nucleic acid that encodes a CA protein. In a preferred embodiment, a library of candidate agents is tested on a plurality of cells.

[0227] In one aspect, the assays are evaluated in the presence or absence or previous or subsequent exposure of physiological signals, for example hormones, antibodies, peptides, antigens, cytokines, growth factors, action potentials, pharmacological agents including chemotherapeutics, radiation, carcinogenics, or other cells (i.e. cell-cell contacts). In another example, the determinations are determined at different stages of the cell cycle process.

[0228] In this way, bioactive agents are identified. Compounds with pharmacological activity are able to enhance or interfere with the activity of the CA protein.

Applications of the Invention

[0229] In one embodiment, a method of inhibiting cancer cell division is provided. In another embodiment, a method of inhibiting tumor growth is provided. In a further embodiment, methods of treating cells or individuals with cancer are provided.

[0230] The method comprises administration of a cancer inhibitor. In particular embodiments, the cancer inhibitor is an antisense molecule, a pharmaceutical composition, a therapeutic agent or small molecule, or a monoclonal, polyclonal, chimeric or humanized antibody. In particular embodiments, a therapeutic agent is coupled with a an antibody, preferable a monoclonal antobody.

[0231] In other embodiments, methods for detection or diagnosis of cancer cells in an individual are provided. In particular embodiments, the diagnostic/detection agent is a small molecule that pereferentially binds to a CAP according to the invention. In one embodiment, the diagnostic/detection agent is an antibody, preferably a monoclonal antobody, preferably linked to a detectable agent.

[0232] In other embodiments of the invention, animal models and transgenic animals are provided, which find use in generating animal models of cancers, particularly lymphomas and carcinomas.

(a) Antisense Molecules

[0233] In one embodiment, the cancer inhibitor is an antisense molecule. Antisense molecules as used herein include antisense or sense oligonucleotides comprising a single-stranded nucleic acid sequence (either RNA or DNA) capable of binding to target mRNA (sense) or DNA (antisense) sequences for cancer molecules. Antisense or sense oligonucleotides, according to the present invention, comprise a fragment generally at least about 14 nucleotides, preferably from about 14 to 30 nucleotides. The ability to derive an antisense or a sense oligonucleotide, based upon a cDNA sequence encoding a given protein is described in, for example, Stein and Cohen, Cancer Res. 48:2659, (1988) and van der Krol et al., BioTechniques 6:958, (1988).

[0234] Antisense molecules may be introduced into a cell containing the target nucleotide sequence by formation of a conjugate with a ligand binding molecule, as described in WO 91/04753. Suitable ligand binding molecules include, but are not limited to, cell surface receptors, growth factors, other cytokines, or other ligands that bind to cell surface receptors. Preferably, conjugation of the ligand binding molecule does not substantially interfere with the ability of the ligand binding molecule to bind to its corresponding molecule or receptor, or block entry of the sense or antisense oligonucleotide or its conjugated version into the cell. Alternatively, a sense or an antisense oligonucleotide may be introduced into a cell containing the target nucleic acid sequence by formation of an oligonucleotide-lipid complex, as described in WO 90/10448. It is understood that the use of antisense molecules or knock out and knock in models may also be used in screening assays as discussed above, in addition to methods of treatment.

(b) Pharmaceutical Compositions

[0235] Pharmaceutical compositions encompassed by the present invention include as active agent, the polypeptides, polynucleotides, antisense oligonucleotides, or antibodies of the invention disclosed herein in a therapeutically effective amount. An “effective amount” is an amount sufficient to effect beneficial or desired results, including clinical results. An effective amount can be administered in one or more administrations. For purposes of this invention, an effective amount of an adenoviral vector is an amount that is sufficient to palliate, ameliorate, stabilize, reverse, slow or delay the progression of the disease state.

[0236] The compositions can be used to treat cancer as well as metastases of primary cancer. In addition, the pharmaceutical compositions can be used in conjunction with conventional methods of cancer treatment, e.g., to sensitize tumors to radiation or conventional chemotherapy. The terms “treatment”, “treating”, “treat” and the like are used herein to generally refer to obtaining a desired pharmacologic and/or physiologic effect. The effect may be prophylactic in terms of completely or partially preventing a disease or symptom thereof and/or may be therapeutic in terms of a partial or complete stabilization or cure for a disease and/or adverse effect attributable to the disease. “Treatment” as used herein covers any treatment of a disease in a mammal, particularly a human, and includes: (a) preventing the disease or symptom from occurring in a subject which may be predisposed to the disease or symptom but has not yet been diagnosed as having it; (b) inhibiting the disease symptom, i.e., arresting its development; or (c) relieving the disease symptom, i.e., causing regression of the disease or symptom.

[0237] Where the pharmaceutical composition comprises an antibody that specifically binds to a gene product encoded by a differentially expressed polynucleotide, the antibody can be coupled to a drug for delivery to a treatment site or coupled to a detectable label to facilitate imaging of a site comprising cancer cells, such as prostate cancer cells. Methods for coupling antibodies to drugs and detectable labels are well known in the art, as are methods for imaging using detectable labels.

[0238] A “patient” for the purposes of the present invention includes both humans and other animals, particularly mammals, and organisms. Thus the methods are applicable to both human therapy and veterinary applications. In the preferred embodiment the patient is a mammal, and in the most preferred embodiment the patient is human.

[0239] The term “therapeutically effective amount” as used herein refers to an amount of a therapeutic agent to treat, ameliorate, or prevent a desired disease or condition, or to exhibit a detectable therapeutic or preventative effect. The effect can be detected by, for example, chemical markers or antigen levels. Therapeutic effects also include reduction in physical symptoms, such as decreased body temperature. The precise effective amount for a subject will depend upon the subject's size and health, the nature and extent of the condition, and the therapeutics or combination of therapeutics selected for administration. The effective amount for a given situation is determined by routine experimentation and is within the judgment of the clinician. For purposes of the present invention, an effective dose will generally be from about 0.01 mg/kg to about 5 mg/kg, or about 0.01 mg/kg to about 50 mg/kg or about 0.05 mg/kg to about 10 mg/kg of the compositions of the present invention in the individual to which it is administered.

[0240] A pharmaceutical composition can also contain a pharmaceutically acceptable carrier. The term “pharmaceutically acceptable carrier” refers to a carrier for administration of a therapeutic agent, such as antibodies or a polypeptide, genes, and other therapeutic agents. The term refers to any pharmaceutical carrier that does not itself induce the production of antibodies harmful to the individual receiving the composition, and which can be administered without undue toxicity. Suitable carriers can be large, slowly metabolized macromolecules such as proteins, polysaccharides, polylactic acids, polyglycolic acids, polymeric amino acids, amino acid copolymers, and inactive virus particles. Such carriers are well known to those of ordinary skill in the art. Pharmaceutically acceptable carriers in therapeutic compositions can include liquids such as water, saline, glycerol and ethanol. Auxiliary substances, such as wetting or emulsifying agents, pH buffering substances, and the like, can also be present in such vehicles. Typically, the therapeutic compositions are prepared as injectables, either as liquid solutions or suspensions; solid forms suitable for solution in, or suspension in, liquid vehicles prior to injection can also be prepared. Liposomes are included within the definition of a pharmaceutically acceptable carrier. Pharmaceutically acceptable salts can also be present in the pharmaceutical composition, e.g., mineral acid salts such as hydrochlorides, hydrobromides, phosphates, sulfates, and the like; and the salts of organic acids such as acetates, propionates, malonates, benzoates, and the like. A thorough discussion of pharmaceutically acceptable excipients is available in Remington: The Science and Practice of Pharmacy (1995) Alfonso Gennaro, Lippincott, Williams, & Wilkins.

[0241] The pharmaceutical compositions can be prepared in various forms, such as granules, tablets, pills, suppositories, capsules, suspensions, salves, lotions and the like. Pharmaceutical grade organic or inorganic carriers and/or diluents suitable for oral and topical use can be used to make up compositions containing the therapeutically-active compounds. Diluents known to the art include aqueous media, vegetable and animal oils and fats. Stabilizing agents, wetting and emulsifying agents, salts for varying the osmotic pressure or buffers for securing an adequate pH value, and skin penetration enhancers can be used as auxiliary agents.

[0242] The pharmaceutical compositions of the present invention comprise a CA protein in a form suitable for administration to a patient. In the preferred embodiment, the pharmaceutical compositions are in a water soluble form, such as being present as pharmaceutically acceptable salts, which is meant to include both acid and base addition salts. “Pharmaceutically acceptable acid addition salt” refers to those salts that retain the biological effectiveness of the free bases and that are not biologically or otherwise undesirable, formed with inorganic acids such as hydrochloric acid, hydrobromic acid, sulfuric acid, nitric acid, phosphoric acid and the like, and organic acids such as acetic acid, propionic acid, glycolic acid, pyruvic acid, oxalic acid, maleic acid, malonic acid, succinic acid, fumaric acid, tartaric acid, citric acid, benzoic acid, cinnamic acid, mandelic acid, methanesulfonic acid, ethanesulfonic acid, p-toluenesulfonic acid, salicylic acid and the like. “Pharmaceutically acceptable base addition salts” include those derived from inorganic bases such as sodium, potassium, lithium, ammonium, calcium, magnesium, iron, zinc, copper, manganese, aluminum salts and the like. Particularly preferred are the ammonium, potassium, sodium, calcium, and magnesium salts. Salts derived from pharmaceutically acceptable organic non-toxic bases include salts of primary, secondary, and tertiary amines, substituted amines including naturally occurring substituted amines, cyclic amines and basic ion exchange resins, such as isopropylamine, trimethylamine, diethylamine, triethylamine, tripropylamine, and ethanolamine.

[0243] The pharmaceutical compositions may also include one or more of the following: carrier proteins such as serum albumin; buffers; fillers such as microcrystalline cellulose, lactose, corn and other starches; binding agents; sweeteners and other flavoring agents; coloring agents; and polyethylene glycol. Additives are well known in the art, and are used in a variety of formulations.

[0244] The compounds having the desired pharmacological activity may be administered in a physiologically acceptable carrier to a host, as previously described. The agents may be administered in a variety of ways, orally, parenterally e.g., subcutaneously, intraperitoneally, intravascularly, etc. Depending upon the manner of introduction, the compounds may be formulated in a variety of ways. The concentration of therapeutically active compound in the formulation may vary from about 0.1-100% wgt/vol. Once formulated, the compositions contemplated by the invention can be (1) administered directly to the subject (e.g., as polynucleotide, polypeptides, small molecule agonists or antagonists, and the like); or (2) delivered ex vivo, to cells derived from the subject (e.g., as in ex vivo gene therapy). Direct delivery of the compositions will generally be accomplished by parenteral injection, e.g., subcutaneously, intraperitoneally, intravenously or intramuscularly, intratumoral or to the interstitial space of a tissue. Other modes of administration include oral and pulmonary administration, suppositories, and transdermal applications, needles, and gene guns or hyposprays. Dosage treatment can be a single dose schedule or a multiple dose schedule.

[0245] Methods for the ex vivo delivery and reimplantation of transformed cells into a subject are known in the art and described in e.g., International Publication No. WO 93/14778. Examples of cells useful in ex vivo applications include, for example, stem cells, particularly hematopoetic, lymph cells, macrophages, dendritic cells, or tumor cells. Generally, delivery of nucleic acids for both ex vivo and in vitro applications can be accomplished by, for example, dextran-mediated transfection, calcium phosphate precipitation, polybrene mediated transfection, protoplast fusion, electroporation, encapsulation of the polynucleotide(s) in liposomes, and direct microinjection of the DNA into nuclei, all well known in the art.

[0246] Once differential expression of a gene corresponding to a CA polynucleotide described herein has been found to correlate with a proliferative disorder, such as neoplasia, dysplasia, and hyperplasia, the disorder can be amenable to treatment by administration of a therapeutic agent based on the provided polynucleotide, corresponding polypeptide or other corresponding molecule (e.g., antisense, ribozyme, etc.). In other embodiments, the disorder can be amenable to treatment by administration of a small molecule drug that, for example, serves as an inhibitor (antagonist) of the function of the encoded gene product of a gene having increased expression in cancerous cells relative to normal cells or as an agonist for gene products that are decreased in expression in cancerous cells (e.g., to promote the activity of gene products that act as tumor suppressors).

[0247] The dose and the means of administration of the inventive pharmaceutical compositions are determined based on the specific qualities of the therapeutic composition, the condition, age, and weight of the patient, the progression of the disease, and other relevant factors. For example, administration of polynucleotide therapeutic compositions agents includes local or systemic administration, including injection, oral administration, particle gun or catheterized administration, and topical administration. Preferably, the therapeutic polynucleotide composition contains an expression construct comprising a promoter operably linked to a polynucleotide of at least 12, 22, 25, 30, or 35 contiguous nt of the polynucleotide disclosed herein. Various methods can be used to administer the therapeutic composition directly to a specific site in the body. For example, a small metastatic lesion is located and the therapeutic composition injected several times in several different locations within the body of tumor. Alternatively, arteries that serve a tumor are identified, and the therapeutic composition injected into such an artery, in order to deliver the composition directly into the tumor. A tumor that has a necrotic center is aspirated and the composition injected directly into the now empty center of the tumor. An antisense composition is directly administered to the surface of the tumor, for example, by topical application of the composition. X-ray imaging is used to assist in certain of the above delivery methods.

[0248] Targeted delivery of therapeutic compositions containing an antisense polynucleotide, subgenomic polynucleotides, or antibodies to specific tissues can also be used. Receptor-mediated DNA delivery techniques are described in, for example, Findeis et al., Trends Biotechnol. (1993) 11:202; Chiou et al., Gene Therapeutics: Methods And Applications Of Direct Gene Transfer (J. A. Wolff, ed.) (1994); Wu et al., J. Biol. Chem. (1988) 263:621; Wu et al., J. Biol. Chem. (1994) 269:542; Zenke et al., Proc. Natl. Acad. Sci. (USA) (1990) 87:3655; Wu et al., J. Biol. Chem. (1991) 266:338. Therapeutic compositions containing a polynucleotide are administered in a range of about 100 ng to about 200 mg of DNA for local administration in a gene therapy protocol. Concentration ranges of about 500 ng to about 50 mg, about 1 μg to about 2 mg, about 5 μg to about 500 μg, and about 20 μg to about 100 μg of DNA can also be used during a gene therapy protocol. Factors such as method of action (e.g., for enhancing or inhibiting levels of the encoded gene product) and efficacy of transformation and expression are considerations that will affect the dosage required for ultimate efficacy of the antisense subgenomic polynucleotides. Where greater expression is desired over a larger area of tissue, larger amounts of antisense subgenomic polynucleotides or the same amounts re-administered in a successive protocol of administrations, or several administrations to different adjacent or close tissue portions of, for example, a tumor site, may be required to effect a positive therapeutic outcome. In all cases, routine experimentation in clinical trials will determine specific ranges for optimal therapeutic effect.

[0249] The therapeutic polynucleotides and polypeptides of the present invention can be delivered using gene delivery vehicles. The gene delivery vehicle can be of viral or non-viral origin (see generally, Jolly, Cancer Gene Therapy (1994) 1:51; Kimura, Human Gene Therapy (1994) 5:845; Connelly, Human Gene Therapy (1995) 1:185; and Kaplitt, Nature Genetics (1994) 6:148). Expression of such coding sequences can be induced using endogenous mammalian or heterologous promoters. Expression of the coding sequence can be either constitutive or regulated.

[0250] Viral-based vectors for delivery of a desired polynucleotide and expression in a desired cell are well known in the art. Exemplary viral-based vehicles include, but are not limited to, recombinant retroviruses (see, e.g., WO 90/07936; WO 94/03622; WO 93/25698; WO 93/25234; U.S. Pat. No. 5,219,740; WO 93/11230; WO 93/10218; U.S. Pat. No. 4,777,127; GB Patent No. 2,200,651; EP 0 345 242; and WO 91/02805), alphavirus-based vectors (e.g., Sindbis virus vectors, Semliki forest virus (ATCC VR-67; ATCC VR-1247), Ross River virus (ATCC VR-373; ATCC VR-1246) and Venezuelan equine encephalitis virus (ATCC VR-923; ATCC VR-1250; ATCC VR 1249; ATCC VR-532)), and adeno-associated virus (AAV) vectors (see, e.g., WO 94/12649, WO 93/03769; WO 93/19191; WO 94/28938; WO 95/11984 and WO 95/00655). Administration of DNA linked to killed adenovirus as described in Curiel, Hum. Gene Ther. (1992) 3:147 can also be employed.

[0251] Non-viral delivery vehicles and methods can also be employed, including, but not limited to, polycationic condensed DNA linked or unlinked to killed adenovirus alone (see, e.g., Curiel, Hum. Gene Ther. (1992) 3:147); ligand-linked DNA (see, e.g., Wu, J. Biol. Chem. (1989) 264:16985); eukaryotic cell delivery vehicles cells (see, e.g., U.S. Pat. No. 5,814,482; WO 95/07994; WO 96/17072; WO 95/30763; and WO 97/42338) and nucleic charge neutralization or fusion with cell membranes. Naked DNA can also be employed. Exemplary naked DNA introduction methods are described in WO 90/11092 and U.S. Pat. No. 5,580,859. Liposomes that can act as gene delivery vehicles are described in U.S. Pat. No. 5,422,120; WO 95/13796; WO 94/23697; WO 91/14445; and EP 0524968. Additional approaches are described in Philip, Mol. Cell Biol. (1994) 14:2411, and in Woffendin, Proc. Natl. Acad. Sci. (1994) 91:1581.

[0252] Further non-viral delivery suitable for use includes mechanical delivery systems such as the approach described in Woffendin et al., Proc. Natl. Acad. Sci. USA (1994) 91(24):11581. Moreover, the coding sequence and the product of expression of such can be delivered through deposition of photopolymerized hydrogel materials or use of ionizing radiation (see, e.g., U.S. Pat. No. 5,206,152 and WO 92/11033). Other conventional methods for gene delivery that can be used for delivery of the coding sequence include, for example, use of hand-held gene transfer particle gun (see, e.g., U.S. Pat. No. 5,149,655); use of ionizing radiation for activating transferred gene (see, e.g., U.S. Pat. No. 5,206,152 and WO 92/11033).

[0253] The administration of the CA proteins and modulators of the present invention can be done in a variety of ways as discussed above, including, but not limited to, orally, subcutaneously, intravenously, intranasally, transdermally, intraperitoneally, intramuscularly, intrapulmonary, vaginally, rectally, or intraocularly. In some instances, for example, in the treatment of wounds and inflammation, the CA proteins and modulators may be directly applied as a solution or spray.

[0254] In a preferred embodiment, CA proteins and modulators are administered as therapeutic agents, and can be formulated as outlined above. Similarly, CA genes (including both the full-length sequence, partial sequences, or regulatory sequences of the CA coding regions) can be administered in gene therapy applications, as is known in the art. These CA genes can include antisense applications, either as gene therapy (i.e. for incorporation into the genome) or as antisense compositions, as will be appreciated by those in the art.

[0255] Thus, in one embodiment, methods of modulating CA gene activity in cells or organisms are provided. In one embodiment, the methods comprise administering to a cell an anti-CA antibody that reduces or eliminates the biological activity of an endogenous CA protein. Alternatively, the methods comprise administering to a cell or organism a recombinant nucleic acid encoding a CA protein. As will be appreciated by those in the art, this may be accomplished in any number of ways. In a preferred embodiment, for example when the CA sequence is down-regulated in cancer, the activity of the CA gene product is increased by increasing the amount of CA expression in the cell, for example by overexpressing the endogenous CA gene or by administering a gene encoding the CA sequence, using known gene-therapy techniques. In a preferred embodiment, the gene therapy techniques include the incorporation of the exogenous gene using enhanced homologous recombination (EHR), for example as described in PCT/US93/03868, hereby incorporated by reference in its entirety. Alternatively, for example when the CA sequence is up-regulated in cancer, the activity of the endogenous CA gene is decreased, for example by the administration of a CA antisense nucleic acid.

(c) Vaccines

[0256] In a preferred embodiment, CA genes are administered as DNA vaccines, either single genes or combinations of CA genes. Naked DNA vaccines are generally known in the art. Brower, Nature Biotechnology, 16:1304-1305 (1998).

[0257] In one embodiment, CA genes of the present invention are used as DNA vaccines. Methods for the use of genes as DNA vaccines are well known to one of ordinary skill in the art, and include placing a CA gene or portion of a CA gene under the control of a promoter for expression in a patient with cancer. The CA gene used for DNA vaccines can encode full-length CA proteins, but more preferably encodes portions of the CA proteins including peptides derived from the CA protein. In a preferred embodiment a patient is immunized with a DNA vaccine comprising a plurality of nucleotide sequences derived from a CA gene. Similarly, it is possible to immunize a patient with a plurality of CA genes or portions thereof. Without being bound by theory, expression of the polypeptide encoded by the DNA vaccine, cytotoxic T-cells, helper T-cells and antibodies are induced that recognize and destroy or eliminate cells expressing CA proteins.

[0258] In a preferred embodiment, the DNA vaccines include a gene encoding an adjuvant molecule with the DNA vaccine. Such adjuvant molecules include cytokines that increase the immunogenic response to the CA polypeptide encoded by the DNA vaccine. Additional or alternative adjuvants are known to those of ordinary skill in the art and find use in the invention.

(d) Antibodies

[0259] In one embodiment, a cancer inhibitor is an antibody as discussed above. In one embodiment, the CA proteins of the present invention may be used to generate polyclonal and monoclonal antibodies to CA proteins, which are useful as described herein. Similarly, the CA proteins can be coupled, using standard technology, to affinity chromatography columns. These columns may then be used to purify CA antibodies. In a preferred embodiment, the antibodies are generated to epitopes unique to a CA protein; that is, the antibodies show little or no cross-reactivity to other proteins. These antibodies find use in a number of applications. For example, the CA antibodies may be coupled to standard affinity chromatography columns and used to purify CA proteins. The antibodies may also be used therapeutically as blocking polypeptides, as outlined above, since they will specifically bind to the CA protein.

[0260] The present invention further provides methods for detecting the presence of and/or measuring a level of a polypeptide in a biological sample, which CA polypeptide is encoded by a CA polynucleotide that is differentially expressed in a cancer cell, using an antibody specific for the encoded polypeptide. The methods generally comprise: a) contacting the sample with an antibody specific for a polypeptide encoded by a CA polynucleotide that is differentially expressed in a prostate cancer cell; and b) detecting binding between the antibody and molecules of the sample.

[0261] Detection of specific binding of the antibody specific for the encoded cancer-associated polypeptide, when compared to a suitable control is an indication that encoded polypeptide is present in the sample. Suitable controls include a sample known not to contain the encoded CA polypeptide or known not to contain elevated levels of the polypeptide; such as normal tissue, and a sample contacted with an antibody not specific for the encoded polypeptide, e.g., an anti-idiotype antibody. A variety of methods to detect specific antibody-antigen interactions are known in the art and can be used in the method, including, but not limited to, standard immunohistological methods, immunoprecipitation, an enzyme immunoassay, and a radioimmunoassay. In general, the specific antibody will be detectably labeled, either directly or indirectly. Direct labels include radioisotopes; enzymes whose products are detectable (e.g., luciferase, β-galactosidase, and the like); fluorescent labels (e.g., fluorescein isothiocyanate, rhodamine, phycoerythrin, and the like); fluorescence emitting metals, e.g., ¹⁵²Eu, or others of the lanthanide series, attached to the antibody through metal chelating groups such as EDTA; chemiluminescent compounds, e.g., luminol, isoluminol, acridinium salts, and the like; bioluminescent compounds, e.g., luciferin, aequorin (green fluorescent protein), and the like. The antibody may be attached (coupled) to an insoluble support, such as a polystyrene plate or a bead. Indirect labels include second antibodies specific for antibodies specific for the encoded polypeptide (“first specific antibody”), wherein the second antibody is labeled as described above; and members of specific binding pairs, e.g., biotin-avidin, and the like. The biological sample may be brought into contact with and immobilized on a solid support or carrier, such as nitrocellulose, that is capable of immobilizing cells, cell particles, or soluble proteins. The support may then be washed with suitable buffers, followed by contacting with a detectably-labeled first specific antibody. Detection methods are known in the art and will be chosen as appropriate to the signal emitted by the detectable label. Detection is generally accomplished in comparison to suitable controls, and to appropriate standards.

[0262] In some embodiments, the methods are adapted for use in vivo, e.g., to locate or identify sites where cancer cells are present. In these embodiments, a detectably-labeled moiety, e.g., an antibody, which is specific for a cancer-associated polypeptide is administered to an individual (e.g., by injection), and labeled cells are located using standard imaging techniques, including, but not limited to, magnetic resonance imaging, computed tomography scanning, and the like. In this manner, cancer cells are differentially labeled.

(e) Detection and Diagnosis of Cancers

[0263] Without being bound by theory, it appears that the various CA sequences are important in cancers. Accordingly, disorders based on mutant or variant CA genes may be determined. In one embodiment, the invention provides methods for identifying cells containing variant CA genes comprising determining all or part of the sequence of at least one endogenous CA genes in a cell. As will be appreciated by those in the art, this may be done using any number of sequencing techniques. In a preferred embodiment, the invention provides methods of identifying the CA genotype of an individual comprising determining all or part of the sequence of at least one CA gene of the individual. This is generally done in at least one tissue of the individual, and may include the evaluation of a number of tissues or different samples of the same tissue. The method may include comparing the sequence of the sequenced CA gene to a known CA gene, i.e., a wild-type gene. As will be appreciated by those in the art, alterations in the sequence of some CA genes can be an indication of either the presence of the disease, or propensity to develop the disease, or prognosis evaluations.

[0264] The sequence of all or part of the CA gene can then be compared to the sequence of a known CA gene to determine if any differences exist. This can be done using any number of known homology programs, such as Bestfit, etc. In a preferred embodiment, the presence of a difference in the sequence between the CA gene of the patient and the known CA gene is indicative of a disease state or a propensity for a disease state, as outlined herein.

[0265] In a preferred embodiment, the CA genes are used as probes to determine the number of copies of the CA gene in the genome. For example, some cancers exhibit chromosomal deletions or insertions, resulting in an alteration in the copy number of a gene.

[0266] In another preferred embodiment CA genes are used as probes to determine the chromosomal location of the CA genes. Information such as chromosomal location finds use in providing a diagnosis or prognosis in particular when chromosomal abnormalities such as translocations, and the like are identified in CA gene loci.

[0267] The present invention provides methods of using the polynucleotides described herein for detecting cancer cells, facilitating diagnosis of cancer and the severity of a cancer (e.g., tumor grade, tumor burden, and the like) in a subject, facilitating a determination of the prognosis of a subject, and assessing the responsiveness of the subject to therapy (e.g., by providing a measure of therapeutic effect through, for example, assessing tumor burden during or following a chemotherapeutic regimen). Detection can be based on detection of a polynucleotide that is differentially expressed in a cancer cell, and/or detection of a polypeptide encoded by a polynucleotide that is differentially expressed in a cancer cell; The detection methods of the invention can be conducted in vitro or in vivo, on isolated cells, or in whole tissues or a bodily fluid e.g., blood, plasma, serum, urine, and the like).

[0268] In some embodiments, methods are provided for detecting a cancer cell by detecting expression in the cell of a transcript that is differentially expressed in a cancer cell. Any of a variety of known methods can be used for detection, including, but not limited to, detection of a transcript by hybridization with a polynucleotide that hybridizes to a polynucleotide that is differentially expressed in a prostate cancer cell; detection of a transcript by a polymerase chain reaction using specific oligonucleotide primers; in situ hybridization of a cell using as a probe a polynucleotide that hybridizes to a gene that is differentially expressed in a prostate cancer cell. The methods can be used to detect and/or measure mRNA levels of a gene that is differentially expressed in a cancer cell. In some embodiments, the methods comprise: a) contacting a sample with a polynucleotide that corresponds to a differentially expressed gene described herein under conditions that allow hybridization; and b) detecting hybridization, if any.

[0269] Detection of differential hybridization, when compared to a suitable control, is an indication of the presence in the sample of a polynucleotide that is differentially expressed in a cancer cell. Appropriate controls include, for example, a sample that is known not to contain a polynucleotide that is differentially expressed in a cancer cell, and use of a labeled polynucleotide of the same “sense” as the polynucleotide that is differentially expressed in the cancer cell. Conditions that allow hybridization are known in the art, and have been described in more detail above. Detection can also be accomplished by any known method, including, but not limited to, in situ hybridization, PCR (polymerase chain reaction), RT-PCR (reverse transcription-PCR), TMA, bDNA, and Nasbau and “Northern” or RNA blotting, or combinations of such techniques, using a suitably labeled polynucleotide. A variety of labels and labeling methods for polynucleotides are known in the art and can be used in the assay methods of the invention. Specificity of hybridization can be determined by comparison to appropriate controls.

[0270] Polynucleotides generally comprising at least 10 nt, at least 12 nt or at least 15 contiguous nucleotides of a polynucleotide provided herein, such as, for example, those having the sequence as depicted in Tables 1-129, are used for a variety of purposes, such as probes for detection of and/or measurement of, transcription levels of a polynucleotide that is differentially expressed in a prostate cancer cell. As will be readily appreciated by the ordinarily skilled artisan, the probe can be detectably labeled and contacted with, for example, an array comprising immobilized polynucleotides obtained from a test sample (e.g., mRNA). Alternatively, the probe can be immobilized on an array and the test sample detectably labeled. These and other variations of the methods of the invention are well within the skill in the art and are within the scope of the invention.

[0271] Nucleotide probes are used to detect expression of a gene corresponding to the provided polynucleotide. In Northern blots, mRNA is separated electrophoretically and contacted with a probe. A probe is detected as hybridizing to an mRNA species of a particular size. The amount of hybridization can be quantitated to determine relative amounts of expression, for example under a particular condition. Probes are used for in situ hybridization to cells to detect expression. Probes can also be used in vivo for diagnostic detection of hybridizing sequences. Probes are typically labeled with a radioactive isotope. Other types of detectable labels can be used such as chromophores, fluorophores, and enzymes. Other examples of nucleotide hybridization assays are described in WO92/02526 and U.S. Pat. No. 5,124,246.

[0272] PCR is another means for detecting small amounts of target nucleic acids (see, e.g., Mullis et al., Meth. Enzymol. (1987) 155:335; U.S. Pat. No. 4,683,195; and U.S. Pat. No. 4,683,202). Two primer oligonucleotides that hybridize with the target nucleic acids are used to prime the reaction. The primers can be composed of sequence within or 3′ and 5′ to the CA polynucleotides disclosed herein. Alternatively, if the primers are 3′ and 5′ to these polynucleotides, they need not hybridize to them or the complements. After amplification of the target with a thermostable polymerase, the amplified target nucleic acids can be detected by methods known in the art, e.g., Southern blot. mRNA or cDNA can also be detected by traditional blotting techniques (e.g., Southern blot, Northern blot, etc.) described in Sambrook et al., “Molecular Cloning: A Laboratory Manual” (New York, Cold Spring Harbor Laboratory, 1989) (e.g., without PCR amplification). In general, mRNA or cDNA generated from mRNA using a polymerase enzyme can be purified and separated using gel electrophoresis, and transferred to a solid support, such as nitrocellulose. The solid support is exposed to a labeled probe, washed to remove any unhybridized probe, and duplexes containing the labeled probe are detected.

[0273] Methods using PCR amplification can be performed on the DNA from a single cell, although it is convenient to use at least about 10⁵ cells. The use of the polymerase chain reaction is described in Saiki et al. (1985) Science 239:487, and a review of current techniques may be found in Sambrook, et al. Molecular Cloning: A Laboratory Manual, CSH Press 1989, pp. 14.2-14.33. A detectable label may be included in the amplification reaction. Suitable detectable labels include fluorochromes, (e.g. fluorescein isothiocyanate (FITC), rhodamine, Texas Red, phycoerythrin, allophycocyanin, 6-carboxyfluorescein (6-FAM), 2′,7′-dimethoxy-4′,5′-dichloro-6-carboxyfluorescein, 6-carboxy-X-rhodamine (ROX), 6-carboxy-2′,4′,7′,4,7-hexachlorofluorescein (HEX), 5-carboxyfluorescein (5-FAM) or N,N,N′,N′-tetramethyl-6-carboxyrhodamine (TAMRA)), radioactive labels, (e.g. ³²P, ³⁵S, ³H, etc.), and the like. The label may be a two stage system, where the polynucleotides is conjugated to biotin, haptens, etc. having a high affinity binding partner, e.g. avidin, specific antibodies, etc., where the binding partner is conjugated to a detectable label. The label may be conjugated to one or both of the primers. Alternatively, the pool of nucleotides used in the amplification is labeled, so as to incorporate the label into the amplification product.

[0274] The detection methods can be provided as part of a kit. Thus, the invention further provides kits for detecting the presence and/or a level of a polynucleotide that is differentially expressed in a cancer cell (e.g., by detection of an mRNA encoded by the differentially expressed gene of interest), and/or a polypeptide encoded thereby, in a biological sample. Procedures using these kits can be performed by clinical laboratories, experimental laboratories, medical practitioners, or private individuals. The kits of the invention for detecting a polypeptide encoded by a polynucleotide that is differentially expressed in a cancer cell may comprise a moiety that specifically binds the polypeptide, which may be an antibody that binds the polypeptide or fragment thereof. The kits of the invention used for detecting a polynucleotide that is differentially expressed in a prostate cancer cell may comprise a moiety that specifically hybridizes to such a polynucleotide. The kit may optionally provide additional components that are useful in the procedure, including, but not limited to, buffers, developing reagents, labels, reacting surfaces, means for detection, control samples, standards, instructions, and interpretive information. Accordingly, the present invention provides kits for detecting prostate cancer comprising at least one of polynucleotides having the sequence as shown in Tables 1-129 or fragments thereof.

[0275] The present invention further relates to methods of detecting/diagnosing a neoplastic or preneoplastic condition in a mammal (for example, a human). “Diagnosis” as used herein generally includes determination of a subject's susceptibility to a disease or disorder, determination as to whether a subject is presently affected by a disease or disorder, prognosis of a subject affected by a disease or disorder (e.g., identification of pre-metastatic or metastatic cancerous states, stages of cancer, or responsiveness of cancer to therapy), and therametrics (e.g., monitoring a subject's condition to provide information as to the effect or efficacy of therapy).

[0276] The terms “treatment”, “treating”, “treat” and the like are used herein to generally refer to obtaining a desired pharmacologic and/or physiologic effect. The effect may be prophylactic in terms of completely or partially preventing a disease or symptom thereof and/or may be therapeutic in terms of a partial or complete stabilization or cure for a disease and/or adverse effect attributable to the disease. “Treatment” as used herein covers any treatment of a disease in a mammal, particularly a human, and includes: (a) preventing the disease or symptom from occurring in a subject which may be predisposed to the disease or symptom but has not yet been diagnosed as having it; (b) inhibiting the disease symptom, i.e., arresting its development; or (c) relieving the disease symptom, i.e., causing regression of the disease or symptom.

[0277] An “effective amount” is an amount sufficient to effect beneficial or desired results, including clinical results. An effective amount can be administered in one or more administrations.

[0278] A “cell sample” encompasses a variety of sample types obtained from an individual and can be used in a diagnostic or monitoring assay. The definition encompasses blood and other liquid samples of biological origin, solid tissue samples such as a biopsy specimen or tissue cultures or cells derived therefrom, and the progeny thereof. The definition also includes samples that have been manipulated in any way after their procurement, such as by treatment with reagents, solubilization, or enrichment for certain components, such as proteins or polynucleotides. The term “cell sample” encompasses a clinical sample, and also includes cells in culture, cell supernatants, cell lysates, serum, plasma, biological fluid, and tissue samples.

[0279] As used herein, the terms “neoplastic cells”, “neoplasia”, “tumor”, “tumor cells”, “cancer” and “cancer cells”, (used interchangeably) refer to cells which exhibit relatively autonomous growth, so that they exhibit an aberrant growth phenotype characterized by a significant loss of control of cell proliferation (i.e., de-regulated cell division). Neoplastic cells can be malignant or benign.

[0280] The terms “individual,” “subject,” “host,” and “patient,” are used interchangeably herein and refer to any mammalian subject for whom diagnosis, treatment, or therapy is desired, particularly humans. Other subjects may include cattle, dogs, cats, guinea pigs, rabbits, rats, mice, horses, and so on. Examples of conditions that can be detected/diagnosed in accordance with these methods include cancers. Polynucleotides corresponding to genes that exhibit the appropriate expression pattern can be used to detect cancer in a subject. For a review of markers of cancer, see, e.g., Hanahan et al. Cell 100:57-70 (2000).

[0281] One detection/diagnostic method comprises: (a) obtaining from a mammal (e.g., a human) a biological sample, (b) detecting the presence in the sample of a CA protein and (c) comparing the amount of product present with that in a control sample. In accordance with this method, the presence in the sample of elevated levels of a CA gene product indicates that the subject has a neoplastic or preneoplastic condition.

[0282] Biological samples suitable for use in this method include biological fluids such as serum, plasma, pleural effusions, urine and cerebro-spinal fluid, CSF, tissue samples (e.g., mammary tumor or prostate tissue slices) can also be used in the method of the invention, including samples derived from biopsies. Cell cultures or cell extracts derived, for example, from tissue biopsies can also be used.

[0283] The compound is preferably a binding protein, e.g., an antibody, polyclonal or monoclonal, or antigen binding fragment thereof, which can be labeled with a detectable marker (e.g., fluorophore, chromophore or isotope, etc). Where appropriate, the compound can be attached to a solid support such as a bead, plate, filter, resin, etc. Determination of formation of the complex can be effected by contacting the complex with a further compound (e.g., an antibody) that specifically binds to the first compound (or complex). Like the first compound, the further compound can be attached to a solid support and/or can be labeled with a detectable marker.

[0284] The identification of elevated levels of CA protein in accordance with the present invention makes possible the identification of subjects (patients) that are likely to benefit from adjuvant therapy. For example, a biological sample from a post primary therapy subject (e.g., subject having undergone surgery) can be screened for the presence of circulating CA protein, the presence of elevated levels of the protein, determined by studies of normal populations, being indicative of residual tumor tissue. Similarly, tissue from the cut site of a surgically removed tumor can be examined (e.g., by immunofluorescence), the presence of elevated levels of product (relative to the surrounding tissue) being indicative of incomplete removal of the tumor. The ability to identify such subjects makes it, possible to tailor therapy to the needs of the particular subject. Subjects undergoing non-surgical therapy, e.g., chemotherapy or radiation therapy, can also be monitored, the presence in samples from such subjects of elevated levels of CA protein being indicative of the need for continued treatment. Staging of the disease (for example, for purposes of optimizing treatment regimens) can also be effected, for example, by biopsy e.g., with antibody specific for a CA protein.

(f) Animal Models and Transgenics

[0285] In another preferred embodiment CA genes find use in generating animal models of cancers, particularly lymphomas and carcinomas. As is appreciated by one of ordinary skill in the art, when the CA gene identified is repressed or diminished in CA tissue, gene therapy technology wherein antisense RNA directed to the CA gene will also diminish or repress expression of the gene. An animal generated as such serves as an animal model of CA that finds use in screening bioactive drug candidates. Similarly, gene knockout technology, for example as a result of homologous recombination with an appropriate gene targeting vector, will result in the absence of the CA protein. When desired, tissue-specific expression or knockout of the CA protein may be necessary.

[0286] It is also possible that the CA protein is overexpressed in cancer. As such, transgenic animals can be generated that overexpress the CA protein. Depending on the desired expression level, promoters of various strengths can be employed to express the transgene. Also, the number of copies of the integrated transgene can be determined and compared for a determination of the expression level of the transgene. Animals generated by such methods find use as animal models of CA and are additionally useful in screening for bioactive molecules to treat cancer.

Characterization of CA Sequences

[0287] The CA nucleic acid sequences of the invention are depicted in Tables 1-129. The sequences in each Table include genomic DNA sequence (mDxx-yyy; hDxx-yyy), sequence corresponding to the mRNA (mRxx-yyy; hRxx-yyy) and amino acid sequences of the proteins (mPxx-yyy; hPxx-yyy) encoded by the mRNA for both mouse and human genes. In the instances where more than one human genomic DNA sequence, coding sequence or protein sequence is related to a single mouse sequence, the formats hDn-xx-yyy, hRn-xx-yyy and hPn-xx-yyy are used where the integer “n” is used to denote the different sequences. All references to hDxx-yyy; hRxx-yyy and hPxx-yyy are intended to include sequences designated hDn-xx-yyy, hRn-xx-yyy and hPn-xx-yyy respectively throughout the Specification and claims. N/A indicates a gene that has been identified, but for which there has not been a name ascribed.

[0288] The CA sequences were analyzed by Panther™ (Molecular Diagnostics, Palo Alto, Calif.) software designed to detect homologs and enable prediction of molecular function through a system for protein functional classification. Human Gene Ontlogy annotations were prepared in accordance with the Gene Ontology Consortium (Gene Ontology: tool for the unification of biology. The Gene Ontology Consortium Nature Genet. 25: 25-29 (2000)). Similar analysis was carried out by determining IPR information regarding the CA polypeptides from InterPro, which is an integrated documentation resource for protein families, domains and functional sites (Apweiler at al. Bioinformatics 16(12):1145-1150 (2000)).

[0289] The CA sequences may be classified according to the following predicted general classifications of function by Panther™ analysis, human gene ontology and IPR domain information for polypeptides hP07-001 through hP07-128 as shown below in Table 129.

TABLE 130

| PROTEIN | CLASSIFICATION |
|---|---|
| hP10-002 | HUMAN PANTHER CLASSIFICATIONS |
| (SEQ ID NO: 6) | FAMILY (SUBFAMILY) |
| | COILED-COIL PROTEINHUMAN GENE ONTOLOGY |
| | PROCESS |
| | neurogenesis > central nervous system development |
| | transcription, DNA-dependent > transcription regulation |
| | protein modification > protein phosphorylation |
| | cell death > apoptosis |
| | FUNCTION |
| | enzyme > nitric oxide synthase |
| | GO molecular function > cell cycle regulator |
| | enzyme > protein kinase |
| | nucleotide binding > ATP binding |
| | protein binding > collagen binding |
| | LOCATION |
| | GO cellular component > extracellular |
| | microtubule organizing center > centrosome |
| | plasma membrane > integral plasma membrane protein |
| | extracellular > extracellular space |
| | HUMAN PROTEIN DOMAINS (INTERPRO SIGNATURES) |
| | No Domain Hit |
| hP1-10-003 | HUMAN PANTHER CLASSIFICATIONS |
| (SEQ ID NO: 12) | No Panther Hit |
| | HUMAN GENE ONTOLOGY |
| | No Gene Ontology |
| | HUMAN PROTEIN DOMAINS (INTERPRO SIGNATURES) |
| | No Domain Hit |
| hP2-10-003 | HUMAN PANTHER CLASSIFICATIONS |
| (SEQ ID NO: 14) | No Panther Hit |
| | HUMAN GENE ONTOLOGY |
| | No Gene Ontology |
| | HUMAN PROTEIN DOMAINS (INTERPRO SIGNATURES) |
| | No Domain Hit |
| hP3-10-003 | HUMAN PANTHER CLASSIFICATIONS |
| (SEQ ID NO: 16) | No Panther Hit |
| | HUMAN GENE ONTOLOGY |
| | No Gene Ontology |
| | HUMAN PROTEIN DOMAINS (INTERPRO SIGNATURES) |
| | No Domain Hit |
| hP4-10-003 | HUMAN PANTHER CLASSIFICATIONS |
| (SEQ ID NO: 18) | No Panther Hit |
| | HUMAN GENE ONTOLOGY |
| | No Gene Ontology |
| | HUMAN PROTEIN DOMAINS (INTERPRO SIGNATURES) |
| | No Domain Hit |
| hP5-10-003 | HUMAN PANTHER CLASSIFICATIONS |
| (SEQ ID NO: 20) | No Panther Hit |
| | HUMAN GENE ONTOLOGY |
| | No Gene Ontology |
| | HUMAN PROTEIN DOMAINS (INTERPRO SIGNATURES) |
| | No Domain Hit |
| hP6-10-003 | HUMAN PANTHER CLASSIFICATIONS |
| (SEQ ID NO: 22) | No Panther Hit |
| | HUMAN GENE ONTOLOGY |
| | No Gene Ontology |
| | HUMAN PROTEIN DOMAINS (INTERPRO SIGNATURES) |
| | No Domain Hit |
| hP08-001 | HUMAN PANTHER CLASSIFICATIONS |
| (SEQ ID NO: 28) | FAMILY (SUBFAMILY) |
| | LIM DOMAIN PROTEIN-RELATED(THYROID RECEPTOR |
| | INTERACTING PROTEIN 6-RELATED) |
| | MOLECULAR FUNCTIONS |
| | MOLECULAR FUNCTION UNCLASSIFIED |
| | BIOLOGICAL PROCESS |
| | NUCLEOSIDE, NUCLEOTIDE AND NUCLEIC ACID METABOLISM > MRNA |
| | TRANSCRIPTION > MRNA TRANSCRIPTION REGULATION |
| | SIGNAL TRANSDUCTION > CELL COMMUNICATION > STEROID |
| | HORMONE-MEDIATED SIGNALING |
| | HUMAN GENE ONTOLOGY |
| | PROCESS |
| | cell communication > cell adhesion |
| | transcription, DNA-dependent > transcription regulation |
| | transcription > transcription, DNA-dependent |
| | cell communication > signal transduction |
| | embryogenesis and morphogenesis > histogenesis and organogenesis |
| | FUNCTION |
| | DNA binding > transcription factor |
| | GO molecular function > cell adhesion |
| | nucleic acid binding > DNA binding |
| | transcription factor > RNA polymerase II transcription factor |
| | ligand binding or carrier > protein binding |
| | LOCATION |
| | cell > nucleus |
| | cell-substrate adherens junction > focal adhesion |
| | cell > cytoplasm |
| | nucleoplasm > transcription factor complex |
| | nuclear membrane > nuclear membrane lumen |
| | HUMAN PROTEIN DOMAINS (INTERPRO SIGNATURES) |
| | IPR001781 (LIM) |
| | IPR001781 (LIM) |
| | IPR000694 (PRO RICH) |
| | IPR001781 (LIM DOMAIN 2 3) |
| | IPR001781 (LIM DOMAIN 1) |
| | IPR000345 (CYTOCHROME C) |
| | IPR001781 (sp Q93052 Q93052 HUMAN) |
| hP1-11-007 | HUMAN PANTHER CLASSIFICATIONS |
| (SEQ ID NO: 34) | FAMILY (SUBFAMILY) |
| | UBIQUITIN CARBOXYL-TERMINAL HYDROLASE HUMAN GENE |
| | ONTOLOGY |
| | PROCESS |
| | ubiquitin cycle > deubiquitylation |
| | proteolysis and peptidolysis > ubiquitin-dependent protein degradation |
| | protein metabolism and modification > protein modification |
| | protein metabolism and modification > protein modification |
| | macromolecule catabolism > proteolysis and peptidolysis |
| | gametogenesis > spermatogenesis |
| | FUNCTION |
| | endopeptidase |
| | cysteine-type peptidase > cysteine-type endopeptidase |
| | cysteine-type endopeptidase > ubiquitin thiolesterase |
| | ubiquitin thiolesterase > ubiquitin-specific protease |
| | peptidase > cysteine-type peptidase |
| | enzyme > peptidase |
| | LOCATION |
| | cytosol > 26S proteasome |
| | cell > cytoplasm |
| | GO cellular component > cellular_component unknown |
| | cell > nucleus |
| | HUMAN PROTEIN DOMAINS (INTERPRO SIGNATURES) |
| | IPR001394 (UCH-1) |
| | IPR001394 (UCH-2) |
| | IPR001394 (UCH 2 3) |
| | IPR001394 (UCH 2 1) |
| | IPR001394 (UCH 2 2) |
| hP2-11-007 | HUMAN PANTHER CLASSIFICATIONS |
| (SEQ ID NO: 36) | FAMILY (SUBFAMILY) |
| | UBIQUITIN CARBOXYL-TERMINAL HYDROLASEHUMAN GENE |
| | ONTOLOGY |
| | PROCESS |
| | ubiquitin cycle > deubiquitylation |
| | proteolysis and peptidolysis > ubiquitin-dependent protein degradation |
| | protein metabolism and modification > protein modification |
| | protein metabolism and modification > protein modification |
| | macromolecule catabolism > proteolysis and peptidolysis |
| | gametogenesis > spermatogenesis |
| | FUNCTION |
| | endopeptidase |
| | cysteine-type peptidase > cysteine-type endopeptidase |
| | cysteine-type endopeptidase > ubiquitin thiolesterase |
| | ubiquitin thiolesterase > ubiquitin-specific protease |
| | peptidase > cysteine-type peptidase |
| | enzyme > peptidase |
| | LOCATION |
| | cytosol > 26S proteasome |
| | cell > cytoplasm |
| | GO cellular component > cellular_component unknown |
| | cell > nucleus |
| | HUMAN PROTEIN DOMAINS (INTERPRO SIGNATURES) |
| | IPR001394 (UCH-1) |
| | IPR001394 (UCH-2) |
| | IPR001394 (UCH 2 3) |
| | IPR001394 (UCH 2 1) |
| | IPR001394 (UCH 2 2) |
| hP11-012 | HUMAN PANTHER CLASSIFICATIONS |
| (SEQ ID NO: 42) | FAMILY (SUBFAMILY) |
| | DNA REPAIR HELICASE-RELATED(KISMET-RELATED) |
| | MOLECULAR FUNCTIONS |
| | MOLECULAR FUNCTION UNCLASSIFIED |
| | BIOLOGICAL PROCESS |
| | BIOLOGICAL PROCESS UNCLASSIFIED |
| | HUMAN GENE ONTOLOGY |
| | PROCESS |
| | transcription regulation > transcription regulation from Pol II promoter |
| | DNA packaging > chromatin modelling |
| | nuclear organization and biogenesis > chromosome organization and |
| | biogenesis |
| | transcription, DNA-dependent > transcription regulation |
| | DNA metabolism > DNA repair |
| | FUNCTION |
| | enzyme > helicase |
| | nucleic acid binding > DNA binding |
| | nucleotide binding > ATP binding |
| | GO molecular function > nucleic acid binding |
| | DNA binding > DNA helicase |
| | helicase |
| | LOCATION |
| | chromosome > chromatin |
| | cell > nucleus |
| | nucleus > nucleoplasm |
| | nucleus > nucleosome remodelling complex |
| | chromatin > heterochromatin |
| | HUMAN PROTEIN DOMAINS (INTERPRO SIGNATURES) |
| | IPR000953 (CHROMO) |
| | IPR001410 (DEXDc) |
| | IPR001650 (HELICc) |
| | IPR001650 (helicase C) |
| | IPR000330 (SNF2 N) |
| | IPR000953 (CHROMO 2 2) |
| | NULL (GLU RICH) |
| | IPR001472 (NLS BP 3) |
| hP1-11-040 | HUMAN PANTHER CLASSIFICATIONS |
| (SEQ ID NO: 48) | FAMILY (SUBFAMILY) |
| | ANNEXIN (ANNEXIN III) |
| | MOLECULAR FUNCTIONS |
| | SELECT CALCIUM BINDING PROTEIN > ANNEXIN |
| | BIOLOGICAL PROCESS |
| | BIOLOGICAL PROCESS UNCLASSIFIED |
| | HUMAN GENE ONTOLOGY |
| | PROCESS |
| | N-terminal fatty acid:protein modification > protein myristylation |
| | mesoderm development > skeletal development |
| | defence response > immune response |
| | defence response > inflammatory response |
| | FUNCTION |
| | phospholipid binding > calcium-dependent phospholipid binding |
| | ligand binding or carrier > calcium binding |
| | enzyme inhibitor > phospholipase inhibitor |
| | GO molecular function > anticoagulant |
| | enzyme > diphosphoinositol polyphosphate phosphohydrolase |
| | LOCATION |
| | cell > cytoplasm |
| | cell > soluble fraction |
| | cell > nucleus |
| | cell > plasma membrane |
| | HUMAN PROTEIN DOMAINS (INTERPRO SIGNATURES) |
| | IPR002393 (ANNEXINVI) |
| | IPR001464 (ANNEXIN) |
| | IPR001464 (ANNEXIN) |
| | IPR002388 (ANNEXINI) |
| | IPR002389 (ANNEXINII) |
| | IPR002391 (ANNEXINIV) |
| | IPR002392 (ANNEXINV) |
| | IPR002390 (ANNEXINIII) |
| | IPR001464 (ANX) |
| | IPR001464 (annexin) |
| hP2-11-040 | HUMAN PANTHER CLASSIFICATIONS |
| (SEQ ID NO: 50) | FAMILY (SUBFAMILY) |
| | ANNEXIN(ANNEXIN III) |
| | MOLECULAR FUNCTIONS |
| | SELECT CALCIUM BINDING PROTEIN > ANNEXIN |
| | BIOLOGICAL PROCESS |
| | BIOLOGICAL PROCESS UNCLASSIFIED |
| | HUMAN GENE ONTOLOGY |
| | PROCESS |
| | N-terminal fatty acid:protein modification > protein myristylation |
| | mesoderm development > skeletal development |
| | defence response > immune response |
| | defence response > inflammatory response |
| | FUNCTION |
| | phospholipid binding > calcium-dependent phospholipid binding |
| | ligand binding or carrier > calcium binding |
| | enzyme inhibitor > phospholipase inhibitor |
| | GO molecular function > anticoagulant |
| | enzyme > diphosphoinositol polyphosphate phosphohydrolase |
| | LOCATION |
| | cell > cytoplasm |
| | cell > soluble fraction |
| | cell > nucleus |
| | cell > plasma membrane |
| | HUMAN PROTEIN DOMAINS (INTERPRO SIGNATURES) |
| | IPR002393 (ANNEXINVI) |
| | IPR001464 (ANNEXIN) |
| | IPR001464 (ANNEXIN) |
| | IPR002388 (ANNEXINI) |
| | IPR002389 (ANNEXINII) |
| | IPR002391 (ANNEXINIV) |
| | IPR002392 (ANNEXINV) |
| | IPR002390 (ANNEXINIII) |
| | IPR001464 (ANX) |
| | IPR001464 (annexin) |
| hP11-043 | HUMAN PANTHER CLASSIFICATIONS |
| (SEQ ID NO: 56) | No Panther Hit |
| | HUMAN GENE ONTOLOGY |
| | PROCESS |
| | transcription, DNA-dependent > transcription regulation |
| | transcription regulation from Pol II promoter > repression of transcription |
| | from Pol II promoter |
| | GO biological process > developmental processes |
| | transcription regulation > transcription regulation from Pol II promoter |
| | gametogenesis > spermatogenesis |
| | FUNCTION |
| | DNA binding > transcription factor |
| | nucleic acid binding > DNA binding |
| | GO molecular function > nucleic acid binding |
| | RNA polymerase II transcription factor > specific RNA polymerase II |
| | transcription factor |
| | transcription factor > RNA polymerase II transcription factor |
| | LOCATION |
| | cell > nucleus |
| | nuclear membrane > nuclear membrane lumen |
| | nucleoplasm > transcription factor complex |
| | endoplasmic reticulum > endoplasmic reticulum membrane |
| | cell > plasma membrane |
| | HUMAN PROTEIN DOMAINS (INTERPRO SIGNATURES) |
| | No Domain Hit |
| hP1-10-004 | HUMAN PANTHER CLASSIFICATIONS |
| (SEQ ID NO: 62) | FAMILY (SUBFAMILY) |
| | (2&apos; −5&apos;)OLIGOADENYLATE SYNTHETASE ((2&apos; −5&apos;) |
| | OLIGOADENYLATE SYNTHETASE) |
| | MOLECULAR FUNCTIONS |
| | SYNTHASE AND SYNTHETASE > SYNTHETASE |
| | TRANSFERASE > NUCLEOTIDYLTRANSFERASE |
| | BIOLOGICAL PROCESS |
| | IMMUNITY AND DEFENSE > INTERFERON-MEDIATED |
| | IMMUNITY |
| | HUMAN GENE ONTOLOGY |
| | PROCESS |
| | defence response > immune response |
| | ubiquitin cycle > monoubiquitylation |
| | metabolism > nucleobase, nucleoside, nucleotide and nucleic acid |
| | metabolism |
| | N-terminal fatty acid:protein modification > protein myristylation |
| | neurogenesis > central nervous system development |
| | FUNCTION |
| | nucleic acid binding > RNA binding |
| | GO molecular function > nucleic acid binding |
| | small protein conjugating enzyme > ubiquitin conjugating enzyme |
| | enzyme > polynucleotide adenylyltransferase |
| | defense/immunity protein > antiviral response protein |
| | LOCATION |
| | cell > cytoplasm |
| | endoplasmic reticulum > microsome |
| | cell > nucleus |
| | mitochondrial membrane > mitochondrial inner membrane |
| | HUMAN PROTEIN DOMAINS (INTERPRO SIGNATURES) |
| | IPR000626 (UBQ) |
| | IPR000626 (ubiquitin) |
| | IPR001201 (PAP) |
| | IPR001201 (PAP CORE) |
| | IPR000626 (UBIQUITIN 2) |
| | IPR001797 (25A SYNTH 3) |
| | IPR001797 (25A SYNTH 2) |
| | IPR001797 (25A SYNTH 1) |
| hP2-10-004 | HUMAN PANTHER CLASSIFICATIONS |
| (SEQ ID NO: 64) | FAMILY (SUBFAMILY) |
| | (2&apos; −5&apos;)OLIGOADENYLATE SYNTHETASE((2&apos; −5&apos;) |
| | OLIGOADENYLATE SYNTHETASE) |
| | MOLECULAR FUNCTIONS |
| | SYNTHASE AND SYNTHETASE > SYNTHETASE |
| | TRANSFERASE > NUCLEOTIDYLTRANSFERASE |
| | BIOLOGICAL PROCESS |
| | IMMUNITY AND DEFENSE > INTERFERON-MEDIATED |
| | IMMUNITY |
| | HUMAN GENE ONTOLOGY |
| | PROCESS |
| | defence response > immune response |
| | metabolism > nucleobase, nucleoside, nucleotide and nucleic acid |
| | metabolism |
| | ubiquitin cycle > monoubiquitylation |
| | N-terminal fatty acid:protein modification > protein myristylation |
| | neurogenesis > central nervous system development |
| | FUNCTION |
| | nucleic acid binding > RNA binding |
| | GO molecular function > nucleic acid binding |
| | enzyme > polynucleotide adenylyltransferase |
| | small protein conjugating enzyme > ubiquitin conjugating enzyme |
| | defense/immunity protein > antiviral response protein |
| | LOCATION |
| | cell > cytoplasm |
| | endoplasmic reticulum > microsome |
| | cell > nucleus |
| | mitochondrial membrane > mitochondrial inner membrane |
| | HUMAN PROTEIN DOMAINS (INTERPRO SIGNATURES) |
| | IPR001201 (PAP) |
| | IPR001201 (PAP CORE) |
| | IPR001797 (25A SYNTH 3) |
| | IPR001797 (25A SYNTH 1) |
| hP1-10-005 | HUMAN PANTHER CLASSIFICATIONS |
| (SEQ ID NO: 70) | FAMILY (SUBFAMILY) |
| | ATP-BINDING CASSETTE TRANSPORTER-RELATED (ATP- |
| | BINDING CASSETTE TRANSPORTER ABCB9-RELATED) |
| | MOLECULAR FUNCTIONS |
| | TRANSPORTER > ATP-BINDING CASSETTE |
| | BIOLOGICAL PROCESS |
| | PROTEIN METABOLISM AND MODIFICATION > PROTEIN |
| | COMPLEX ASSEMBLY |
| | TRANSPORT |
| | IMMUNITY AND DEFENSE > T-CELL MEDIATED IMMUNITY > MHCI- |
| | MEDIATED IMMUNITY |
| | HUMAN GENE ONTOLOGY |
| | PROCESS |
| | cell growth and maintenance > transport |
| | peptide transport > oligopeptide transport |
| | xenobiotic metabolism > drug resistance |
| | gametogenesis > spermatogenesis |
| | defence response > cellular defense response |
| | FUNCTION |
| | nucleotide binding > ATP binding |
| | P-P-bond-hydrolysis-driven transporter > ATP-binding cassette (ABC) |
| | transporter |
| | adenosinetriphosphatase > sodium-exporting ATPase |
| | serine-type endopeptidase > subtilase |
| | P-type ATPase |
| | sodium transporter |
| | adenosinetriphosphatase > sodium-exporting ATPase |
| | bile acid transporter > bile acid porter |
| | ABC-type efflux porter |
| | LOCATION |
| | cell > membrane fraction |
| | plasma membrane > integral plasma membrane protein |
| | mitochondrial membrane > mitochondrial inner membrane |
| | cell > plasma membrane |
| | mitochondrion > mitochondrial membrane |
| | HUMAN PROTEIN DOMAINS (INTERPRO SIGNATURES) |
| | IPR003593 (AAA) |
| | IPR001140 (ABC membrane) |
| | IPR003439 (ABC tran) |
| | IPR003439 (DA BOX) |
| | IPR001687 (ATP GTP A2) |
| | IPR003439 (ABC TRANSPORTER) |
| | IPR001687 (ATP GTP A) |
| hP2-10-005 | HUMAN PANTHER CLASSIFICATIONS |
| (SEQ ID NO: 72) | FAMILY (SUBFAMILY) |
| | ATP-BINDING CASSETTE TRANSPORTER-RELATED(ATP- |
| | BINDING CASSETTE TRANSPORTER ABCB9-RELATED) |
| | MOLECULAR FUNCTIONS |
| | TRANSPORTER > ATP-BINDING CASSETTE |
| | BIOLOGICAL PROCESS |
| | PROTEIN METABOLISM AND MODIFICATION > PROTEIN |
| | COMPLEX ASSEMBLY |
| | TRANSPORT |
| | IMMUNITY AND DEFENSE > T-CELL MEDIATED IMMUNITY > MHCI- |
| | MEDIATED IMMUNITY |
| | HUMAN GENE ONTOLOGY |
| | PROCESS |
| | cell growth and maintenance > transport |
| | peptide transport > oligopeptide transport |
| | xenobiotic metabolism > drug resistance |
| | gametogenesis > spermatogenesis |
| | defence response > cellular defense response |
| | FUNCTION |
| | nucleotide binding > ATP binding |
| | P-P-bond-hydrolysis-driven transporter > ATP-binding cassette (ABC) |
| | transporter |
| | adenosinetriphosphatase > sodium-exporting ATPase |
| | serine-type endopeptidase > subtilase |
| | P-type ATPase |
| | sodium transporter |
| | adenosinetriphosphatase > sodium-exporting ATPase |
| | bile acid transporter > bile acid porter |
| | ABC-type efflux porter |
| | LOCATION |
| | cell > membrane fraction |
| | plasma membrane > integral plasma membrane protein |
| | mitochondrial membrane > mitochondrial inner membrane |
| | cytoplasm > mitochondrion |
| | cell > plasma membrane |
| | HUMAN PROTEIN DOMAINS (INTERPRO SIGNATURES) |
| | IPR003593 (AAA) |
| | IPR001140 (ABC membrane) |
| | IPR003439 (ABC tran) |
| | IPR003439 (DA BOX) |
| | IPR001687 (ATP GTP A2) |
| | IPR003439 (ABC TRANSPORTER) |
| | IPR001687 (ATP GTP A) |
| hP1-10-006 | HUMAN PANTHER CLASSIFICATIONS |
| (SEQ ID NO: 78) | FAMILY (SUBFAMILY) |
| | COILED-COIL PROTEINHUMAN GENE ONTOLOGY |
| | PROCESS |
| | protein modification > protein phosphorylation |
| | muscle contraction > muscle contraction regulation |
| | protein metabolism and modification > protein modification |
| | organelle organization and biogenesis > cytoskeleton organization and |
| | biogenesis |
| | cell communication > cell adhesion |
| | FUNCTION |
| | protein binding > actin binding |
| | GO molecular function > ligand binding or carrier |
| | GO molecular function > ligand binding or carrier |
| | nucleotide binding > ATP binding |
| | microtubule binding |
| | motor > microtubule motor |
| | LOCATION |
| | cell > cytoplasm |
| | cytoplasm > cytoskeleton |
| | actin cytoskeleton > non-muscle myosin |
| | plasma membrane > intercellular junction |
| | extracellular > extracellular matrix |
| | HUMAN PROTEIN DOMAINS (INTERPRO SIGNATURES) |
| | No Domain Hit |
| hP2-10-006 | HUMAN PANTHER CLASSIFICATIONS |
| (SEQ ID NO: 80) | No Panther Hit |
| | HUMAN GENE ONTOLOGY |
| | No Gene Ontology |
| | HUMAN PROTEIN DOMAINS (INTERPRO SIGNATURES) |
| | No Domain Hit |
| hP3-10-006 | HUMAN PANTHER CLASSIFICATIONS |
| (SEQ ID NO: 82) | No Panther Hit |
| | HUMAN GENE ONTOLOGY |
| | No Gene Ontology |
| | HUMAN PROTEIN DOMAINS (INTERPRO SIGNATURES) |
| | No Domain Hit |
| hP1-08-002 | HUMAN PANTHER CLASSIFICATIONS |
| (SEQ ID NO: 88) | No Panther Hit |
| | HUMAN GENE ONTOLOGY |
| | PROCESS |
| | ectoderm development > tracheal system development |
| | FUNCTION |
| | O-glucosyl hydrolase |
| | antimicrobial response protein > lysozyme |
| | LOCATION |
| | nuclear membrane > nuclear membrane lumen |
| | HUMAN PROTEIN DOMAINS (INTERPRO SIGNATURES) |
| | IPR001472 (NLS BP) |
| | IPR001687 (ATP GTP A) |
| hP2-08-002 | HUMAN PANTHER CLASSIFICATIONS |
| (SEQ ID NO: 90) | No Panther Hit |
| | HUMAN GENE ONTOLOGY |
| | PROCESS |
| | ectoderm development > tracheal system development |
| | FUNCTION |
| | O-glucosyl hydrolase |
| | antimicrobial response protein > lysozyme |
| | LOCATION |
| | nuclear membrane > nuclear membrane lumen |
| | HUMAN PROTEIN DOMAINS (INTERPRO SIGNATURES) |
| | IPR001472 (NLS BP) |
| | IPR001687 (ATP GTP A) |
| hP3-08-002 | HUMAN PANTHER CLASSIFICATIONS |
| (SEQ ID NO: 92) | No Panther Hit |
| | HUMAN GENE ONTOLOGY |
| | PROCESS |
| | ectoderm development > tracheal system development |
| | FUNCTION |
| | O-glucosyl hydrolase |
| | antimicrobial response protein > lysozyme |
| | LOCATION |
| | nuclear membrane > nuclear membrane lumen |
| | HUMAN PROTEIN DOMAINS (INTERPRO SIGNATURES) |
| | No Domain Hit |
| hP08-004 | HUMAN PANTHER CLASSIFICATIONS |
| (SEQ ID NO: 98) | FAMILY (SUBFAMILY) |
| | ARYLSULFATASE-RELATED(ARYLSULFATASE B) |
| | MOLECULAR FUNCTIONS |
| | HYDROLASE > OTHER HYDROLASE |
| | BIOLOGICAL PROCESS |
| | BIOLOGICAL PROCESS UNCLASSIFIED |
| | HUMAN GENE ONTOLOGY |
| | PROCESS |
| | cell growth and maintenance > metabolism |
| | lysosome organization and biogenesis > lysosomal transport |
| | catabolism > glycosaminoglycan catabolism |
| | aminoglycan catabolism |
| | metabolism > carbohydrate metabolism |
| | carbohydrate metabolism > proteoglycan metabolism |
| | FUNCTION |
| | enzyme > sulfatase |
| | sulfatase > N-acetylgalactosamine-4-sulfatase |
| | sulfatase > arylsulfatase |
| | sulfatase > steryl-sulfatase |
| | sulfatase > cerebroside-sulfatase |
| | LOCATION |
| | cytoplasm > lysosome |
| | endoplasmic reticulum > microsome |
| | extracellular > extracellular matrix |
| | cell > membrane fraction |
| | cytoplasm > endosome |
| | HUMAN PROTEIN DOMAINS (INTERPRO SIGNATURES) |
| | IPR000917 (Sulfatase) |
| | IPR000917 (SULFATASE 2) |
| | IPR000917 (SULFATASE 1) |
| hP1-08-005 | HUMAN PANTHER CLASSIFICATIONS |
| (SEQ ID NO: 104) | FAMILY (SUBFAMILY) |
| | UBIQUITIN--PROTEIN LIGASE-RELATED (UBIQUITIN-PROTEIN |
| | LIGASE NEDD4) |
| | MOLECULAR FUNCTIONS |
| | LIGASE > ALL NON-DNA LIGASES |
| | BIOLOGICAL PROCESS |
| | PROTEIN METABOLISM AND MODIFICATION > PROTEOLYSIS |
| | HUMAN GENE ONTOLOGY |
| | PROCESS |
| | lysine metabolism |
| | aspartate family amino-acid catabolism > lysine catabolism |
| | ubiquitin cycle > monoubiquitylation |
| | ubiquitin cycle > monoubiquitylation |
| | ubiquitin-dependent protein degradation > ubiquitin cycle |
| | signal transduction |
| | FUNCTION |
| | enzyme > ubiquitin--protein ligase |
| | protein serine/threonine kinase > protein kinase C |
| | nucleotide binding > ATP binding |
| | GO molecular function > enzyme |
| | enzyme > protein kinase |
| | LOCATION |
| | cell > ubiquitin ligase complex |
| | cell > plasma membrane |
| | cytoplasm > synaptic vesicle |
| | cell > nucleus |
| | cell > membrane fraction |
| | HUMAN PROTEIN DOMAINS (INTERPRO SIGNATURES) |
| | IPR000008 (C2DOMAIN) |
| | IPR000569 (HECT) |
| | IPR000008 (C2 DOMAIN 2) |
| | IPR001202 (WW DOMAIN 1) |
| | IPR002349 (WWDOMAIN) |
| | IPR001202 (WW) |
| | IPR000008 (C2) |
| | IPR000569 (HECTc) |
| | IPR001202 (WW) |
| | IPR000569 (HECT) |
| | IPR000008 (C2) |
| | IPR001202 (WW DOMAIN 2 4) |
| hP2-08-005 | HUMAN PANTHER CLASSIFICATIONS |
| (SEQ ID NO: 106) | FAMILY (SUBFAMILY) |
| | UBIQUITIN--PROTEIN LIGASE-RELATED (UBIQUITIN-PROTEIN |
| | LIGASE NEDD4) |
| | MOLECULAR FUNCTIONS |
| | LIGASE > ALL NON-DNA LIGASES |
| | BIOLOGICAL PROCESS |
| | PROTEIN METABOLISM AND MODIFICATION > PROTEOLYSIS |
| | HUMAN GENE ONTOLOGY |
| | PROCESS |
| | lysine metabolism |
| | aspartate family amino-acid catabolism > lysine catabolism |
| | cell growth and maintenance > transport |
| | ubiquitin cycle > monoubiquitylation |
| | ubiquitin cycle > monoubiquitylation |
| | signal transduction |
| | FUNCTION |
| | enzyme > ubiquitin--protein ligase |
| | protein serine/threonine kinase > protein kinase C |
| | lipid binding > phospholipid binding |
| | nucleotide binding > ATP binding |
| | GO molecular function > enzyme |
| | LOCATION |
| | cell > ubiquitin ligase complex |
| | cell > plasma membrane |
| | cytoplasm > synaptic vesicle |
| | cell > membrane fraction |
| | cell > nucleus |
| | HUMAN PROTEIN DOMAINS (INTERPRO SIGNATURES) |
| | IPR000008 (C2DOMAIN) |
| | IPR000569 (HECT) |
| | IPR000008 (C2 DOMAIN 2) |
| | IPR001202 (WW DOMAIN 1) |
| | IPR000008 (C2 DOMAIN 1) |
| | IPR002349 (WWDOMAIN) |
| | IPR001202 (WW) |
| | IPR000008 (C2) |
| | IPR000569 (HECTc) |
| | IPR001202 (WW) |
| | IPR000569 (HECT) |
| | IPR000008 (C2) |
| | IPR001202 (WW DOMAIN 2 4) |
| hP3-08-005 | HUMAN PANTHER CLASSIFICATIONS |
| (SEQ ID NO: 108) | FAMILY (SUBFAMILY) |
| | UBIQUITIN--PROTEIN LIGASE-RELATED (UBIQUITIN-PROTEIN |
| | LIGASE NEDD4) |
| | MOLECULAR FUNCTIONS |
| | LIGASE > ALL NON-DNA LIGASES |
| | BIOLOGICAL PROCESS |
| | PROTEIN METABOLISM AND MODIFICATION > PROTEOLYSIS |
| | HUMAN GENE ONTOLOGY |
| | PROCESS |
| | lysine metabolism |
| | aspartate family amino-acid catabolism > lysine catabolism |
| | ubiquitin cycle > monoubiquitylation |
| | ubiquitin cycle > monoubiquitylation |
| | ubiquitin-dependent protein degradation > ubiquitin cycle |
| | signal transduction |
| | FUNCTION |
| | enzyme > ubiquitin--protein ligase |
| | protein serine/threonine kinase > protein kinase C |
| | nucleotide binding > ATP binding |
| | GO molecular function > enzyme |
| | enzyme > protein kinase |
| | LOCATION |
| | cell > ubiquitin ligase complex |
| | cell > plasma membrane |
| | cytoplasm > synaptic vesicle |
| | cell > nucleus |
| | cell > membrane fraction |
| | HUMAN PROTEIN DOMAINS (INTERPRO SIGNATURES) |
| | IPR000008 (C2DOMAIN) |
| | IPR000569 (HECT) |
| | IPR000008 (C2 DOMAIN 2) |
| | IPR001202 (WW DOMAIN 1) |
| | IPR002349 (WWDOMAIN) |
| | IPR001202 (WW) |
| | IPR000008 (C2) |
| | IPR000569 (HECTc) |
| | IPR001202 (WW) |
| | IPR000569 (HECT) |
| | IPR000008 (C2) |
| | IPR001202 (WW DOMAIN 2 4) |
| hP4-08-005 | HUMAN PANTHER CLASSIFICATIONS |
| (SEQ ID NO: 110) | FAMILY (SUBFAMILY) |
| | UBIQUITIN--PROTEIN LIGASE-RELATED(UBIQUITIN-PROTEIN |
| | LIGASE NEDD4) |
| | MOLECULAR FUNCTIONS |
| | LIGASE > ALL NON-DNA LIGASES |
| | BIOLOGICAL PROCESS |
| | PROTEIN METABOLISM AND MODIFICATION > PROTEOLYSIS |
| | HUMAN GENE ONTOLOGY |
| | PROCESS |
| | lysine metabolism |
| | aspartate family amino-acid catabolism > lysine catabolism |
| | ubiquitin cycle > monoubiquitylation |
| | ubiquitin cycle > monoubiquitylation |
| | ubiquitin-dependent protein degradation > ubiquitin cycle |
| | central nervous system development > brain development |
| | FUNCTION |
| | enzyme > ubiquitin--protein ligase |
| | GO molecular function > enzyme |
| | small protein conjugating enzyme > ubiquitin conjugating enzyme |
| | nucleotide binding > ATP binding |
| | enzyme > nitric oxide synthase |
| | LOCATION |
| | cell > ubiquitin ligase complex |
| | cell > plasma membrane |
| | cell > nucleus |
| | plasma membrane > peripheral plasma membrane protein |
| | GO cellular component > cellular_component unknown |
| | HUMAN PROTEIN DOMAINS (INTERPRO SIGNATURES) |
| | IPR002349 (WWDOMAIN) |
| | IPR000008 (C2 DOMAIN 2) |
| | IPR001202 (WW DOMAIN 1) |
| | IPR001202 (WW) |
| | IPR000008 (C2) |
| | IPR000569 (HECTc) |
| | IPR001202 (WW) |
| | IPR000569 (HECT) |
| | IPR000008 (C2) |
| | IPR001202 (WW DOMAIN 2 3) |
| | IPR000569 (HECT) |
| hP1-08-006 | HUMAN PANTHER CLASSIFICATIONS |
| (SEQ ID NO: 116) | No Panther Hit |
| | HUMAN GENE ONTOLOGY |
| | PROCESS |
| | neurogenesis > central nervous system development |
| | transcription, DNA-dependent > transcription regulation |
| | cell death > apoptosis |
| | protein modification > protein phosphorylation |
| | glycine metabolism |
| | serine family amino-acid catabolism > glycine catabolism |
| | FUNCTION |
| | enzyme > nitric oxide synthase |
| | GO molecular function > cell cycle regulator |
| | enzyme > protein kinase |
| | nucleotide binding > ATP binding |
| | molecular_function unknown > minor histocompatibility antigen |
| | LOCATION |
| | GO cellular component > extracellular |
| | microtubule organizing center > centrosome |
| | extracellular > extracellular space |
| | cell > nucleus |
| | cell > membrane fraction |
| | HUMAN PROTEIN DOMAINS (INTERPRO SIGNATURES) |
| | No Domain Hit |
| hP2-08-006 | HUMAN PANTHER CLASSIFICATIONS |
| (SEQ ID NO: 118) | No Panther Hit |
| | HUMAN GENE ONTOLOGY |
| | No Gene Ontology |
| | HUMAN PROTEIN DOMAINS (INTERPRO SIGNATURES) |
| | No Domain Hit |
| hP08-007 | HUMAN PANTHER CLASSIFICATIONS |
| (SEQ ID NO: 124) | No Panther Hit |
| | HUMAN GENE ONTOLOGY |
| | PROCESS |
| | protein biosynthesis > protein synthesis initiation |
| | FUNCTION |
| | nucleic acid binding > RNA binding |
| | LOCATION |
| | nuclear membrane > nuclear membrane lumen |
| | cell > cytoplasm |
| | cell > plasma membrane |
| | HUMAN PROTEIN DOMAINS (INTERPRO SIGNATURES) |
| | IPR003890 (MIF4G) |
| hP1-08-008 | HUMAN PANTHER CLASSIFICATIONS |
| (SEQ ID NO: 130) | FAMILY (SUBFAMILY) |
| | CYTOCHROME B5 (CYTOCHROME B5) |
| | MOLECULAR FUNCTIONS |
| | OXIDOREDUCTASE > OXIDASE |
| | BIOLOGICAL PROCESS |
| | ELECTRON TRANSPORT > OTHER PATHWAYS OF ELECTRON |
| | TRANSPORT |
| | HUMAN GENE ONTOLOGY |
| | PROCESS |
| | metabolism > electron transport |
| | metabolism > energy pathways |
| | transition metal transport > iron transport |
| | FUNCTION |
| | flavin-containing electron transfer protein > electron transfer flavoprotein |
| | enzyme > cytochrome-c oxidase |
| | enzyme > cytochrome b5 reductase |
| | LOCATION |
| | endoplasmic reticulum > microsome |
| | cell > membrane fraction |
| | cytoplasm > mitochondrion |
| | cytoplasm > endoplasmic reticulum |
| | HUMAN PROTEIN DOMAINS (INTERPRO SIGNATURES) |
| | No Domain Hit |
| hP2-08-008 | HUMAN PANTHER CLASSIFICATIONS |
| (SEQ ID NO: 132) | FAMILY (SUBFAMILY) |
| | CYTOCHROME B5 (CYTOCHROME B5) |
| | MOLECULAR FUNCTIONS |
| | OXIDOREDUCTASE > OXIDASE |
| | BIOLOGICAL PROCESS |
| | ELECTRON TRANSPORT > OTHER PATHWAYS OF ELECTRON |
| | TRANSPORT |
| | HUMAN GENE ONTOLOGY |
| | PROCESS |
| | metabolism > electron transport |
| | fatty acid metabolism > fatty acid desaturation |
| | metabolism > energy pathways |
| | isoprenoid catabolism > xenobiotic metabolism |
| | transition metal transport > iron transport |
| | FUNCTION |
| | flavin-containing electron transfer protein > electron transfer flavoprotein |
| | enzyme > C-5 sterol desaturase |
| | enzyme > cytochrome b5 reductase |
| | enzyme > stearoyl-CoA 9-desaturase |
| | enzyme > sulfite oxidase |
| | LOCATION |
| | endoplasmic reticulum > microsome |
| | cell > membrane fraction |
| | cytoplasm > endoplasmic reticulum |
| | cytoplasm > mitochondrion |
| | plasma membrane > integral plasma membrane protein |
| | HUMAN PROTEIN DOMAINS (INTERPRO SIGNATURES) |
| | IPR001199 (CYTOCHROMEB5) |
| | IPR001199 (heme 1) |
| | IPR001199 (CYTOCHROME B5 2) |
| | IPR001199 (CYTOCHROME B5 1) |
| hP3-08-008 | HUMAN PANTHER CLASSIFICATIONS |
| (SEQ ID NO: 134) | FAMILY (SUBFAMILY) |
| | CYTOCHROME B5 (CYTOCHROME B5) |
| | MOLECULAR FUNCTIONS |
| | OXIDOREDUCTASE > OXIDASE |
| | BIOLOGICAL PROCESS |
| | ELECTRON TRANSPORT > OTHER PATHWAYS OF ELECTRON |
| | TRANSPORT |
| | HUMAN GENE ONTOLOGY |
| | PROCESS |
| | metabolism > electron transport |
| | metabolism > energy pathways |
| | transition metal transport > iron transport |
| | FUNCTION |
| | flavin-containing electron transfer protein > electron transfer flavoprotein |
| | enzyme > cytochrome-c oxidase |
| | enzyme > cytochrome b5 reductase |
| | LOCATION |
| | endoplasmic reticulum > microsome |
| | cell > membrane fraction |
| | cytoplasm > mitochondrion |
| | cytoplasm > endoplasmic reticulum |
| | HUMAN PROTEIN DOMAINS (INTERPRO SIGNATURES) |
| | No Domain Hit |
| hP4-08-008 | HUMAN PANTHER CLASSIFICATIONS |
| (SEQ ID NO: 136) | FAMILY (SUBFAMILY) |
| | CYTOCHROME B5(CYTOCHROME B5) |
| | MOLECULAR FUNCTIONS |
| | OXIDOREDUCTASE > OXIDASE |
| | BIOLOGICAL PROCESS |
| | ELECTRON TRANSPORT > OTHER PATHWAYS OF ELECTRON |
| | TRANSPORT |
| | HUMAN GENE ONTOLOGY |
| | PROCESS |
| | metabolism > electron transport |
| | FUNCTION |
| | flavin-containing electron transfer protein > electron transfer flavoprotein |
| | LOCATION |
| | endoplasmic reticulum > microsome |
| | cell > membrane fraction |
| | HUMAN PROTEIN DOMAINS (INTERPRO SIGNATURES) |
| | No Domain Hit |
| hP1-08-009 | HUMAN PANTHER CLASSIFICATIONS |
| (SEQ ID NO: 142) | FAMILY (SUBFAMILY) |
| | RETINOBLASTOMA BINDING PROTEIN-RELATEDHUMAN GENE |
| | ONTOLOGY |
| | PROCESS |
| | DNA metabolism > DNA integration |
| | transcription, DNA-dependent > transcription from Pol II promoter |
| | transcription, DNA-dependent > transcription regulation |
| | FUNCTION |
| | nucleic acid binding > DNA binding |
| | DNA binding > transcription factor |
| | ligand binding or carrier > protein binding |
| | LOCATION |
| | nucleus > nucleoplasm |
| | nuclear membrane > nuclear membrane lumen |
| | cell > nucleus |
| | nucleus > nucleoplasm |
| | chromosome |
| | HUMAN PROTEIN DOMAINS (INTERPRO SIGNATURES) |
| | IPR001606 (BRIGHT) |
| | IPR001606 (ARID) |
| | NULL (SER RICH) |
| | IPR000694 (PRO RICH) |
| | IPR001472 (NLS BP) |
| hP2-08-009 | HUMAN PANTHER CLASSIFICATIONS |
| (SEQ ID NO: 145) | No Panther Hit |
| | HUMAN GENE ONTOLOGY |
| | No Gene Ontology |
| | HUMAN PROTEIN DOMAINS (INTERPRO SIGNATURES) |
| | NULL (GLN RICH) |
| hP1-08-010 | HUMAN PANTHER CLASSIFICATIONS |
| (SEQ ID NO: 151) | FAMILY (SUBFAMILY) |
| | PROTEASOME COMPONENT C7-I (PROTEASOME COMPONENT) |
| | MOLECULAR FUNCTIONS |
| | PROTEASE > OTHER PROTEASES |
| | BIOLOGICAL PROCESS |
| | PROTEIN METABOLISM AND MODIFICATION > PROTEOLYSIS |
| | HUMAN GENE ONTOLOGY |
| | PROCESS |
| | proteolysis and peptidolysis > ubiquitin-dependent protein degradation |
| | transcription, DNA-dependent > transcription regulation |
| | FUNCTION |
| | threonine endopeptidase > multicatalytic endopeptidase |
| | enzyme > peptidase |
| | DNA binding > transcription factor |
| | peptidase > endopeptidase |
| | LOCATION |
| | 26S proteasome > 20S core proteasome |
| | cytosol > 26S proteasome |
| | cell > nucleus |
| | HUMAN PROTEIN DOMAINS (INTERPRO SIGNATURES) |
| | IPR001353 (proteasome) |
| | IPR001353 (PROTEASOME PROTEASE) |
| | IPR000243 (PROTEASOME B) |
| hP2-08-010 | HUMAN PANTHER CLASSIFICATIONS |
| (SEQ ID NO: 153) | FAMILY (SUBFAMILY) |
| | PROTEASOME COMPONENT C7-I (PROTEASOME COMPONENT) |
| | MOLECULAR FUNCTIONS |
| | PROTEASE > OTHER PROTEASES |
| | BIOLOGICAL PROCESS |
| | PROTEIN METABOLISM AND MODIFICATION > PROTEOLYSIS |
| | HUMAN GENE ONTOLOGY |
| | PROCESS |
| | proteolysis and peptidolysis > ubiquitin-dependent protein degradation |
| | transcription, DNA-dependent > transcription regulation |
| | FUNCTION |
| | threonine endopeptidase > multicatalytic endopeptidase |
| | enzyme > peptidase |
| | DNA binding > transcription factor |
| | peptidase > endopeptidase |
| | LOCATION |
| | 26S proteasome > 20S core proteasome |
| | cytosol > 26S proteasome |
| | cell > nucleus |
| | HUMAN PROTEIN DOMAINS (INTERPRO SIGNATURES) |
| | IPR001353 (proteasome) |
| | IPR001353 (PROTEASOME PROTEASE) |
| | IPR000243 (PROTEASOME B) |
| hP3-08-010 | HUMAN PANTHER CLASSIFICATIONS |
| (SEQ ID NO: 155) | FAMILY (SUBFAMILY) |
| | PROTEASOME COMPONENT C7-I(PROTEASOME COMPONENT) |
| | MOLECULAR FUNCTIONS |
| | PROTEASE > OTHER PROTEASES |
| | BIOLOGICAL PROCESS |
| | PROTEIN METABOLISM AND MODIFICATION > PROTEOLYSIS |
| | HUMAN GENE ONTOLOGY |
| | PROCESS |
| | proteolysis and peptidolysis > ubiquitin-dependent protein degradation |
| | transcription, DNA-dependent > transcription regulation |
| | FUNCTION |
| | threonine endopeptidase > multicatalytic endopeptidase |
| | enzyme > peptidase |
| | DNA binding > transcription factor |
| | LOCATION |
| | 26S proteasome > 20S core proteasome |
| | cytosol > 26S proteasome |
| | cell > nucleus |
| | HUMAN PROTEIN DOMAINS (INTERPRO SIGNATURES) |
| | IPR001353 (proteasome) |
| | IPR001353 (PROTEASOME PROTEASE) |
| hP08-011 | HUMAN PANTHER CLASSIFICATIONS |
| (SEQ ID NO: 161) | FAMILY (SUBFAMILY) |
| | UNCHARACTERIZED(UNCHARACTERIZED) |
| | MOLECULAR FUNCTIONS |
| | MOLECULAR FUNCTION UNKNOWN |
| | BIOLOGICAL PROCESS |
| | BIOLOGICAL PROCESS UNKNOWN |
| | HUMAN GENE ONTOLOGY |
| | PROCESS |
| | metabolism > electron transport |
| | FUNCTION |
| | glucosidase > mannosyl-oligosaccharide glucosidase (processing A- |
| | glucosidase I) |
| | LOCATION |
| | cell > membrane fraction |
| | cytoplasm > peroxisome |
| | HUMAN PROTEIN DOMAINS (INTERPRO SIGNATURES) |
| | No Domain Hit |
| hP1-08-012 | HUMAN PANTHER CLASSIFICATIONS |
| (SEQ ID NO: 167) | No Panther Hit |
| | HUMAN GENE ONTOLOGY |
| | PROCESS |
| | nuclear organization and biogenesis > chromosome organization and |
| | biogenesis |
| | DNA metabolism > DNA packaging |
| | transcription, DNA-dependent > transcription regulation |
| | FUNCTION |
| | nucleic acid binding > DNA binding |
| | DNA binding > AT DNA binding |
| | LOCATION |
| | chromosome > chromatin |
| | cell > nucleus |
| | HUMAN PROTEIN DOMAINS (INTERPRO SIGNATURES) |
| | IPR000637 (ATHOOK) |
| | IPR000116 (HIGHMOBLTYIY) |
| | IPR000637 (AT hook) |
| | IPR001472 (NLS BP) |
| | IPR000637 (HMGI Y) |
| | IPR000116 (sp P17096 HMGI HUMAN) |
| hP2-08-012 | HUMAN PANTHER CLASSIFICATIONS |
| (SEQ ID NO: 169) | No Panther Hit |
| | HUMAN GENE ONTOLOGY |
| | PROCESS |
| | DNA metabolism > DNA packaging |
| | nuclear organization and biogenesis > chromosome organization and |
| | biogenesis |
| | transcription, DNA-dependent > transcription regulation |
| | FUNCTION |
| | nucleic acid binding > DNA binding |
| | DNA binding > AT DNA binding |
| | LOCATION |
| | chromosome > chromatin |
| | cell > nucleus |
| | HUMAN PROTEIN DOMAINS (INTERPRO SIGNATURES) |
| | IPR000637 (ATHOOK) |
| | IPR000116 (HIGHMOBLTYIY) |
| | IPR000637 (AT hook) |
| | IPR000637 (HMGI Y) |
| | IPR000116 (sp P17096 HMGI HUMAN) |
| hP3-08-012 | HUMAN PANTHER CLASSIFICATIONS |
| (SEQ ID NO: 171) | No Panther Hit |
| | HUMAN GENE ONTOLOGY |
| | PROCESS |
| | DNA metabolism > DNA packaging |
| | LOCATION |
| | chromosome > chromatin |
| | HUMAN PROTEIN DOMAINS (INTERPRO SIGNATURES) |
| | IPR000637 (ATHOOK) |
| | IPR000116 (HIGHMOBLTYIY) |
| | IPR000637 (AT hook) |
| | IPR001472 (NLS BP) |
| | IPR000637 (HMGI Y) |
| hP4-08-012 | HUMAN PANTHER CLASSIFICATIONS |
| (SEQ ID NO: 173) | No Panther Hit |
| | HUMAN GENE ONTOLOGY |
| | PROCESS |
| | DNA metabolism > DNA packaging |
| | nuclear organization and biogenesis > chromosome organization and |
| | biogenesis |
| | transcription, DNA-dependent > transcription regulation |
| | FUNCTION |
| | nucleic acid binding > DNA binding |
| | DNA binding > AT DNA binding |
| | LOCATION |
| | chromosome > chromatin |
| | cell > nucleus |
| | HUMAN PROTEIN DOMAINS (INTERPRO SIGNATURES) |
| | IPR000637 (ATHOOK) |
| | IPR000116 (HIGHMOBLTYIY) |
| | IPR000637 (AT hook) |
| | IPR001472 (NLS BP) |
| | IPR000637 (HMGI Y) |
| | IPR000116 (sp P17096 HMGI HUMAN) |
| hP5-08-012 | HUMAN PANTHER CLASSIFICATIONS |
| (SEQ ID NO: 175) | No Panther Hit |
| | HUMAN GENE ONTOLOGY |
| | PROCESS |
| | DNA metabolism > DNA packaging |
| | nuclear organization and biogenesis > chromosome organization and |
| | biogenesis |
| | transcription, DNA-dependent > transcription regulation |
| | FUNCTION |
| | nucleic acid binding > DNA binding |
| | DNA binding > AT DNA binding |
| | LOCATION |
| | chromosome > chromatin |
| | cell > nucleus |
| | HUMAN PROTEIN DOMAINS (INTERPRO SIGNATURES) |
| | IPR000637 (ATHOOK) |
| | IPR000116 (HIGHMOBLTYIY) |
| | IPR000637 (AT hook) |
| | IPR001472 (NLS BP) |
| | IPR000637 (HMGI Y) |
| | IPR000116 (sp P17096 HMGI HUMAN) |
| hP6-08-012 | HUMAN PANTHER CLASSIFICATIONS |
| (SEQ ID NO: 177) | No Panther Hit |
| | HUMAN GENE ONTOLOGY |
| | PROCESS |
| | DNA metabolism > DNA packaging |
| | nuclear organization and biogenesis > chromosome organization and |
| | biogenesis |
| | transcription, DNA-dependent > transcription regulation |
| | FUNCTION |
| | nucleic acid binding > DNA binding |
| | DNA binding > AT DNA binding |
| | LOCATION |
| | chromosome > chromatin |
| | cell > nucleus |
| | HUMAN PROTEIN DOMAINS (INTERPRO SIGNATURES) |
| | IPR000637 (ATHOOK) |
| | IPR000116 (HIGHMOBLTYIY) |
| | IPR000637 (AT hook) |
| | IPR001472 (NLS BP) |
| | IPR000637 (HMGI Y) |
| | IPR000116 (sp P17096 HMGI HUMAN) |
| hP1-08-013 | HUMAN PANTHER CLASSIFICATIONS |
| (SEQ ID NO: 185) | FAMILY (SUBFAMILY) |
| | C2H2 ZINC FINGER-RELATED (ZINC FINGER PROTEIN 143) |
| | MOLECULAR FUNCTIONS |
| | TRANSCRIPTION FACTOR > ZINC FINGER TRANSCRIPTION |
| | FACTOR > KRAB BOX TRANSCRIPTION FACTOR |
| | BIOLOGICAL PROCESS |
| | NUCLEOSIDE, NUCLEOTIDE AND NUCLEIC ACID METABOLISM > MRNA |
| | TRANSCRIPTION > MRNA TRANSCRIPTION REGULATION |
| | HUMAN GENE ONTOLOGY |
| | PROCESS |
| | transcription, DNA-dependent > transcription regulation |
| | transcription regulation > transcription regulation from Pol II promoter |
| | transcription regulation from Pol II promoter > repression of transcription |
| | from Pol II promoter |
| | transcription regulation > transcription regulation from Pol III promoter |
| | GO biological process > developmental processes |
| | FUNCTION |
| | DNA binding > transcription factor |
| | nucleic acid binding > DNA binding |
| | GO molecular function > nucleic acid binding |
| | transcription factor > transcription activating factor |
| | RNA polymerase II transcription factor > specific RNA polymerase II |
| | transcription factor |
| | LOCATION |
| | cell > nucleus |
| | nucleoplasm > transcription factor complex |
| | nuclear membrane > nuclear membrane lumen |
| | transcription factor complex > mediator complex |
| | nucleus > nuclear chromosome |
| | chromosome |
| | HUMAN PROTEIN DOMAINS (INTERPRO SIGNATURES) |
| | IPR000822 (ZnF C2H2) |
| | IPR000822 (zf-C2H2) |
| | IPR000694 (PRO RICH) |
| | IPR000822 (ZINC FINGER C2H2 2 7) |
| | IPR000822 (ZINC FINGER C2H2 1) |
| hP2-08-013 | HUMAN PANTHER CLASSIFICATIONS |
| (SEQ ID NO: 187) | FAMILY (SUBFAMILY) |
| | C2H2 ZINC FINGER-RELATED(ZINC FINGER PROTEIN 76) |
| | MOLECULAR FUNCTIONS |
| | TRANSCRIPTION FACTOR > ZINC FINGER TRANSCRIPTION |
| | FACTOR > KRAB BOX TRANSCRIPTION FACTOR |
| | BIOLOGICAL PROCESS |
| | NUCLEOSIDE, NUCLEOTIDE AND NUCLEIC ACID METABOLISM > MRNA |
| | TRANSCRIPTION > MRNA TRANSCRIPTION REGULATION |
| | HUMAN GENE ONTOLOGY |
| | PROCESS |
| | transcription, DNA-dependent > transcription regulation |
| | transcription regulation > transcription regulation from Pol II promoter |
| | transcription regulation from Pol II promoter > repression of transcription |
| | from Pol II promoter |
| | GO biological process > developmental processes |
| | transcription regulation > transcription regulation from Pol III promoter |
| | FUNCTION |
| | DNA binding > transcription factor |
| | nucleic acid binding > DNA binding |
| | GO molecular function > nucleic acid binding |
| | transcription factor > transcription activating factor |
| | RNA polymerase II transcription factor > specific RNA polymerase II |
| | transcription factor |
| | LOCATION |
| | cell > nucleus |
| | nucleoplasm > transcription factor complex |
| | nuclear membrane > nuclear membrane lumen |
| | transcription factor complex > mediator complex |
| | nucleus > nuclear chromosome |
| | chromosome |
| | HUMAN PROTEIN DOMAINS (INTERPRO SIGNATURES) |
| | IPR000822 (ZnF C2H2) |
| | IPR000822 (zf-C2H2) |
| | IPR000822 (ZINC FINGER C2H2 2 7) |
| | IPR000822 (ZINC FINGER C2H2 1) |
| hP1-08-014 | HUMAN PANTHER CLASSIFICATIONS |
| (SEQ ID NO: 193) | FAMILY (SUBFAMILY) |
| | RING3-RELATED HUMAN GENE ONTOLOGY |
| | PROCESS |
| | transcription, DNA-dependent > transcription regulation |
| | gametogenesis > spermatogenesis |
| | metal ion homeostasis > zinc homeostasis |
| | mitotic G1 phase |
| | peptidoglycan catabolism > mitotic G1-specific transcription |
| | protein modification > protein acetylation |
| | FUNCTION |
| | nucleic acid binding > DNA binding |
| | transcription factor > transcription activating factor |
| | DNA binding > transcription factor |
| | defense/immunity protein > major histocompatibility complex antigen |
| | enzyme > adenosine kinase |
| | LOCATION |
| | cell > nucleus |
| | cell > cytoplasm |
| | nuclear membrane > nuclear membrane lumen |
| | transcription factor complex > TFIID complex |
| | cell > membrane fraction |
| | HUMAN PROTEIN DOMAINS (INTERPRO SIGNATURES) |
| | IPR001487 (BROMODOMAIN) |
| | IPR000313 (PWWP) |
| | NULL (GLU RICH) |
| | IPR001487 (BROMODOMAIN 2) |
| | IPR001965 (PHD) |
| | IPR000313 (PWWP) |
| | IPR001965 (PHD) |
| | IPR001487 (BROMO) |
| | IPR001487 (bromodomain) |
| | IPR001965 (PHD) |
| | IPR000313 (PWWP) |
| | IPR000694 (PRO RICH) |
| | NULL (CYS RICH) |
| hP2-08-014 | HUMAN PANTHER CLASSIFICATIONS |
| (SEQ ID NO: 195) | FAMILY (SUBFAMILY) |
| | RING3-RELATEDHUMAN GENE ONTOLOGY |
| | PROCESS |
| | transcription, DNA-dependent > transcription regulation |
| | gametogenesis > spermatogenesis |
| | metal ion homeostasis > zinc homeostasis |
| | mitotic G1 phase |
| | peptidoglycan catabolism > mitotic G1-specific transcription |
| | transcription regulation > transcription regulation from Pol II promoter |
| | FUNCTION |
| | nucleic acid binding > DNA binding |
| | transcription factor > transcription activating factor |
| | DNA binding > transcription factor |
| | defense/immunity protein > major histocompatibility complex antigen |
| | enzyme > adenosine kinase |
| | LOCATION |
| | cell > nucleus |
| | cell > cytoplasm |
| | nuclear membrane > nuclear membrane lumen |
| | transcription factor complex > TFIID complex |
| | cell > membrane fraction |
| | HUMAN PROTEIN DOMAINS (INTERPRO SIGNATURES) |
| | IPR001487 (BROMODOMAIN) |
| | IPR001487 (BROMODOMAIN 2) |
| | IPR001965 (PHD) |
| | IPR000313 (PWWP) |
| | IPR001965 (PHD) |
| | IPR001487 (BROMO) |
| | IPR001487 (bromodomain) |
| | IPR001965 (PHD) |
| | IPR000313 (PWWP) |
| | NULL (CYS RICH) |
| | IPR000313 (PWWP) |
| hP08-015 | HUMAN PANTHER CLASSIFICATIONS |
| (SEQ ID NO: 201) | FAMILY (SUBFAMILY) |
| | SH3-CONTAINING ADAPTOR MOLECULE-1-RELATED(gb def: |
| | cg3451 gene product [drosophila melanogaster]) |
| | MOLECULAR FUNCTIONS |
| | MOLECULAR FUNCTION UNCLASSIFIED |
| | BIOLOGICAL PROCESS |
| | BIOLOGICAL PROCESS UNCLASSIFIED |
| | HUMAN GENE ONTOLOGY |
| | PROCESS |
| | cell communication > cell adhesion |
| | endocytosis |
| | peptidoglycan catabolism > synaptic vesicle endocytosis |
| | FUNCTION |
| | protein binding > actin binding |
| | ligand binding or carrier > calcium binding |
| | LOCATION |
| | cell-substrate adherens junction > focal adhesion |
| | cytoskeleton > actin cytoskeleton |
| | nuclear membrane > nuclear membrane lumen |
| | HUMAN PROTEIN DOMAINS (INTERPRO SIGNATURES) |
| | IPR001452 (SH3) |
| | IPR001345 (PGAM) |
| | IPR001452 (SH3) |
| | IPR001452 (SH3) |
| | IPR000449 (UBA) |
| hP08-016 | HUMAN PANTHER CLASSIFICATIONS |
| (SEQ ID NO: 207) | FAMILY (SUBFAMILY) |
| | PROTEASOME COMPONENT C7-I(PROTEASOME) |
| | MOLECULAR FUNCTIONS |
| | PROTEASE > OTHER PROTEASES |
| | BIOLOGICAL PROCESS |
| | PROTEIN METABOLISM AND MODIFICATION > PROTEOLYSIS |
| | HUMAN GENE ONTOLOGY |
| | PROCESS |
| | proteolysis and peptidolysis > ubiquitin-dependent protein degradation |
| | protein metabolism and modification |
| | macromolecule catabolism > proteolysis and peptidolysis |
| | cell growth and maintenance > stress response |
| | cell growth and maintenance > stress response |
| | defence response > humoral defense mechanism |
| | FUNCTION |
| | threonine endopeptidase > multicatalytic endopeptidase |
| | enzyme > peptidase |
| | defense/immunity protein > major histocompatibility complex antigen |
| | peptidase > endopeptidase |
| | LOCATION |
| | 26S proteasome > 20S core proteasome |
| | cytosol > 26S proteasome |
| | HUMAN PROTEIN DOMAINS (INTERPRO SIGNATURES) |
| | IPR000243 (PROTEASOME) |
| | IPR001353 (proteasome) |
| | IPR001353 (PROTEASOME PROTEASE) |
| | IPR000243 (PROTEASOME B) |
| hP1-08-018 | HUMAN PANTHER CLASSIFICATIONS |
| (SEQ ID NO: 213) | FAMILY (SUBFAMILY) |
| | SIALIDASE (SIALIDASE 1) |
| | MOLECULAR FUNCTIONS |
| | HYDROLASE > OTHER HYDROLASE |
| | BIOLOGICAL PROCESS |
| | BIOLOGICAL PROCESS UNCLASSIFIED |
| | HUMAN GENE ONTOLOGY |
| | PROCESS |
| | metabolism > carbohydrate metabolism |
| | FUNCTION |
| | enzyme > exo-alpha-sialidase |
| | LOCATION |
| | cytoplasm > lysosome |
| | cell > plasma membrane |
| | HUMAN PROTEIN DOMAINS (INTERPRO SIGNATURES) |
| | No Domain Hit |
| hP2-08-018 | HUMAN PANTHER CLASSIFICATIONS |
| (SEQ ID NO: 215) | FAMILY (SUBFAMILY) |
| | SIALIDASE(SIALIDASE 1) |
| | MOLECULAR FUNCTIONS |
| | HYDROLASE > OTHER HYDROLASE |
| | BIOLOGICAL PROCESS |
| | BIOLOGICAL PROCESS UNCLASSIFIED |
| | HUMAN GENE ONTOLOGY |
| | PROCESS |
| | metabolism > carbohydrate metabolism |
| | catabolism > ganglioside catabolism |
| | glycosphingolipid metabolism |
| | FUNCTION |
| | enzyme > exo-alpha-sialidase |
| | GO molecular function > enzyme |
| | LOCATION |
| | cytoplasm > lysosome |
| | cell > cytoplasm |
| | cell wall > periplasmic space |
| | cell > plasma membrane |
| | plasma membrane > integral plasma membrane protein |
| | HUMAN PROTEIN DOMAINS (INTERPRO SIGNATURES) |
| | IPR002860 (BNR) |
| hP08-019 | HUMAN PANTHER CLASSIFICATIONS |
| (SEQ ID NO: 221) | FAMILY (SUBFAMILY) |
| | CHLORIDE INTRACELLULAR CHANNEL PROTEIN(CHLORIDE |
| | INTRACELLULAR CHANNEL PROTEIN) |
| | MOLECULAR FUNCTIONS |
| | ION CHANNEL > VOLTAGE-GATED ION CHANNEL |
| | BIOLOGICAL PROCESS |
| | TRANSPORT > ION TRANSPORT > ANION TRANSPORT |
| | HUMAN GENE ONTOLOGY |
| | PROCESS |
| | inorganic anion transport > chloride transport |
| | transport > ion transport |
| | cell communication > signal transduction |
| | amino-acid activation |
| | macromolecule biosynthesis > valyl-tRNA biosynthesis |
| | FUNCTION |
| | nucleotide binding > ATP binding |
| | glucosidase > mannosyl-oligosaccharide glucosidase (processing A- |
| | glucosidase I) |
| | LOCATION |
| | cell > membrane fraction |
| | cell > nucleus |
| | nucleus > nuclear membrane |
| | cell > insoluble fraction |
| | cytoskeleton > actin cytoskeleton |
| | HUMAN PROTEIN DOMAINS (INTERPRO SIGNATURES) |
| | IPR002946 (INTCLCHANNEL) |
| hP08-021 | HUMAN PANTHER CLASSIFICATIONS |
| (SEQ ID NO: 227) | FAMILY (SUBFAMILY) |
| | TRANSCRIPTION FACTOR(TRANSCRIPTION FACTOR TFEB) |
| | MOLECULAR FUNCTIONS |
| | TRANSCRIPTION FACTOR > BASIC HELIX-LOOP-HELIX |
| | TRANSCRIPTION FACTOR |
| | BIOLOGICAL PROCESS |
| | NUCLEOSIDE, NUCLEOTIDE AND NUCLEIC ACID METABOLISM > MRNA |
| | TRANSCRIPTION > MRNA TRANSCRIPTION REGULATION |
| | HUMAN GENE ONTOLOGY |
| | PROCESS |
| | transcription, DNA-dependent > transcription from Pol II promoter |
| | transcription, DNA-dependent > transcription regulation |
| | transcription regulation > transcription regulation from Pol II promoter |
| | nucleotide metabolism > lipid metabolism |
| | protein modification > protein phosphorylation |
| | FUNCTION |
| | DNA binding > transcription factor |
| | nucleic acid binding > DNA binding |
| | transcription factor > transcription activating factor |
| | transcription factor > RNA polymerase II transcription factor |
| | RNA polymerase II transcription factor > specific RNA polymerase II |
| | transcription factor |
| | LOCATION |
| | nucleoplasm > transcription factor complex |
| | cell > nucleus |
| | nucleus > nuclear membrane |
| | nuclear membrane > nuclear membrane lumen |
| | HUMAN PROTEIN DOMAINS (INTERPRO SIGNATURES) |
| | IPR001092 (HLH) |
| | IPR001092 (HLH) |
| | IPR000694 (PRO RICH) |
| | IPR001092 (HELIX LOOP HELIX 2) |
| | NULL (GLN RICH) |
| | IPR003015 (HELIX LOOP HELIX) |
| hP1-08-022 | HUMAN PANTHER CLASSIFICATIONS |
| (SEQ ID NO: 233) | No Panther Hit |
| | HUMAN GENE ONTOLOGY |
| | FUNCTION |
| | enzyme > quinolinate synthase |
| | ligand binding or carrier > electron transfer |
| | LOCATION |
| | cell > cytoplasm |
| | HUMAN PROTEIN DOMAINS (INTERPRO SIGNATURES) |
| | No Domain Hit |
| hP2-08-022 | HUMAN PANTHER CLASSIFICATIONS |
| (SEQ ID NO: 235) | No Panther Hit |
| | HUMAN GENE ONTOLOGY |
| | FUNCTION |
| | enzyme > quinolinate synthase |
| | ligand binding or carrier > electron transfer |
| | LOCATION |
| | cell > cytoplasm |
| | HUMAN PROTEIN DOMAINS (INTERPRO SIGNATURES) |
| | No Domain Hit |
| hP08-023 | HUMAN PANTHER CLASSIFICATIONS |
| (SEQ ID NO: 244) | No Panther Hit |
| | HUMAN GENE ONTOLOGY |
| | PROCESS |
| | cytoplasm organization and biogenesis > organelle organization and |
| | biogenesis |
| | FUNCTION |
| | enzyme > N-acetylglucosaminylphosphatidylinositol deacetylase |
| | LOCATION |
| | intracellular > cell |
| | HUMAN PROTEIN DOMAINS (INTERPRO SIGNATURES) |
| | IPR000292 (FORMATE NITRITE TP 1) |
| hP08-024 | HUMAN PANTHER CLASSIFICATIONS |
| (SEQ ID NO: 250) | No Panther Hit |
| | HUMAN GENE ONTOLOGY |
| | No Gene Ontology |
| | HUMAN PROTEIN DOMAINS (INTERPRO SIGNATURES) |
| | No Domain Hit |
| hR1-08-025 | HUMAN PROTEIN SEQUENCE hP1-08-025 |
| (SEQ ID NO: 255) | (SEQ ID NO: 256) |
| | MNNFQAILTQVRMLLSSHQPSLVQALLDNLLKEDLLSREYHCTLLHEPDSEALARKISL |
| | TLLEKGDLDLALLGWARSGLQPPAAERGPGHSDHG |
| | HUMAN PANTHER CLASSIFICATIONS |
| | FAMILY (SUBFAMILY) |
| | RIBONUCLEASE INHIBITOR-RELATEDHUMAN GENE ONTOLOGY |
| | PROCESS |
| | transcription, DNA-dependent > transcription regulation |
| | FUNCTION |
| | nucleotide binding > ATP binding |
| | LOCATION |
| | nuclear membrane > nuclear membrane lumen |
| | HUMAN PROTEIN DOMAINS (INTERPRO SIGNATURES) |
| | No Domain Hit |
| hP2-08-025 | HUMAN PANTHER CLASSIFICATIONS |
| (SEQ ID NO: 258) | No Panther Hit |
| | HUMAN GENE ONTOLOGY |
| | PROCESS |
| | transcription, DNA-dependent > transcription regulation |
| | defence response > immune response |
| | developmental processes > embryogenesis and morphogenesis |
| | cell death > apoptosis |
| | cell communication > signal transduction |
| | FUNCTION |
| | nucleotide binding > ATP binding |
| | transcription factor > RNA polymerase II transcription factor |
| | nucleic acid binding > DNA binding |
| | enzyme activator > caspase activator |
| | LOCATION |
| | nuclear membrane > nuclear membrane lumen |
| | cytoplasm > cytosol |
| | cytoplasm > peroxisome |
| | HUMAN PROTEIN DOMAINS (INTERPRO SIGNATURES) |
| | IPR001687 (ATP GTP A) |
| hP3-08-025 | HUMAN PANTHER CLASSIFICATIONS |
| (SEQ ID NO: 260) | No Panther Hit |
| | HUMAN GENE ONTOLOGY |
| | PROCESS |
| | transcription, DNA-dependent > transcription regulation |
| | defence response > immune response |
| | neurogenesis > central nervous system development |
| | developmental processes > embryogenesis and morphogenesis |
| | cell death > apoptosis |
| | FUNCTION |
| | nucleotide binding > ATP binding |
| | transcription factor > RNA polymerase II transcription factor |
| | nucleic acid binding > DNA binding |
| | enzyme > nitric oxide synthase |
| | enzyme activator > caspase activator |
| | LOCATION |
| | nuclear membrane > nuclear membrane lumen |
| | GO cellular component > extracellular |
| | cytoplasm > cytosol |
| | cell > nucleus |
| | mitochondrial membrane > mitochondrial inner membrane |
| | HUMAN PROTEIN DOMAINS (INTERPRO SIGNATURES) |
| | IPR000767 (DISEASERSIST) |
| | IPR003590 (LRR RI) |
| | IPR001611 (LRR) |
| | IPR001687 (ATP GTP A) |
| hP08-026 | HUMAN PANTHER CLASSIFICATIONS |
| (SEQ ID NO: 268) | No Panther Hit |
| | HUMAN GENE ONTOLOGY |
| | No Gene Ontology |
| | HUMAN PROTEIN DOMAINS (INTERPRO SIGNATURES) |
| | NULL (SER RICH) |
| | IPR001899 (GRAM POS ANCHORING) |
| | IPR001304 (C TYPE LECTIN 1) |
| hP08-027 | HUMAN PANTHER CLASSIFICATIONS |
| (SEQ ID NO: 274) | FAMILY (SUBFAMILY) |
| | DISTAL-LESS HOMEOBOX-RELATED(HOMEOBOX PROTEIN |
| | GOOSECOID) |
| | MOLECULAR FUNCTIONS |
| | TRANSCRIPTION FACTOR > HOMEOTIC TRANSCRIPTION |
| | FACTOR |
| | BIOLOGICAL PROCESS |
| | NUCLEOSIDE, NUCLEOTIDE AND NUCLEIC ACID METABOLISM > MRNA |
| | TRANSCRIPTION > MRNA TRANSCRIPTION REGULATION |
| | DEVELOPMENTAL PROCESSES > ANTERIOR/POSTERIOR |
| | PATTERNING |
| | HUMAN GENE ONTOLOGY |
| | PROCESS |
| | transcription, DNA-dependent > transcription regulation |
| | GO biological process > developmental processes |
| | eye-antennal disc metamorphosis > eye morphogenesis |
| | embryogenesis and morphogenesis > histogenesis and organogenesis |
| | developmental processes > embryogenesis and morphogenesis |
| | FUNCTION |
| | DNA binding > transcription factor |
| | nucleic acid binding > DNA binding |
| | transcription factor > transcription activating factor |
| | transcription factor > RNA polymerase II transcription factor |
| | RNA polymerase II transcription factor > specific RNA polymerase II |
| | transcription factor |
| | LOCATION |
| | cell > nucleus |
| | nucleoplasm > transcription factor complex |
| | nuclear membrane > nuclear membrane lumen |
| | cell > cytoplasm |
| | HUMAN PROTEIN DOMAINS (INTERPRO SIGNATURES) |
| | IPR001356 (HOX) |
| | IPR001356 (homeobox) |
| | NULL (CYS RICH) |
| | IPR001356 (HOMEOBOX 2) |
| | IPR001356 (HOMEOBOX 1) |
| hP08-028 | HUMAN PANTHER CLASSIFICATIONS |
| (SEQ ID NO: 280) | FAMILY (SUBFAMILY) |
| | DNA (CYTOSINE-5-)-METHYLTRANSFERASE 3-RELATED(DNA |
| | (CYTOSINE-5-)-METHYLTRANSFERASE 3 ALPHA) |
| | MOLECULAR FUNCTIONS |
| | NUCLEIC ACID BINDING |
| | TRANSFERASE > METHYLTRANSFERASE > DNA |
| | METHYLTRANSFERASE |
| | BIOLOGICAL PROCESS |
| | NUCLEOSIDE, NUCLEOTIDE AND NUCLEIC ACID METABOLISM > DNA |
| | METABOLISM |
| | HUMAN GENE ONTOLOGY |
| | PROCESS |
| | cell cycle > DNA replication and chromosome cycle |
| | DNA alkylation > DNA methylation |
| | GO biological process > developmental processes |
| | FUNCTION |
| | methyltransferase > DNA (cytosine-5-)-methyltransferase |
| | nucleic acid binding > DNA binding |
| | LOCATION |
| | cell > nucleus |
| | nuclear membrane > nuclear membrane lumen |
| | HUMAN PROTEIN DOMAINS (INTERPRO SIGNATURES) |
| | IPR000313 (PWWP) |
| | IPR001525 (DNA methylase) |
| | IPR000313 (PWWP) |
| | NULL (CYS RICH) |
| | IPR000313 (PWWP) |
| | IPR001525 (C5 MTASE 1) |
| hP08-029 | HUMAN PANTHER CLASSIFICATIONS |
| (SEQ ID NO: 286) | FAMILY (SUBFAMILY) |
| | HMG BOX TRANSCRIPTION FACTOR-RELATED(TRANSCRIPTION |
| | FACTOR SOX-11) |
| | MOLECULAR FUNCTIONS |
| | TRANSCRIPTION FACTOR > HMG BOX TRANSCRIPTION |
| | FACTOR |
| | BIOLOGICAL PROCESS |
| | NUCLEOSIDE, NUCLEOTIDE AND NUCLEIC ACID METABOLISM > MRNA |
| | TRANSCRIPTION > MRNA TRANSCRIPTION REGULATION |
| | DEVELOPMENTAL PROCESSES > ECTODERM DEVELOPMENT > NEUROGENESIS |
| | HUMAN GENE ONTOLOGY |
| | PROCESS |
| | transcription, DNA-dependent > transcription regulation |
| | ectoderm development > neurogenesis |
| | transcription regulation > transcription regulation from Pol II promoter |
| | FUNCTION |
| | nucleic acid binding > DNA binding |
| | transcription factor > transcription activating factor |
| | DNA binding > transcription factor |
| | transcription factor > RNA polymerase II transcription factor |
| | LOCATION |
| | cell > nucleus |
| | nucleoplasm > transcription factor complex |
| | HUMAN PROTEIN DOMAINS (INTERPRO SIGNATURES) |
| | NULL (SER RICH) |
| hP08-030 | HUMAN PANTHER CLASSIFICATIONS |
| (SEQ ID NO: 292) | FAMILY (SUBFAMILY) |
| | TPR REPEAT-CONTAINING PROTEINHUMAN GENE ONTOLOGY |
| | FUNCTION |
| | adenosinetriphosphatase > peroxisome-assembly ATPase |
| | LOCATION |
| | Golgi apparatus > Golgi lumen |
| | HUMAN PROTEIN DOMAINS (INTERPRO SIGNATURES) |
| | IPR001440 (TPR) |
| | IPR001440 (TPR) |
| | IPR001440 (TPR REGION) |
| | IPR001440 (TPR REPEAT 2) |
| hP1-08-031 | HUMAN PANTHER CLASSIFICATIONS |
| (SEQ ID NO: 298) | FAMILY (SUBFAMILY) |
| | TRANSCRIPTION FACTOR ETS-RELATED(ETS TRANSLOCATION |
| | VARIANT 1, 4, 5) |
| | MOLECULAR FUNCTIONS |
| | TRANSCRIPTION FACTOR > OTHER TRANSCRIPTION FACTOR |
| | BIOLOGICAL PROCESS |
| | NUCLEOSIDE, NUCLEOTIDE AND NUCLEIC ACID METABOLISM > MRNA |
| | TRANSCRIPTION > MRNA TRANSCRIPTION REGULATION |
| | SIGNAL TRANSDUCTION > INTRACELLULAR SIGNALING |
| | CASCADE > MAPKKK CASCADE |
| | ONCOGENESIS > ONCOGENE |
| | HUMAN GENE ONTOLOGY |
| | PROCESS |
| | transcription, DNA-dependent > transcription regulation |
| | transcription, DNA-dependent > transcription from Pol II promoter |
| | cell growth and maintenance > cell proliferation |
| | transcription regulation > transcription regulation from Pol II promoter |
| | GO biological process > developmental processes |
| | FUNCTION |
| | DNA binding > transcription factor |
| | nucleic acid binding > DNA binding |
| | transcription factor > transcription activating factor |
| | transcription factor > RNA polymerase II transcription factor |
| | GO molecular function > cell cycle regulator |
| | LOCATION |
| | cell > nucleus |
| | nuclear membrane > nuclear membrane lumen |
| | GO cellular component > intracellular |
| | nucleoplasm > transcription factor complex |
| | HUMAN PROTEIN DOMAINS (INTERPRO SIGNATURES) |
| | IPR000694 (PRO RICH) |
| hP2-08-031 | HUMAN PANTHER CLASSIFICATIONS |
| (SEQ ID NO: 300) | No Panther Hit |
| | HUMAN GENE ONTOLOGY |
| | PROCESS |
| | transcription, DNA-dependent > transcription regulation |
| | transcription, DNA-dependent > transcription from Pol II promoter |
| | cell growth and maintenance > cell proliferation |
| | transcription regulation > transcription regulation from Pol II promoter |
| | GO biological process > developmental processes |
| | FUNCTION |
| | DNA binding > transcription factor |
| | nucleic acid binding > DNA binding |
| | transcription factor > transcription activating factor |
| | transcription factor > RNA polymerase II transcription factor |
| | GO molecular function > cell cycle regulator |
| | LOCATION |
| | cell > nucleus |
| | nuclear membrane > nuclear membrane lumen |
| | GO cellular component > intracellular |
| | nucleoplasm > transcription factor complex |
| | HUMAN PROTEIN DOMAINS (INTERPRO SIGNATURES) |
| | IPR000694 (PRO RICH) |
| hP3-08-031 | HUMAN PANTHER CLASSIFICATIONS |
| (SEQ ID NO: 302) | No Panther Hit |
| | HUMAN GENE ONTOLOGY |
| | PROCESS |
| | transcription, DNA-dependent > transcription regulation |
| | transcription, DNA-dependent > transcription from Pol II promoter |
| | cell growth and maintenance > cell proliferation |
| | transcription regulation > transcription regulation from Pol II promoter |
| | GO biological process > developmental processes |
| | FUNCTION |
| | DNA binding > transcription factor |
| | nucleic acid binding > DNA binding |
| | transcription factor > transcription activating factor |
| | transcription factor > RNA polymerase II transcription factor |
| | GO molecular function > cell cycle regulator |
| | LOCATION |
| | cell > nucleus |
| | nuclear membrane > nuclear membrane lumen |
| | GO cellular component > intracellular |
| | nucleoplasm > transcription factor complex |
| | HUMAN PROTEIN DOMAINS (INTERPRO SIGNATURES) |
| | IPR000694 (PRO RICH) |
| hP4-08-031 | HUMAN PANTHER CLASSIFICATIONS |
| (SEQ ID NO: 304) | No Panther Hit |
| | HUMAN GENE ONTOLOGY |
| | PROCESS |
| | transcription, DNA-dependent > transcription regulation |
| | transcription, DNA-dependent > transcription from Pol II promoter |
| | cell growth and maintenance > cell proliferation |
| | transcription regulation > transcription regulation from Pol II promoter |
| | GO biological process > developmental processes |
| | FUNCTION |
| | DNA binding > transcription factor |
| | nucleic acid binding > DNA binding |
| | transcription factor > transcription activating factor |
| | transcription factor > RNA polymerase II transcription factor |
| | GO molecular function > cell cycle regulator |
| | LOCATION |
| | cell > nucleus |
| | nuclear membrane > nuclear membrane lumen |
| | GO cellular component > intracellular |
| | nucleoplasm > transcription factor complex |
| | HUMAN PROTEIN DOMAINS (INTERPRO SIGNATURES) |
| | IPR000418 (ETSDOMAIN) |
| | IPR000418 (ETS) |
| | IPR000418 (Ets) |
| | IPR002341 (HSF ETS) |
| | IPR000694 (PRO RICH) |
| | IPR000418 (ETS DOMAIN 3) |
| | IPR000418 (ETS DOMAIN 1) |
| | IPR000418 (ETS DOMAIN 2) |
| hP08-032 | HUMAN PANTHER CLASSIFICATIONS |
| (SEQ ID NO: 310) | FAMILY (SUBFAMILY) |
| | DBL-DOMAIN CONTAINING PROTEINHUMAN GENE ONTOLOGY |
| | PROCESS |
| | fertilization > acrosome reaction |
| | cell motility > muscle contraction |
| | FUNCTION |
| | protein binding > protein phosphatase 1 binding |
| | protein binding > actin binding |
| | LOCATION |
| | nuclear membrane > nuclear membrane lumen |
| | cytoskeleton > intermediate filament |
| | cell > cytoplasm |
| | HUMAN PROTEIN DOMAINS (INTERPRO SIGNATURES) |
| | IPR002017 (SPEC) |
| | IPR002017 (spectrin) |
| | NULL (SER RICH) |
| | IPR002017 (SPEC REPEAT 2) |
| | IPR002173 (PFKB KINASES 2) |
| | IPR001687 (ATP GTP A) |
| hP08-033 | HUMAN PANTHER CLASSIFICATIONS |
| (SEQ ID NO: 316) | FAMILY (SUBFAMILY) |
| | LEUCINE RICH REPEAT PROTEINHUMAN GENE ONTOLOGY |
| | PROCESS |
| | M phase > mitosis |
| | antimicrobial response > antibacterial response |
| | protein modification > protein phosphorylation |
| | catabolism > peptidoglycan catabolism |
| | microtubule-based process |
| | nuclear congression |
| | peptidoglycan catabolism > microtubule-based movement |
| | FUNCTION |
| | GO molecular function > cell adhesion |
| | enzyme > protein phosphatase |
| | glycosaminoglycan binding > hyaluronic acid binding |
| | enzyme > N-acetylmuramoyl-L-alanine amidase |
| | protein phosphatase type 1 > protein phosphatase type 1 regulator |
| | LOCATION |
| | cell > cytoplasm |
| | cell > membrane fraction |
| | cell > plasma membrane |
| | cell > nucleus |
| | extracellular > extracellular matrix |
| | HUMAN PROTEIN DOMAINS (INTERPRO SIGNATURES) |
| | IPR003885 (LRR SD22) |
| | IPR003591 (LRR TYP) |
| | IPR001611 (LRR) |
| hP1-08-035 | HUMAN PANTHER CLASSIFICATIONS |
| (SEQ ID NO: 322) | FAMILY (SUBFAMILY) |
| | FOS FAMILY MEMBER (FOS-RELATED ANTIGEN 1) |
| | MOLECULAR FUNCTIONS |
| | TRANSCRIPTION FACTOR > OTHER TRANSCRIPTION FACTOR |
| | BIOLOGICAL PROCESS |
| | BIOLOGICAL PROCESS UNCLASSIFIED |
| | HUMAN GENE ONTOLOGY |
| | PROCESS |
| | transcription, DNA-dependent > transcription regulation |
| | transcription regulation > transcription regulation from Pol II promoter |
| | defence response > inflammatory response |
| | transcription, DNA-dependent > transcription from Pol II promoter |
| | defence response > cellular defense response |
| | FUNCTION |
| | DNA binding > transcription factor |
| | nucleic acid binding > DNA binding |
| | RNA polymerase II transcription factor > specific RNA polymerase II |
| | transcription factor |
| | GO molecular function > cell cycle regulator |
| | enzyme > glutathione transferase |
| | LOCATION |
| | cell > nucleus |
| | nucleoplasm > transcription factor complex |
| | GO cellular component > intracellular |
| | cell > membrane fraction |
| | cytoplasm > endoplasmic reticulum |
| | HUMAN PROTEIN DOMAINS (INTERPRO SIGNATURES) |
| | IPR000837 (LEUZIPPRFOS) |
| | IPR001871 (BRLZ) |
| | IPR001871 (bZIP) |
| | IPR001472 (NLS BP 2) |
| | IPR001871 (B ZIP) |
| | IPR001871 (BZIP BASIC) |
| hP2-08-035 | HUMAN PANTHER CLASSIFICATIONS |
| (SEQ ID NO: 324) | FAMILY (SUBFAMILY) |
| | FOS FAMILY MEMBER(FOS-RELATED ANTIGEN 1) |
| | MOLECULAR FUNCTIONS |
| | TRANSCRIPTION FACTOR > OTHER TRANSCRIPTION FACTOR |
| | BIOLOGICAL PROCESS |
| | BIOLOGICAL PROCESS UNCLASSIFIED |
| | HUMAN GENE ONTOLOGY |
| | PROCESS |
| | transcription, DNA-dependent > transcription regulation |
| | transcription regulation > transcription regulation from Pol II promoter |
| | defence response > inflammatory response |
| | transcription, DNA-dependent > transcription from Pol II promoter |
| | defence response > cellular defense response |
| | FUNCTION |
| | DNA binding > transcription factor |
| | nucleic acid binding > DNA binding |
| | RNA polymerase II transcription factor > specific RNA polymerase II |
| | transcription factor |
| | GO molecular function > cell cycle regulator |
| | enzyme > glutathione transferase |
| | LOCATION |
| | cell > nucleus |
| | nucleoplasm > transcription factor complex |
| | GO cellular component > intracellular |
| | cell > membrane fraction |
| | cytoplasm > endoplasmic reticulum |
| | HUMAN PROTEIN DOMAINS (INTERPRO SIGNATURES) |
| | IPR000837 (LEUZIPPRFOS) |
| | IPR001871 (BRLZ) |
| | IPR001871 (bZIP) |
| | IPR001472 (NLS BP 2) |
| | IPR001871 (B ZIP) |
| | IPR001871 (BZIP BASIC) |
| hP08-036 | HUMAN PANTHER CLASSIFICATIONS |
| (SEQ ID NO: 330) | No Panther Hit |
| | HUMAN GENE ONTOLOGY |
| | LOCATION |
| | nuclear membrane > nuclear membrane lumen |
| | HUMAN PROTEIN DOMAINS (INTERPRO SIGNATURES) |
| | IPR000822 (zf-C2H2) |
| | IPR000822 (ZINC FINGER C2H2 2) |
| | IPR000822 (ZINC FINGER C2H2 1) |
| hP1-08-037 | HUMAN PANTHER CLASSIFICATIONS |
| (SEQ ID NO: 336) | FAMILY (SUBFAMILY) |
| | PROTEIN PHOSPHATASE 2C FAMILY MEMBER (PROTEIN |
| | PHOSPHATASE 2C) |
| | MOLECULAR FUNCTIONS |
| | PHOSPHATASE > PROTEIN PHOSPHATASE |
| | BIOLOGICAL PROCESS |
| | PROTEIN METABOLISM AND MODIFICATION > PROTEIN |
| | MODIFICATION > PROTEIN PHOSPHORYLATION |
| | SIGNAL TRANSDUCTION > INTRACELLULAR SIGNALING |
| | CASCADE > MAPKKK CASCADE > OTHER INTRACELLULAR SIGNALING |
| | CASCADE |
| | HUMAN GENE ONTOLOGY |
| | PROCESS |
| | protein modification > protein dephosphorylation |
| | cell cycle control |
| | peptidoglycan catabolism > cell cycle arrest |
| | pheromone response |
| | heat response > heat shock response |
| | cell growth and maintenance > cell cycle |
| | cyclic nucleotide biosynthesis |
| | nucleotide biosynthesis > cAMP biosynthesis |
| | FUNCTION |
| | protein serine/threonine phosphatase > protein phosphatase type 2C |
| | ligand binding or carrier > calcium binding |
| | enzyme > adenylate cyclase |
| | enzyme > guanylate cyclase |
| | enzyme > protein phosphatase |
| | LOCATION |
| | cytoplasm > lysosome |
| | cell > cytoplasm |
| | mitochondrion > mitochondrial matrix |
| | cell > nucleus |
| | nuclear membrane > nuclear membrane lumen |
| | HUMAN PROTEIN DOMAINS (INTERPRO SIGNATURES) |
| | IPR003589 (PP2Cc) |
| | IPR001932 (PP2C) |
| | IPR001932 (PP2C 1) |
| | IPR001932 (PP2C 2) |
| | IPR000222 (PP2C) |
| hP2-08-037 | HUMAN PANTHER CLASSIFICATIONS |
| (SEQ ID NO: 338) | FAMILY (SUBFAMILY) |
| | PROTEIN PHOSPHATASE 2C FAMILY MEMBER(PROTEIN |
| | PHOSPHATASE 2C) |
| | MOLECULAR FUNCTIONS |
| | PHOSPHATASE > PROTEIN PHOSPHATASE |
| | BIOLOGICAL PROCESS |
| | PROTEIN METABOLISM AND MODIFICATION > PROTEIN |
| | MODIFICATION > PROTEIN PHOSPHORYLATION |
| | SIGNAL TRANSDUCTION > INTRACELLULAR SIGNALING |
| | CASCADE > MAPKKK CASCADE > OTHER INTRACELLULAR SIGNALING |
| | CASCADE |
| | HUMAN GENE ONTOLOGY |
| | PROCESS |
| | protein modification > protein dephosphorylation |
| | cell cycle control |
| | peptidoglycan catabolism > cell cycle arrest |
| | pheromone response |
| | heat response > heat shock response |
| | cell growth and maintenance > cell cycle |
| | cyclic nucleotide biosynthesis |
| | nucleotide biosynthesis > cAMP biosynthesis |
| | FUNCTION |
| | protein serine/threonine phosphatase > protein phosphatase type 2C |
| | ligand binding or carrier > calcium binding |
| | enzyme > adenylate cyclase |
| | enzyme > guanylate cyclase |
| | enzyme > protein phosphatase |
| | LOCATION |
| | cytoplasm > lysosome |
| | cell > cytoplasm |
| | mitochondrion > mitochondrial matrix |
| | cell > nucleus |
| | nuclear membrane > nuclear membrane lumen |
| | HUMAN PROTEIN DOMAINS (INTERPRO SIGNATURES) |
| | IPR003589 (PP2Cc) |
| | IPR001932 (PP2C) |
| | IPR001932 (PP2C 1) |
| | IPR001932 (PP2C 2) |
| | IPR000222 (PP2C) |
| hP1-08-038 | HUMAN PANTHER CLASSIFICATIONS |
| (SEQ ID NO: 344) | FAMILY (SUBFAMILY) |
| | SERINE/THREONINE PROTEIN KINASE(PROTEIN KINASE C) |
| | MOLECULAR FUNCTIONS |
| | KINASE > PROTEIN KINASE |
| | BIOLOGICAL PROCESS |
| | PROTEIN METABOLISM AND MODIFICATION > PROTEIN |
| | MODIFICATION > PROTEIN PHOSPHORYLATION |
| | SIGNAL TRANSDUCTION > INTRACELLULAR SIGNALING |
| | CASCADE |
| | SIGNAL TRANSDUCTION > CELL SURFACE RECEPTOR |
| | MEDIATED SIGNAL TRANSDUCTION |
| | enzyme > dihydrolipoamide S-succinyltransferase |
| | enzyme > dihydrolipoamide S-acetyltransferase |
| | enzyme > alpha-ketoacid dehydrogenase |
| | ligand binding or carrier > electron transfer |
| | LOCATION |
| | mitochondrion > mitochondrial matrix |
| | cytoplasm > mitochondrion |
| | HUMAN PROTEIN DOMAINS (INTERPRO SIGNATURES) |
| | IPR000089 (biotin lipoyl) |
| | IPR001078 (2-oxoacid dh) |
| | NULL (ALA RICH) |
| | IPR000694 (PRO RICH) |
| | IPR003016 (LIPOYL) |
| | IPR001078 (sp P36957 ODO2 HUMAN) |
| hP08-040 | HUMAN PANTHER CLASSIFICATIONS |
| (SEQ ID NO: 358) | No Panther Hit |
| | HUMAN GENE ONTOLOGY |
| | No Gene Ontology |
| | HUMAN PROTEIN DOMAINS (INTERPRO SIGNATURES) |
| | IPR001841 (zf-C3HC4) |
| | NULL (ALA RICH) |
| | IPR000694 (PRO RICH 2) |
| | NULL (GLN RICH) |
| | IPR000345 (CYTOCHROME C) |
| hP08-041 | HUMAN PANTHER CLASSIFICATIONS |
| (SEQ ID NO: 364) | FAMILY (SUBFAMILY) |
| | ADENYLOSUCCINATE SYNTHETASE(ADENYLOSUCCINATE |
| | SYNTHETASE) |
| | MOLECULAR FUNCTIONS |
| | SYNTHASE AND SYNTHETASE > SYNTHETASE |
| | LIGASE > ALL NON-DNA LIGASES |
| | BIOLOGICAL PROCESS |
| | NUCLEOSIDE, NUCLEOTIDE AND NUCLEIC ACID METABOLISM > PURINE |
| | METABOLISM |
| | HUMAN GENE ONTOLOGY |
| | PROCESS |
| | purine nucleotide metabolism > purine nucleotide biosynthesis |
| | purine nucleoside monophosphate biosynthesis > AMP biosynthesis |
| | purine ribonucleoside monophosphate biosynthesis |
| | FUNCTION |
| | enzyme > adenylosuccinate synthase |
| | nucleotide binding > GTP binding |
| | LOCATION |
| | mitochondrion > mitochondrial matrix |
| | HUMAN PROTEIN DOMAINS (INTERPRO SIGNATURES) |
| | IPR001114 (Adenylsucc synt) |
| | IPR001114 (ADENYLOSUCCIN SYN 2) |
| | IPR001114 (sp P28650 PUAI MOUSE) |
| hP08-042 | HUMAN PANTHER CLASSIFICATIONS |
| (SEQ ID NO: 370) | No Panther Hit |
| | HUMAN GENE ONTOLOGY |
| | PROCESS |
| | striated muscle contraction > striated muscle contraction regulation |
| | neurogenesis > central nervous system development |
| | transcription, DNA-dependent > transcription regulation |
| | protein modification > protein phosphorylation |
| | GO biological process > cell communication |
| | FUNCTION |
| | enzyme > protein kinase |
| | enzyme > nitric oxide synthase |
| | GO molecular function > cell cycle regulator |
| | nucleotide binding > ATP binding |
| | ligand binding or carrier > electron transfer |
| | LOCATION |
| | cell > cytoplasm |
| | GO cellular component > extracellular |
| | mitochondrial membrane > mitochondrial inner membrane |
| | microtubule organizing center > centrosome |
| | extracellular > extracellular space |
| | HUMAN PROTEIN DOMAINS (INTERPRO SIGNATURE) |
| | No Domain Hit |
| hP08-043 | HUMAN PANTHER CLASSIFICATIONS |
| (SEQ ID NO: 376) | No Panther Hit |
| | HUMAN GENE ONTOLOGY |
| | LOCATION |
| | cortex > exocyst |
| | HUMAN PROTEIN DOMAINS (INTERPRO SIGNATURES) |
| | IPR002909 (TIG) |
| | IPR001899 (GRAM POS ANCHORING) |
| | IPR001687 (ATP GTP A) |
| hP1-08-044 | HUMAN PANTHER CLASSIFICATIONS |
| (SEQ ID NO: 382) | FAMILY (SUBFAMILY) |
| | DNA POLYMERASE III GAMMA CHAIN-RELATEDHUMAN GENE |
| | ONTOLOGY |
| | PROCESS |
| | DNA metabolism > DNA repair |
| | mitotic S phase |
| | DNA replication and chromosome cycle |
| | peptidoglycan catabolism > DNA replication |
| | DNA metabolism > DNA repair |
| | DNA metabolism > DNA repair |
| | DNA strand elongation > leading strand elongation |
| | DNA repair > mismatch repair |
| | FUNCTION |
| | DNA binding > DNA replication factor |
| | nucleotide binding > ATP binding |
| | nucleic acid binding > DNA binding |
| | DNA binding > DNA replication factor |
| | helicase |
| | DNA replication factor > DNA clamp loader |
| | LOCATION |
| | replication fork > DNA replication factor C complex |
| | mitochondrion > mitochondrial matrix |
| | cell > nucleus |
| | HUMAN PROTEIN DOMAINS (INTERPRO SIGNATURES) |
| | IPR003593 (AAA) |
| | IPR001939 (AAA) |
| | IPR000862 (RFC) |
| | IPR001687 (ATP GTP A) |
| hP2-08-044 | HUMAN PANTHER CLASSIFICATIONS |
| (SEQ ID NO: 384) | No Panther Hit |
| | HUMAN GENE ONTOLOGY |
| | FUNCTION |
| | DNA binding > DNA replication factor |
| | nucleic acid binding > DNA binding |
| | nucleotide binding > ATP binding |
| | LOCATION |
| | replication fork > DNA replication factor C complex |
| | HUMAN PROTEIN DOMAINS (INTERPRO SIGNATURES) |
| | No Domain Hit |
| hP3-08-044 | HUMAN PANTHER CLASSIFICATIONS |
| (SEQ ID NO: 386) | No Panther Hit |
| | HUMAN GENE ONTOLOGY |
| | FUNCTION |
| | DNA binding > DNA replication factor |
| | nucleic acid binding > DNA binding |
| | nucleotide binding > ATP binding |
| | LOCATION |
| | replication fork > DNA replication factor C complex |
| | HUMAN PROTEIN DOMAINS (INTERPRO SIGNATURES) |
| | NULL (ARG RICH) |
| hP1-08-045 | HUMAN PANTHER CLASSIFICATIONS |
| (SEQ ID NO: 392) | FAMILY (SUBFAMILY) |
| | KRUEPPEL FAMILY C2H2-TYPE ZINC FINGER PROTEIN HUMAN |
| | GENE ONTOLOGY |
| | PROCESS |
| | transcription, DNA-dependent > transcription regulation |
| | small GTPase mediated signal transduction > RAS protein signal |
| | transduction |
| | transcription regulation from Pol II promoter > repression of transcription |
| | from Pol II promoter |
| | GO biological process > developmental processes |
| | transcription, DNA-dependent > transcription from Pol II promoter |
| | FUNCTION |
| | DNA binding > transcription factor |
| | nucleic acid binding > DNA binding |
| | transcription factor > transcription activating factor |
| | GO molecular function > nucleic acid binding |
| | RNA polymerase II transcription factor > specific RNA polymerase II |
| | transcription factor |
| | LOCATION |
| | cell > nucleus |
| | nuclear membrane > nuclear membrane lumen |
| | nucleoplasm > transcription factor complex |
| | nucleus > nuclear chromosome |
| | chromosome |
| | nucleus > nuclear chromosome |
| | HUMAN PROTEIN DOMAINS (INTERPRO SIGNATURES) |
| | IPR000822 (ZnF C2H2) |
| | IPR000822 (zf-C2H2) |
| | IPR000694 (PRO RICH 2) |
| | IPR000822 (ZINC FINGER C2H2 2 14) |
| | IPR000822 (ZINC FINGER C2H2 1) |
| | IPR001687 (ATP GTP A) |
| hP2-08-045 | HUMAN PANTHER CLASSIFICATIONS |
| (SEQ ID NO: 394) | FAMILY (SUBFAMILY) |
| | KRUEPPEL FAMILY C2H2-TYPE ZINC FINGER PROTEINHUMAN |
| | GENE ONTOLOGY |
| | PROCESS |
| | transcription, DNA-dependent > transcription regulation |
| | small GTPase mediated signal transduction > RAS protein signal |
| | transduction |
| | GO biological process > developmental processes |
| | transcription regulation from Pol II promoter > repression of transcription |
| | from Pol II promoter |
| | transcription, DNA-dependent > transcription from Pol II promoter |
| | FUNCTION |
| | DNA binding > transcription factor |
| | nucleic acid binding > DNA binding |
| | transcription factor > transcription activating factor |
| | transcription factor > RNA polymerase II transcription factor |
| | GO molecular function > nucleic acid binding |
| | LOCATION |
| | cell > nucleus |
| | nucleoplasm > transcription factor complex |
| | nuclear membrane > nuclear membrane lumen |
| | nucleus > nuclear chromosome |
| | chromosome |
| | nucleus > nuclear chromosome |
| | HUMAN PROTEIN DOMAINS (INTERPRO SIGNATURES) |
| | IPR002965 (PRICHEXTENSN) |
| | IPR000822 (ZnF C2H2) |
| | IPR000822 (zf-C2H2) |
| | IPR000694 (PRO RICH) |
| | IPR000822 (ZINC FINGER C2H2 2 4) |
| | IPR000822 (ZINC FINGER C2H2 1) |
| | IPR001687 (ATP GTP A) |
| hP1-08-046 | HUMAN PANTHER CLASSIFICATIONS |
| (SEQ ID NO: 400) | FAMILY (SUBFAMILY) |
| | HEF-RELATED (ENHANCER OF FILMENTATION 1) |
| | MOLECULAR FUNCTIONS |
| | CYTOSKELETAL PROTEIN > OTHER CYTOSKELETAL PROTEINS |
| | BIOLOGICAL PROCESS |
| | CELL CYCLE > CELL CYCLE CONTROL |
| | CELL STRUCTURE AND MOTILITY |
| | HUMAN GENE ONTOLOGY |
| | No Gene Ontology |
| | HUMAN PROTEIN DOMAINS (INTERPRO SIGNATURES) |
| | No Domain Hit |
| hP2-08-046 | HUMAN PANTHER CLASSIFICATIONS |
| (SEQ ID NO: 402) | FAMILY (SUBFAMILY) |
| | HEF-RELATED(ENHANCER OF FILMENTATION 1) |
| | MOLECULAR FUNCTIONS |
| | CYTOSKELETAL PROTEIN > OTHER CYTOSKELETAL PROTEINS |
| | BIOLOGICAL PROCESS |
| | CELL CYCLE > CELL CYCLE CONTROL |
| | CELL STRUCTURE AND MOTILITY |
| | HUMAN GENE ONTOLOGY |
| | PROCESS |
| | M phase > mitosis |
| | cell cycle > cell cycle control |
| | cell communication > cell adhesion |
| | cell communication > signal transduction |
| | FUNCTION |
| | signaling (initiator) caspase > caspase-2 |
| | LOCATION |
| | cell > nucleus |
| | cytoplasm > cytoskeleton |
| | cell > cytoplasm |
| | cytoplasm > spindle |
| | HUMAN PROTEIN DOMAINS (INTERPRO SIGNATURES) |
| | No Domain Hit |
| hP3-08-046 | HUMAN PANTHER CLASSIFICATIONS |
| (SEQ ID NO: 404) | No Panther Hit |
| | HUMAN GENE ONTOLOGY |
| | PROCESS |
| | cell communication > cell adhesion |
| | M phase > mitosis |
| | cell communication > signal transduction |
| | cell cycle > cell cycle control |
| | cell growth and maintenance > cell proliferation |
| | FUNCTION |
| | signaling (initiator) caspase > caspase-2 |
| | ligand binding or carrier > calcium binding |
| | GO molecular function > motor |
| | enzyme > protein kinase |
| | nucleotide binding > ATP binding |
| | LOCATION |
| | cell > cytoplasm |
| | cell > nucleus |
| | cytoplasm > cytoskeleton |
| | cytoplasm > spindle |
| | cell > membrane fraction |
| | HUMAN PROTEIN DOMAINS (INTERPRO SIGNATURES) |
| | IPR001452 (SH3DOMAIN) |
| | IPR001452 (SH3) |
| | IPR001452 (SH3) |
| | IPR001452 (SH3) |
| | NULL (SER RICH) |
| hP4-08-046 | HUMAN PANTHER CLASSIFICATIONS |
| (SEQ ID NO: 406) | No Panther Hit |
| | HUMAN GENE ONTOLOGY |
| | PROCESS |
| | cell communication > cell adhesion |
| | M phase > mitosis |
| | cell communication > signal transduction |
| | cell cycle > cell cycle control |
| | cell growth and maintenance > cell proliferation |
| | FUNCTION |
| | signaling (initiator) caspase > caspase-2 |
| | ligand binding or carrier > calcium binding |
| | GO molecular function > motor |
| | nucleotide binding > ATP binding |
| | DNA binding > transcription factor |
| | LOCATION |
| | cell > cytoplasm |
| | cell > nucleus |
| | cytoplasm > cytoskeleton |
| | cytoplasm > spindle |
| | cell > membrane fraction |
| | HUMAN PROTEIN DOMAINS (INTERPRO SIGNATURES) |
| | IPR001452 (SH3DOMAIN) |
| | IPR001452 (SH3) |
| | IPR001452 (SH3) |
| | IPR001452 (SH3) |
| | NULL (SER RICH) |
| hP08-047 | HUMAN PANTHER CLASSIFICATIONS |
| (SEQ ID NO: 412) | FAMILY (SUBFAMILY) |
| | RETINOBLASTOMA BINDING PROTEIN-RELATEDHUMAN GENE |
| | ONTOLOGY |
| | PROCESS |
| | neurogenesis > central nervous system development |
| | transcription, DNA-dependent > transcription regulation |
| | transcription, DNA-dependent > transcription from Pol II promoter |
| | metal ion homeostasis > zinc homeostasis |
| | FUNCTION |
| | nucleic acid binding > DNA binding |
| | DNA binding > transcription factor |
| | ligand binding or carrier > protein binding |
| | LOCATION |
| | nuclear membrane > nuclear membrane lumen |
| | cell > nucleus |
| | cell > cytoplasm |
| | HUMAN PROTEIN DOMAINS (INTERPRO SIGNATURES) |
| | IPR003349 (JmjN) |
| | IPR001606 (BRIGHT) |
| | IPR003347 (jmjC) |
| | IPR003349 (jmjN) |
| | IPR001606 (ARID) |
| | IPR001472 (NLS BP) |
| hP08-048 | HUMAN PANTHER CLASSIFICATIONS |
| (SEQ ID NO: 418) | No Panther Hit |
| | HUMAN GENE ONTOLOGY |
| | PROCESS |
| | glucose transport > alpha-glucoside transport |
| | M phase > mitosis |
| | DNA dependent DNA replication > DNA topological change |
| | chromosome condensation > sister chromatid cohesion |
| | mitotic prophase |
| | peptidoglycan catabolism > mitotic chromosome condensation |
| | chromosome condensation > sister chromatid cohesion |
| | FUNCTION |
| | GO molecular function > nucleic acid binding |
| | glucosidase > mannosyl-oligosaccharide glucosidase (processing A- |
| | glucosidase I) |
| | LOCATION |
| | Golgi apparatus > Golgi lumen |
| | cell > nucleus |
| | HUMAN PROTEIN DOMAINS (INTERPRO SIGNATURES) |
| | IPR001878 (ZnF C2HC) |
| | IPR001878 (zf-CCHC) |
| | IPR001201 (PAP) |
| | IPR002058 (PAP ASSOCIATED 2) |
| | IPR001878 (ZF CCHC 2) |
| | NULL (GLU RICH) |
| hP1-08-049 | HUMAN PANTHER CLASSIFICATIONS |
| (SEQ ID NO: 424) | FAMILY (SUBFAMILY) |
| | CYSTEINE PROTEASE-RELATED (CATHEPSIN L-RELATED) |
| | MOLECULAR FUNCTIONS |
| | PROTEASE > CYSTEINE-TYPE PROTEASE |
| | BIOLOGICAL PROCESS |
| | PROTEIN METABOLISM AND MODIFICATION > PROTEOLYSIS |
| | HUMAN GENE ONTOLOGY |
| | PROCESS |
| | protein metabolism and modification |
| | macromolecule catabolism > proteolysis and peptidolysis |
| | defence response > immune response |
| | FUNCTION |
| | endopeptidase |
| | cysteine-type peptidase > cysteine-type endopeptidase |
| | peptidase > cysteine-type peptidase |
| | lysosomal cysteine-type endopeptidase > cathepsin L |
| | lysosomal cysteine-type endopeptidase > cathepsin L |
| | cysteine-type endopeptidase > actinidain |
| | LOCATION |
| | cytoplasm > lysosome |
| | endoplasmic reticulum > endoplasmic reticulum lumen |
| | HUMAN PROTEIN DOMAINS (INTERPRO SIGNATURES) |
| | IPR000668 (PAPAIN) |
| | IPR000668 (Peptidase C1) |
| | IPR000169 (THIOL PROTEASE ASN) |
| | IPR000169 (THIOL PROTEASE HIS) |
| | IPR000169 (THIOL PROTEASE CYS) |
| hP2-08-049 | HUMAN PANTHER CLASSIFICATIONS |
| (SEQ ID NO: 426) | FAMILY (SUBFAMILY) |
| | CYSTEINE PROTEASE-RELATED (CATHEPSIN L-RELATED) |
| | MOLECULAR FUNCTIONS |
| | PROTEASE > CYSTEINE-TYPE PROTEASE |
| | BIOLOGICAL PROCESS |
| | PROTEIN METABOLISM AND MODIFICATION > PROTEOLYSIS |
| | HUMAN GENE ONTOLOGY |
| | PROCESS |
| | protein metabolism and modification |
| | macromolecule catabolism > proteolysis and peptidolysis |
| | defence response > immune response |
| | stress response > defence response |
| | FUNCTION |
| | endopeptidase |
| | cysteine-type peptidase > cysteine-type endopeptidase |
| | peptidase > cysteine-type peptidase |
| | lysosomal cysteine-type endopeptidase > cathepsin L |
| | lysosomal cysteine-type endopeptidase > cathepsin L |
| | cysteine-type endopeptidase > actinidain |
| | LOCATION |
| | cytoplasm > lysosome |
| | endoplasmic reticulum > endoplasmic reticulum lumen |
| | HUMAN PROTEIN DOMAINS (INTERPRO SIGNATURES) |
| | IPR000668 (PAPAIN) |
| | IPR000668 (Peptidase C1) |
| | IPR000169 (THIOL PROTEASE ASN) |
| | IPR000169 (THIOL PROTEASE HIS) |
| | IPR000169 (THIOL PROTEASE CYS) |
| hP3-08-049 | HUMAN PANTHER CLASSIFICATIONS |
| (SEQ ID NO: 428) | FAMILY (SUBFAMILY) |
| | CYSTEINE PROTEASE-RELATED (CATHEPSIN L-RELATED) |
| | MOLECULAR FUNCTIONS |
| | PROTEASE > CYSTEINE-TYPE PROTEASE |
| | BIOLOGICAL PROCESS |
| | PROTEIN METABOLISM AND MODIFICATION > PROTEOLYSIS |
| | HUMAN GENE ONTOLOGY |
| | PROCESS |
| | protein metabolism and modification |
| | macromolecule catabolism > proteolysis and peptidolysis |
| | defence response > immune response |
| | FUNCTION |
| | endopeptidase |
| | cysteine-type peptidase > cysteine-type endopeptidase |
| | peptidase > cysteine-type peptidase |
| | lysosomal cysteine-type endopeptidase > cathepsin L |
| | lysosomal cysteine-type endopeptidase > cathepsin L |
| | peptidase > cysteine-type peptidase |
| | LOCATION |
| | cytoplasm > lysosome |
| | endoplasmic reticulum > endoplasmic reticulum lumen |
| | HUMAN PROTEIN DOMAINS (INTERPRO SIGNATURES) |
| | IPR000668 (PAPAIN) |
| | IPR000668 (Peptidase C1) |
| | IPR000169 (THIOL PROTEASE ASN) |
| | IPR000169 (THIOL PROTEASE HIS) |
| hP4-08-049 | HUMAN PANTHER CLASSIFICATIONS |
| (SEQ ID NO: 430) | FAMILY (SUBFAMILY) |
| | CYSTEINE PROTEASE-RELATED (CATHEPSIN L-RELATED) |
| | MOLECULAR FUNCTIONS |
| | PROTEASE > CYSTEINE-TYPE PROTEASE |
| | BIOLOGICAL PROCESS |
| | PROTEIN METABOLISM AND MODIFICATION > PROTEOLYSIS |
| | HUMAN GENE ONTOLOGY |
| | PROCESS |
| | protein metabolism and modification |
| | macromolecule catabolism > proteolysis and peptidolysis |
| | defence response > immune response |
| | FUNCTION |
| | endopeptidase |
| | cysteine-type peptidase > cysteine-type endopeptidase |
| | peptidase > cysteine-type peptidase |
| | lysosomal cysteine-type endopeptidase > cathepsin L |
| | lysosomal cysteine-type endopeptidase > cathepsin L |
| | lysosomal cysteine-type endopeptidase > cathepsin L |
| | LOCATION |
| | cytoplasm > lysosome |
| | endoplasmic reticulum > endoplasmic reticulum lumen |
| | HUMAN PROTEIN DOMAINS (INTERPRO SIGNATURES) |
| | IPR000668 (PAPAIN) |
| | IPR000668 (Peptidase C1) |
| | IPR000169 (THIOL PROTEASE ASN) |
| | IPR000169 (THIOL PROTEASE HIS) |
| hP5-08-049 | HUMAN PANTHER CLASSIFICATIONS |
| (SEQ ID NO: 432) | FAMILY (SUBFAMILY) |
| | CYSTEINE PROTEASE-RELATED (CATHEPSIN L-RELATED) |
| | MOLECULAR FUNCTIONS |
| | PROTEASE > CYSTEINE-TYPE PROTEASE |
| | BIOLOGICAL PROCESS |
| | PROTEIN METABOLISM AND MODIFICATION > PROTEOLYSIS |
| | HUMAN GENE ONTOLOGY |
| | PROCESS |
| | protein metabolism and modification |
| | macromolecule catabolism > proteolysis and peptidolysis |
| | defence response > immune response |
| | stress response > defence response |
| | FUNCTION |
| | endopeptidase |
| | cysteine-type peptidase > cysteine-type endopeptidase |
| | peptidase > cysteine-type peptidase |
| | lysosomal cysteine-type endopeptidase > cathepsin L |
| | lysosomal cysteine-type endopeptidase > cathepsin L |
| | cysteine-type endopeptidase > actinidain |
| | LOCATION |
| | cytoplasm > lysosome |
| | endoplasmic reticulum > endoplasmic reticulum lumen |
| | HUMAN PROTEIN DOMAINS (INTERPRO SIGNATURES) |
| | IPR000668 (PAPAIN) |
| | IPR000668 (Peptidase C1) |
| | IPR000169 (THIOL PROTEASE ASN) |
| | IPR000169 (THIOL PROTEASE HIS) |
| | IPR000169 (THIOL PROTEASE CYS) |
| hP6-08-049 | HUMAN PANTHER CLASSIFICATIONS |
| (SEQ ID NO: 434) | FAMILY (SUBFAMILY) |
| | CYSTEINE PROTEASE-RELATED (CATHEPSIN L-RELATED) |
| | MOLECULAR FUNCTIONS |
| | PROTEASE > CYSTEINE-TYPE PROTEASE |
| | BIOLOGICAL PROCESS |
| | PROTEIN METABOLISM AND MODIFICATION > PROTEOLYSIS |
| | HUMAN GENE ONTOLOGY |
| | PROCESS |
| | protein metabolism and modification |
| | macromolecule catabolism > proteolysis and peptidolysis |
| | defence response > immune response |
| | stress response > defence response |
| | FUNCTION |
| | endopeptidase |
| | cysteine-type peptidase > cysteine-type endopeptidase |
| | peptidase > cysteine-type peptidase |
| | lysosomal cysteine-type endopeptidase > cathepsin L |
| | lysosomal cysteine-type endopeptidase > cathepsin L |
| | cysteine-type endopeptidase > actinidain |
| | LOCATION |
| | cytoplasm > lysosome |
| | endoplasmic reticulum > endoplasmic reticulum lumen |
| | HUMAN PROTEIN DOMAINS (INTERPRO SIGNATURES) |
| | IPR000668 (PAPAIN) |
| | IPR000668 (Peptidase C1) |
| | IPR000169 (THIOL PROTEASE ASN) |
| | IPR000169 (THIOL PROTEASE HIS) |
| | IPR000169 (THIOL PROTEASE CYS) |
| hP7-08-049 | HUMAN PANTHER CLASSIFICATIONS |
| (SEQ ID NO: 436) | FAMILY (SUBFAMILY) |
| | CYSTEINE PROTEASE-RELATED (CATHEPSIN L-RELATED) |
| | MOLECULAR FUNCTIONS |
| | PROTEASE > CYSTEINE-TYPE PROTEASE |
| | BIOLOGICAL PROCESS |
| | PROTEIN METABOLISM AND MODIFICATION > PROTEOLYSIS |
| | HUMAN GENE ONTOLOGY |
| | PROCESS |
| | protein metabolism and modification |
| | macromolecule catabolism > proteolysis and peptidolysis |
| | defence response > immune response |
| | stress response > defence response |
| | FUNCTION |
| | endopeptidase |
| | cysteine-type peptidase > cysteine-type endopeptidase |
| | peptidase > cysteine-type peptidase |
| | lysosomal cysteine-type endopeptidase > cathepsin L |
| | lysosomal cysteine-type endopeptidase > cathepsin L |
| | cysteine-type endopeptidase > actinidain |
| | LOCATION |
| | cytoplasm > lysosome |
| | endoplasmic reticulum > endoplasmic reticulum lumen |
| | HUMAN PROTEIN DOMAINS (INTERPRO SIGNATURES) |
| | IPR000668 (PAPAIN) |
| | IPR000668 (Peptidase C1) |
| | IPR000169 (THIOL PROTEASE ASN) |
| | IPR000169 (THIOL PROTEASE HIS) |
| | IPR000169 (THIOL PROTEASE CYS) |
| hP8-08-049 | HUMAN PANTHER CLASSIFICATIONS |
| (SEQ ID NO: 438) | FAMILY (SUBFAMILY) |
| | CYSTEINE PROTEASE-RELATED (CATHEPSIN L-RELATED) |
| | MOLECULAR FUNCTIONS |
| | PROTEASE > CYSTEINE-TYPE PROTEASE |
| | BIOLOGICAL PROCESS |
| | PROTEIN METABOLISM AND MODIFICATION > PROTEOLYSIS |
| | HUMAN GENE ONTOLOGY |
| | PROCESS |
| | protein metabolism and modification |
| | macromolecule catabolism > proteolysis and peptidolysis |
| | defence response > immune response |
| | neurogenesis > central nervous system development |
| | stress response > defence response |
| | FUNCTION |
| | endopeptidase |
| | cysteine-type peptidase > cysteine-type endopeptidase |
| | peptidase > cysteine-type peptidase |
| | lysosomal cysteine-type endopeptidase > cathepsin L |
| | lysosomal cysteine-type endopeptidase > cathepsin L |
| | cysteine-type endopeptidase > actinidain |
| | LOCATION |
| | cytoplasm > lysosome |
| | endoplasmic reticulum > endoplasmic reticulum lumen |
| | GO cellular component > intracellular |
| | HUMAN PROTEIN DOMAINS (INTERPRO SIGNATURES) |
| | IPR000668 (Peptidase C1) |
| | IPR000169 (THIOL PROTEASE CYS) |
| hP9-08-049 | HUMAN PANTHER CLASSIFICATIONS |
| (SEQ ID NO: 440) | FAMILY (SUBFAMILY) |
| | CYSTEINE PROTEASE-RELATED(CATHEPSIN L-RELATED) |
| | MOLECULAR FUNCTIONS |
| | PROTEASE > CYSTEINE-TYPE PROTEASE |
| | BIOLOGICAL PROCESS |
| | PROTEIN METABOLISM AND MODIFICATION > PROTEOLYSIS |
| | HUMAN GENE ONTOLOGY |
| | PROCESS |
| | protein metabolism and modification |
| | macromolecule catabolism > proteolysis and peptidolysis |
| | defence response > immune response |
| | FUNCTION |
| | peptidase > cysteine-type peptidase |
| | lysosomal cysteine-type endopeptidase > cathepsin L |
| | endopeptidase |
| | cysteine-type peptidase > cysteine-type endopeptidase |
| | lysosomal cysteine-type endopeptidase > cathepsin L |
| | cysteine-type endopeptidase > actinidain |
| | LOCATION |
| | cytoplasm > lysosome |
| | HUMAN PROTEIN DOMAINS (INTERPRO SIGNATURES) |
| | No Domain Hit |
| hP08-051 | HUMAN PANTHER CLASSIFICATIONS |
| (SEQ ID NO: 446) | FAMILY (SUBFAMILY) |
| | FAMILY 1 OF G-PROTEIN COUPLED RECEPTORS(PROTEINASE |
| | ACTIVATED RECEPTOR 3) |
| | MOLECULAR FUNCTIONS |
| | RECEPTOR > G-PROTEIN COUPLED RECEPTOR |
| | BIOLOGICAL PROCESS |
| | SIGNAL TRANSDUCTION > CELL SURFACE RECEPTOR |
| | MEDIATED SIGNAL TRANSDUCTION > G-PROTEIN MEDIATED SIGNALING |
| | BLOOD CLOTTING |
| | HUMAN GENE ONTOLOGY |
| | PROCESS |
| | cell surface receptor linked signal transduction > G protein linked receptor |
| | protein signaling pathway |
| | cell motility > chemotaxis |
| | defence response > inflammatory response |
| | cell growth and maintenance > invasive growth |
| | G protein signaling, linked to cAMP nucleotide second messenger > G |
| | protein signaling, adenylate cyclase inhibiting pathway |
| | FUNCTION |
| | enzyme inhibitor > protein kinase inhibitor |
| | enzyme > 2-acetyl-1-alkylglycerophosphocholine esterase |
| | defense/immunity protein > blood coagulation factor |
| | defense/immunity protein > antiviral response protein |
| | enzyme > nitric oxide synthase |
| | LOCATION |
| | cell > membrane fraction |
| | plasma membrane > integral plasma membrane protein |
| | cell > plasma membrane |
| | cytoplasm > endosome |
| | cell > cytoplasm |
| | HUMAN PROTEIN DOMAINS (INTERPRO SIGNATURES) |
| | IPR000276 (GPCRRHODOPSN) |
| | IPR003912 (PROTEASEAR) |
| | IPR003943 (PROTEASEAR3) |
| | IPR000276 (7tm 1) |
| | IPR000276 (G PROTEIN RECEP F1 2) |
| | IPR000276 (G PROTEIN RECEP F1 1) |
| hP1-09-001 | HUMAN PANTHER CLASSIFICATIONS |
| (SEQ ID NO: 452) | FAMILY (SUBFAMILY) |
| | FATTY ACID SYNTHASE (3-OXOACYL-[ACYL-CARRIER- |
| | PROTEIN] SYNTHASE-RELATED) |
| | MOLECULAR FUNCTIONS |
| | SYNTHASE AND SYNTHETASE > SYNTHASE |
| | TRANSFERASE > ACYLTRANSFERASE |
| | BIOLOGICAL PROCESS |
| | LIPID, FATTY ACID AND STEROID METABOLISM > FATTY ACID |
| | METABOLISM > FATTY ACID BIOSYNTHESIS |
| | HUMAN GENE ONTOLOGY |
| | PROCESS |
| | fatty acid metabolism |
| | biosynthesis > fatty acid biosynthesis |
| | cell growth and maintenance > metabolism |
| | biosynthesis > fatty acid biosynthesis |
| | fatty acid biosynthesis |
| | amino-acid and derivative metabolism > amino-acid metabolism |
| | lipid metabolism > fatty acid metabolism |
| | FUNCTION |
| | GO molecular function > enzyme |
| | fatty-acid synthase > 3-oxoacyl-[acyl-carrier protein] synthase |
| | fatty-acid synthase > oleoyl-[acyl-carrier protein] hydrolase |
| | fatty-acid synthase > [acyl-carrier protein] S-acetyltransferase |
| | fatty-acid synthase > [acyl-carrier protein] S-malonyltransferase |
| | LOCATION |
| | cell > membrane fraction |
| | cytosol > fatty-acid synthase complex |
| | cytoplasm > mitochondrion |
| | HUMAN PROTEIN DOMAINS (INTERPRO SIGNATURES) |
| | IPR000794 (ketoacyl-synt) |
| | IPR000719 (PROTEIN KINASE ATP) |
| | IPR001209 (RIBOSOMAL S14) |
| | IPR000794 (B KETOACYL SYNTHASE) |
| hP2-09-001 | HUMAN PANTHER CLASSIFICATIONS |
| (SEQ ID NO: 454) | FAMILY (SUBFAMILY) |
| | FATTY ACID SYNTHASE(3-OXOACYL-[ACYL-CARRIER-PROTEIN] |
| | SYNTHASE-RELATED) |
| | MOLECULAR FUNCTIONS |
| | SYNTHASE AND SYNTHETASE > SYNTHASE |
| | TRANSFERASE > ACYLTRANSFERASE |
| | BIOLOGICAL PROCESS |
| | LIPID, FATTY ACID AND STEROID METABOLISM > FATTY ACID |
| | METABOLISM > FATTY ACID BIOSYNTHESIS |
| | HUMAN GENE ONTOLOGY |
| | PROCESS |
| | fatty acid metabolism |
| | biosynthesis > fatty acid biosynthesis |
| | cell growth and maintenance > metabolism |
| | amino-acid and derivative metabolism > amino-acid metabolism |
| | biosynthesis > fatty acid biosynthesis |
| | fatty acid biosynthesis |
| | lipid metabolism > fatty acid metabolism |
| | FUNCTION |
| | GO molecular function > enzyme |
| | fatty-acid synthase > 3-oxoacyl-[acyl-carrier protein] synthase |
| | fatty-acid synthase > oleoyl-[acyl-carrier protein] hydrolase |
| | fatty-acid synthase > [acyl-carrier protein] S-acetyltransferase |
| | fatty-acid synthase > [acyl-carrier protein] S-malonyltransferase |
| | LOCATION |
| | cell > membrane fraction |
| | cytosol > fatty-acid synthase complex |
| | cytoplasm > mitochondrion |
| | HUMAN PROTEIN DOMAINS (INTERPRO SIGNATURES) |
| | IPR000794 (ketoacyl-synt) |
| | IPR000719 (PROTEIN KINASE ATP) |
| hP1-09-002 | HUMAN PANTHER CLASSIFICATIONS |
| (SEQ ID NO: 460) | FAMILY (SUBFAMILY) |
| | NUCLEAR HORMONE RECEPTOR (THYROID HORMONE |
| | RECEPTOR BETA) |
| | MOLECULAR FUNCTIONS |
| | RECEPTOR |
| | TRANSCRIPTION FACTOR > NUCLEAR HORMONE RECEPTOR |
| | BIOLOGICAL PROCESS |
| | NUCLEOSIDE, NUCLEOTIDE AND NUCLEIC ACID METABOLISM > MRNA |
| | TRANSCRIPTION > MRNA TRANSCRIPTION REGULATION |
| | DEVELOPMENTAL PROCESSES |
| | HUMAN GENE ONTOLOGY |
| | PROCESS |
| | transcription, DNA-dependent > transcription regulation |
| | transcription regulation > transcription regulation from Pol II promoter |
| | cell communication > signal transduction |
| | nucleotide metabolism > lipid metabolism |
| | transcription, DNA-dependent > transcription from Pol II promoter |
| | FUNCTION |
| | DNA binding > transcription factor |
| | ligand-regulated transcription factor > steroid hormone receptor |
| | ligand-dependent nuclear receptor |
| | nucleic acid binding > DNA binding |
| | ligand-regulated transcription factor > steroid hormone receptor |
| | receptor |
| | ligand binding or carrier > steroid binding |
| | LOCATION |
| | cell > nucleus |
| | nucleoplasm > transcription factor complex |
| | mitochondrion > mitochondrial matrix |
| | nuclear membrane > nuclear membrane lumen |
| | cell > cytoplasm |
| | HUMAN PROTEIN DOMAINS (INTERPRO SIGNATURES) |
| | IPR000324 (VITAMINDR) |
| | IPR001472 (NLS BP) |
| | IPR001628 (NUCLEAR RECEPTOR) |
| | IPR001723 (STRDHORMONER) |
| | IPR001728 (THYROIDHORMR) |
| | IPR003078 (RETNOICACIDR) |
| | IPR001628 (STROIDFINGER) |
| | IPR000536 (HOLI) |
| | IPR001628 (ZnF C4) |
| | IPR001628 (zf-C4) |
| | IPR000536 (hormone rec) |
| hP2-09-002 | HUMAN PANTHER CLASSIFICATIONS |
| (SEQ ID NO: 462) | FAMILY (SUBFAMILY) |
| | NUCLEAR HORMONE RECEPTOR(THYROID HORMONE |
| | RECEPTOR BETA) |
| | MOLECULAR FUNCTIONS |
| | RECEPTOR |
| | TRANSCRIPTION FACTOR > NUCLEAR HORMONE RECEPTOR |
| | BIOLOGICAL PROCESS |
| | NUCLEOSIDE, NUCLEOTIDE AND NUCLEIC ACID METABOLISM > MRNA |
| | TRANSCRIPTION > MRNA TRANSCRIPTION REGULATION |
| | DEVELOPMENTAL PROCESSES |
| | HUMAN GENE ONTOLOGY |
| | PROCESS |
| | transcription, DNA-dependent > transcription regulation |
| | transcription regulation > transcription regulation from Pol II promoter |
| | cell communication > signal transduction |
| | neurogenesis > nerve ensheathment |
| | GO biological process > developmental processes |
| | FUNCTION |
| | DNA binding > transcription factor |
| | ligand-regulated transcription factor > steroid hormone receptor |
| | ligand-dependent nuclear receptor |
| | nucleic acid binding > DNA binding |
| | ligand-regulated transcription factor > steroid hormone receptor |
| | receptor |
| | ligand-regulated transcription factor > steroid hormone receptor |
| | ligand-dependent nuclear receptor |
| | LOCATION |
| | cell > nucleus |
| | nucleoplasm > transcription factor complex |
| | nuclear membrane > nuclear membrane lumen |
| | GO cellular component > intracellular |
| | HUMAN PROTEIN DOMAINS (INTERPRO SIGNATURES) |
| | IPR000324 (VITAMINDR) |
| | IPR001472 (NLS BP) |
| | IPR001628 (NUCLEAR RECEPTOR) |
| | IPR001723 (STRDHORMONER) |
| | IPR001728 (THYROIDHORMR) |
| | IPR003078 (RETNOICACIDR) |
| | IPR001628 (STROIDFINGER) |
| | IPR000536 (HOLI) |
| | IPR001628 (ZnF C4) |
| | IPR001628 (zf-C4) |
| | IPR000536 (hormone rec) |
| hP1-09-003 | HUMAN PANTHER CLASSIFICATIONS |
| (SEQ ID NO: 468) | FAMILY (SUBFAMILY) |
| | GMC OXIDOREDUCTASE FAMILY MEMBER (CHOLINE |
| | DEHYDROGENASE) |
| | MOLECULAR FUNCTIONS |
| | OXIDOREDUCTASE > DEHYDROGENASE |
| | BIOLOGICAL PROCESS |
| | BIOLOGICAL PROCESS UNCLASSIFIED |
| | HUMAN GENE ONTOLOGY |
| | PROCESS |
| | metabolism > electron transport |
| | carbohydrate metabolism > alcohol metabolism |
| | FUNCTION |
| | flavin-containing electron transfer protein > electron transfer flavoprotein |
| | glucose dehydrogenase > glucose dehydrogenase (acceptor) |
| | LOCATION |
| | cytoplasm > lysosome |
| | cytoplasm > peroxisome |
| | HUMAN PROTEIN DOMAINS (INTERPRO SIGNATURES) |
| | IPR000172 (GMC oxred) |
| | IPR000172 (GMC OXRED 2) |
| P2-09-003 | HUMAN PANTHER CLASSIFICATIONS |
| (SEQ ID NO: 470) | FAMILY (SUBFAMILY) |
| | GMC OXIDOREDUCTASE FAMILY MEMBER(CHOLINE |
| | DEHYDROGENASE) |
| | MOLECULAR FUNCTIONS |
| | OXIDOREDUCTASE > DEHYDROGENASE |
| | BIOLOGICAL PROCESS |
| | BIOLOGICAL PROCESS UNCLASSIFIED |
| | HUMAN GENE ONTOLOGY |
| | PROCESS |
| | metabolism > electron transport |
| | carbohydrate metabolism > alcohol metabolism |
| | FUNCTION |
| | flavin-containing electron transfer protein > electron transfer flavoprotein |
| | glucose dehydrogenase > glucose dehydrogenase (acceptor) |
| | LOCATION |
| | cytoplasm > lysosome |
| | cytoplasm > peroxisome |
| | HUMAN PROTEIN DOMAINS (INTERPRO SIGNATURES) |
| | IPR000172 (GMC oxred) |
| | IPR000172 (GMC OXRED 2) |
| hP1-09-005 | HUMAN PANTHER CLASSIFICATIONS |
| (SEQ ID NO: 476) | FAMILY (SUBFAMILY) |
| | RIBONUCLEASE-RELATED (RIBONUCLEASE 1) |
| | MOLECULAR FUNCTIONS |
| | NUCLEIC ACID BINDING > NUCLEASE |
| | BIOLOGICAL PROCESS |
| | NUCLEOSIDE, NUCLEOTIDE AND NUCLEIC ACID METABOLISM > RNA |
| | CATABOLISM |
| | HUMAN GENE ONTOLOGY |
| | PROCESS |
| | transcription, DNA-dependent |
| | macromolecule catabolism > RNA catabolism |
| | protein biosynthesis > general regulation of protein biosynthesis |
| | defence response > inflammatory response |
| | stress response > defence response |
| | FUNCTION |
| | endoribonuclease > pancreatic ribonuclease |
| | GO molecular function > nucleic acid binding |
| | enzyme > nuclease |
| | nuclease > endonuclease |
| | nucleic acid binding > RNA binding |
| | LOCATION |
| | GO cellular component > extracellular |
| | Golgi apparatus > secretory vesicle |
| | HUMAN PROTEIN DOMAINS (INTERPRO SIGNATURES) |
| | IPR001427 (RIBONUCLEASE) |
| | IPR001427 (RNAse Pc) |
| | IPR001427 (rnaseA) |
| | IPR001427 (RNASE PANCREATIC) |
| | IPR001427 (sp P07998 RNP HUMAN) |
| hP2-09-005 | HUMAN PANTHER CLASSIFICATIONS |
| (SEQ ID NO: 478) | FAMILY (SUBFAMILY) |
| | RIBONUCLEASE-RELATED (RIBONUCLEASE 1) |
| | MOLECULAR FUNCTIONS |
| | NUCLEIC ACID BINDING > NUCLEASE |
| | BIOLOGICAL PROCESS |
| | NUCLEOSIDE, NUCLEOTIDE AND NUCLEIC ACID METABOLISM > RNA |
| | CATABOLISM |
| | HUMAN GENE ONTOLOGY |
| | PROCESS |
| | transcription, DNA-dependent |
| | macromolecule catabolism > RNA catabolism |
| | defence response > inflammatory response |
| | protein biosynthesis > general regulation of protein biosynthesis |
| | stress response > defence response |
| | FUNCTION |
| | endoribonuclease > pancreatic ribonuclease |
| | GO molecular function > nucleic acid binding |
| | enzyme > nuclease |
| | nuclease > endonuclease |
| | nucleic acid binding > RNA binding |
| | LOCATION |
| | GO cellular component > extracellular |
| | Golgi apparatus > secretory vesicle |
| | cell > soluble fraction |
| | HUMAN PROTEIN DOMAINS (INTERPRO SIGNATURES) |
| | IPR001427 (RIBONUCLEASE) |
| | IPR001427 (RNAse Pc) |
| | IPR001427 (rnaseA) |
| | IPR001427 (RNASE PANCREATIC) |
| | IPR001427 (sp P07998 RNP HUMAN) |
| hP3-09-005 | HUMAN PANTHER CLASSIFICATIONS |
| (SEQ ID NO: 480) | FAMILY (SUBFAMILY) |
| | RIBONUCLEASE-RELATED (RIBONUCLEASE 1) |
| | MOLECULAR FUNCTIONS |
| | NUCLEIC ACID BINDING > NUCLEASE |
| | BIOLOGICAL PROCESS |
| | NUCLEOSIDE, NUCLEOTIDE AND NUCLEIC ACID METABOLISM > RNA |
| | CATABOLISM |
| | HUMAN GENE ONTOLOGY |
| | PROCESS |
| | transcription, DNA-dependent |
| | macromolecule catabolism > RNA catabolism |
| | defence response > inflammatory response |
| | stress response > defence response |
| | protein biosynthesis > general regulation of protein biosynthesis |
| | FUNCTION |
| | endoribonuclease > pancreatic ribonuclease |
| | GO molecular function > nucleic acid binding |
| | enzyme > nuclease |
| | nuclease > endonuclease |
| | nucleic acid binding > RNA binding |
| | LOCATION |
| | GO cellular component > extracellular |
| | Golgi apparatus > secretory vesicle |
| | HUMAN PROTEIN DOMAINS (INTERPRO SIGNATURES) |
| | IPR001427 (RIBONUCLEASE) |
| | IPR001427 (RNAse Pc) |
| | IPR001427 (rnaseA) |
| | IPR001427 (RNASE PANCREATIC) |
| | IPR001427 (sp P07998 RNP HUMAN) |
| hP4-09-005 | HUMAN PANTHER CLASSIFICATIONS |
| (SEQ ID NO: 482) | FAMILY (SUBFAMILY) |
| | RIBONUCLEASE-RELATED(RIBONUCLEASE 1) |
| | MOLECULAR FUNCTIONS |
| | NUCLEIC ACID BINDING > NUCLEASE |
| | BIOLOGICAL PROCESS |
| | NUCLEOSIDE, NUCLEOTIDE AND NUCLEIC ACID METABOLISM > RNA |
| | CATABOLISM |
| | HUMAN GENE ONTOLOGY |
| | PROCESS |
| | transcription, DNA-dependent |
| | macromolecule catabolism > RNA catabolism |
| | defence response > inflammatory response |
| | protein biosynthesis > general regulation of protein biosynthesis |
| | stress response > defence response |
| | FUNCTION |
| | endoribonuclease > pancreatic ribonuclease |
| | GO molecular function > nucleic acid binding |
| | enzyme > nuclease |
| | nuclease > endonuclease |
| | nucleic acid binding > RNA binding |
| | LOCATION |
| | GO cellular component > extracellular |
| | Golgi apparatus > secretory vesicle |
| | cell > soluble fraction |
| | HUMAN PROTEIN DOMAINS (INTERPRO SIGNATURES) |
| | IPR001427 (RIBONUCLEASE) |
| | IPR001427 (RNAse Pc) |
| | IPR001427 (rnaseA) |
| | IPR001427 (RNASE PANCREATIC) |
| | IPR001427 (sp P07998 RNP HUMAN) |
| hP09-006 | HUMAN PANTHER CLASSIFICATIONS |
| (SEQ ID NO: 488) | FAMILY (SUBFAMILY) |
| | VAV PROTO-ONCOGENE-RELATEDHUMAN GENE ONTOLOGY |
| | FUNCTION |
| | nucleotide binding > ATP binding |
| | DNA binding > transcription factor |
| | adenosinetriphosphatase > myosin ATPase |
| | protein kinase > protein tyrosine kinase |
| | mannosidase > beta-mannosidase |
| | LOCATION |
| | cell > cytoplasm |
| | cell > nucleus |
| | plasma membrane > peripheral plasma membrane protein |
| | nuclear membrane > nuclear membrane lumen |
| | GO cellular component > intracellular |
| | HUMAN PROTEIN DOMAINS (INTERPRO SIGNATURES) |
| | IPR001452 (SH3DOMAIN) |
| | IPR001849 (PH DOMAIN) |
| | IPR000219 (RhoGEF) |
| | IPR001452 (SH3) |
| | IPR001849 (PH) |
| | IPR001849 (PH) |
| | IPR001452 (SH3) |
| | IPR000219 (RhoGEF) |
| | IPR001452 (SH3) |
| | IPR000219 (GRF DBL) |
| hP1-09-007 | HUMAN PANTHER CLASSIFICATIONS |
| (SEQ ID NO: 494) | FAMILY (SUBFAMILY) |
| | PROTEIN TYROSINE KINASE (BLK/LYN/HCK TYROSINE PROTEIN |
| | KINASE (PTK GROUP I)) |
| | MOLECULAR FUNCTIONS |
| | KINASE > PROTEIN KINASE > NON-RECEPTOR TYROSINE |
| | PROTEIN KINASE |
| | BIOLOGICAL PROCESS |
| | PROTEIN METABOLISM AND MODIFICATION > PROTEIN |
| | MODIFICATION > PROTEIN PHOSPHORYLATION |
| | SIGNAL TRANSDUCTION > INTRACELLULAR SIGNALING |
| | CASCADE |
| | ONCOGENESIS > ONCOGENE |
| | HUMAN GENE ONTOLOGY |
| | PROCESS |
| | protein modification > protein dephosphorylation |
| | protein modification > protein phosphorylation |
| | N-terminal fatty acid:protein modification > protein myristylation |
| | intracellular signaling cascade > protein kinase cascade |
| | FUNCTION |
| | protein kinase > protein tyrosine kinase |
| | nucleotide binding > ATP binding |
| | enzyme > protein kinase |
| | protein tyrosine kinase > non-membrane spanning protein tyrosine kinase |
| | GO molecular function > cell cycle regulator |
| | LOCATION |
| | GO cellular component > intracellular |
| | plasma membrane > peripheral plasma membrane protein |
| | cell > cytoplasm |
| | cell > membrane fraction |
| | cell > nucleus |
| | HUMAN PROTEIN DOMAINS (INTERPRO SIGNATURES) |
| | IPR001452 (SH3DOMAIN) |
| | IPR000719 (pkinase) |
| | IPR000980 (SH2) |
| | IPR001452 (SH3) |
| | IPR000719 (PROTEIN KINASE DOM) |
| | IPR000719 (PROTEIN KINASE ATP) |
| | IPR001245 (TYRKINASE) |
| | IPR000980 (SH2DOMAIN) |
| | IPR001245 (TyrKc) |
| | IPR000980 (SH2) |
| | IPR002290 (S TKc) |
| | IPR001452 (SH3) |
| | IPR000980 (SH2) |
| | IPR001452 (SH3) |
| hP2-09-007 | HUMAN PANTHER CLASSIFICATIONS |
| (SEQ ID NO: 496) | FAMILY (SUBFAMILY) |
| | PROTEIN TYROSINE KINASE(BLK/LYN/HCK TYROSINE PROTEIN |
| | KINASE (PTK GROUP I)) |
| | MOLECULAR FUNCTIONS |
| | KINASE > PROTEIN KINASE > NON-RECEPTOR TYROSINE |
| | PROTEIN KINASE |
| | BIOLOGICAL PROCESS |
| | PROTEIN METABOLISM AND MODIFICATION > PROTEIN |
| | MODIFICATION > PROTEIN PHOSPHORYLATION |
| | SIGNAL TRANSDUCTION > INTRACELLULAR SIGNALING |
| | CASCADE |
| | ONCOGENESIS > ONCOGENE |
| | HUMAN GENE ONTOLOGY |
| | PROCESS |
| | protein modification > protein dephosphorylation |
| | protein modification > protein phosphorylation |
| | N-terminal fatty acid:protein modification > protein myristylation |
| | intracellular signaling cascade > protein kinase cascade |
| | FUNCTION |
| | protein kinase > protein tyrosine kinase |
| | nucleotide binding > ATP binding |
| | enzyme > protein kinase |
| | protein tyrosine kinase > non-membrane spanning protein tyrosine kinase |
| | GO molecular function > cell cycle regulator |
| | LOCATION |
| | GO cellular component > intracellular |
| | plasma membrane > peripheral plasma membrane protein |
| | cell > cytoplasm |
| | cell > membrane fraction |
| | cell > nucleus |
| | HUMAN PROTEIN DOMAINS (INTERPRO SIGNATURES) |
| | IPR001452 (SH3DOMAIN) |
| | IPR000719 (pkinase) |
| | IPR000980 (SH2) |
| | IPR001452 (SH3) |
| | IPR000719 (PROTEIN KINASE DOM) |
| | IPR000719 (PROTEIN KINASE ATP) |
| | IPR001245 (TYRKINASE) |
| | IPR000980 (SH2DOMAIN) |
| | IPR001245 (TyrKc) |
| | IPR000980 (SH2) |
| | IPR002290 (S TKc) |
| | IPR001452 (SH3) |
| | IPR000980 (SH2) |
| | IPR001452 (SH3) |
| hP09-008 | HUMAN PANTHER CLASSIFICATIONS |
| (SEQ ID NO: 502) | FAMILY (SUBFAMILY) |
| | KINESIN-RELATED(KINESIN-LIKE PROTEIN KIF13A) |
| | MOLECULAR FUNCTIONS |
| | CYTOSKELETAL PROTEIN > MICROTUBULE FAMILY |
| | CYTOSKELETAL PROTEIN > MICROTUBULE BINDING MOTOR PROTEIN |
| | BIOLOGICAL PROCESS |
| | INTRACELLULAR PROTEIN TRAFFIC > EXOCYTOSIS > CONSTITUTIVE |
| | EXOCYTOSIS |
| | HUMAN GENE ONTOLOGY |
| | PROCESS |
| | cytoskeleton organization and biogenesis > microtubule-based process |
| | axon cargo transport > anterograde axon cargo transport |
| | M phase > mitosis |
| | mitotic anaphase > mitotic anaphase B |
| | intracellular protein traffic > non-selective vesicle transport |
| | FUNCTION |
| | GO molecular function > motor |
| | nucleotide binding > ATP binding |
| | microtubule binding |
| | motor > microtubule motor |
| | enzyme > adenosinetriphosphatase |
| | adenosinetriphosphatase > plus-end-directed kinesin ATPase |
| | LOCATION |
| | cell wall > kinesin |
| | microtubule cytoskeleton > microtubule associated protein |
| | microtubule cytoskeleton > microtubule associated protein |
| | kinesin > plus-end kinesin |
| | cytoplasm > Golgi apparatus |
| | spindle > spindle microtubule |
| | microtubule |
| | HUMAN PROTEIN DOMAINS (INTERPRO SIGNATURES) |
| | IPR001752 (KINESINHEAVY) |
| | IPR001752 (KISc) |
| | IPR000253 (FHA) |
| | IPR001752 (kinesin) |
| | IPR001752 (KINESIN MOTOR DOMAIN2) |
| | IPR001472 (NLS BP) |
| | IPR001752 (KINESIN MOTOR DOMAIN1) |
| | IPR001687 (ATP GTP A) |
| hP09-009 | HUMAN PANTHER CLASSIFICATIONS |
| (SEQ ID NO: 510) | FAMILY (SUBFAMILY) |
| | PROTEIN TYROSINE KINASE(FOCAL ADHESION KINASE (FAK) |
| | (PTK GROUP IX)) |
| | MOLECULAR FUNCTIONS |
| | KINASE > PROTEIN KINASE > NON-RECEPTOR TYROSINE |
| | PROTEIN KINASE |
| | BIOLOGICAL PROCESS |
| | PROTEIN METABOLISM AND MODIFICATION > PROTEIN |
| | MODIFICATION > PROTEIN PHOSPHORYLATION |
| | SIGNAL TRANSDUCTION > INTRACELLULAR SIGNALING |
| | CASCADE |
| | HUMAN GENE ONTOLOGY |
| | PROCESS |
| | protein modification > protein dephosphorylation |
| | protein modification > protein phosphorylation |
| | enzyme linked receptor protein signaling pathway > transmembrane |
| | receptor protein tyrosine kinase signaling pathway |
| | cell communication > signal transduction |
| | FUNCTION |
| | protein kinase > protein tyrosine kinase |
| | nucleotide binding > ATP binding |
| | enzyme > protein kinase |
| | protein tyrosine kinase > non-membrane spanning protein tyrosine kinase |
| | transmembrane receptor |
| | protein tyrosine kinase > non-membrane spanning protein tyrosine kinase |
| | LOCATION |
| | cell > membrane fraction |
| | cell > cytoplasm |
| | plasma membrane > integral plasma membrane protein |
| | cytoplasm > cytoskeleton |
| | plasma membrane > peripheral plasma membrane protein |
| | HUMAN PROTEIN DOMAINS (INTERPRO SIGNATURES) |
| | IPR001245 (TYRKINASE) |
| | IPR001245 (TyrKc) |
| | IPR002290 (S TKc) |
| | IPR000299 (B41) |
| | IPR000719 (pkinase) |
| | IPR000299 (BAND 41 3) |
| | IPR000719 (PROTEIN KINASE DOM) |
| | IPR000719 (PROTEIN KINASE ATP) |
| | IPR001245 (PROTEIN KINASE TYR) |
| hP09-010 | HUMAN PANTHER CLASSIFICATIONS |
| (SEQ ID NO: 516) | FAMILY (SUBFAMILY) |
| | MITOCHONDRIAL CARRIER PROTEIN(MITOCHONDRIAL SOLUTE |
| | CARRIER-RELATED) |
| | MOLECULAR FUNCTIONS |
| | TRANSFER/CARRIER PROTEIN > MITOCHONDRIAL CARRIER |
| | PROTEIN |
| | BIOLOGICAL PROCESS |
| | TRANSPORT > SMALL MOLECULE TRANSPORT |
| | HUMAN GENE ONTOLOGY |
| | PROCESS |
| | cell growth and maintenance > transport |
| | transport > mitochondrial transport |
| | hydrogen transport > proton transport |
| | metabolism > energy pathways |
| | energy derivation by oxidation of organic compounds > aerobic respiration |
| | FUNCTION |
| | GO molecular function > ligand binding or carrier |
| | ligand binding or carrier > calcium binding |
| | LOCATION |
| | mitochondrial membrane > mitochondrial inner membrane |
| | cell > membrane fraction |
| | cytoplasm > mitochondrion |
| | plasma membrane > integral plasma membrane protein |
| | mitochondrion > mitochondrial membrane |
| | HUMAN PROTEIN DOMAINS (INTERPRO SIGNATURES) |
| | IPR001993 (mito carr) |
| | IPR001993 (MITOCH CARRIER) |
| hP09-011 | HUMAN PANTHER CLASSIFICATIONS |
| (SEQ ID NO: 522) | No Panther Hit |
| | HUMAN GENE ONTOLOGY |
| | FUNCTION |
| | enzyme > gamma-butyrobetaine, 2-oxoglutarate dioxygenase |
| | HUMAN PROTEIN DOMAINS (INTERPRO SIGNATURES) |
| | No Domain Hit |
| hP1-09-012 | HUMAN PANTHER CLASSIFICATIONS |
| (SEQ ID NO: 528) | No Panther Hit |
| | HUMAN GENE ONTOLOGY |
| | FUNCTION |
| | GO molecular function > cell cycle regulator |
| | LOCATION |
| | cell > cytoplasm |
| | HUMAN PROTEIN DOMAINS (INTERPRO SIGNATURES) |
| | NULL (ALA RICH) |
| hP2-09-012 | HUMAN PANTHER CLASSIFICATIONS |
| (SEQ ID NO: 530) | No Panther Hit |
| | HUMAN GENE ONTOLOGY |
| | FUNCTION |
| | GO molecular function > cell cycle regulator |
| | LOCATION |
| | cell > cytoplasm |
| | HUMAN PROTEIN DOMAINS (INTERPRO SIGNATURES) |
| | No Domain Hit |
| hP09-013 | HUMAN PANTHER CLASSIFICATIONS |
| (SEQ ID NO: 536) | FAMILY (SUBFAMILY) |
| | COILED-COIL PROTEINHUMAN GENE ONTOLOGY |
| | PROCESS |
| | protein metabolism and modification > protein modification |
| | organelle organization and biogenesis > cytoskeleton organization and |
| | biogenesis |
| | mesoderm development > muscle development |
| | muscle contraction > muscle contraction regulation |
| | striated muscle contraction > striated muscle contraction regulation |
| | FUNCTION |
| | GO molecular function > motor |
| | nucleotide binding > ATP binding |
| | adenosinetriphosphatase > myosin ATPase |
| | protein binding > calmodulin binding |
| | protein binding > actin binding |
| | LOCATION |
| | actin cytoskeleton > non-muscle myosin |
| | cell wall > muscle myosin |
| | thick filament |
| | actin cytoskeleton > non-muscle myosin |
| | cytoplasm > cytoskeleton |
| | nuclear membrane > nuclear membrane lumen |
| | non-muscle myosin |
| | thin filament |
| | cell wall > muscle myosin |
| | HUMAN PROTEIN DOMAINS (INTERPRO SIGNATURES) |
| | No Domain Hit |
| hP1-09-014 | HUMAN PANTHER CLASSIFICATIONS |
| (SEQ ID NO: 542) | No Panther Hit |
| | HUMAN GENE ONTOLOGY |
| | No Gene Ontology |
| | HUMAN PROTEIN DOMAINS (INTERPRO SIGNATURES) |
| | IPR001472 (NLS BP) |
| hP2-09-014 | HUMAN PANTHER CLASSIFICATIONS |
| (SEQ ID NO: 544) | No Panther Hit |
| | HUMAN GENE ONTOLOGY |
| | No Gene Ontology |
| | HUMAN PROTEIN DOMAINS (INTERPRO SIGNATURES) |
| | IPR001472 (NLS BP) |
| hP3-09-014 | HUMAN PANTHER CLASSIFICATIONS |
| (SEQ ID NO: 546) | No Panther Hit |
| | HUMAN GENE ONTOLOGY |
| | No Gene Ontology |
| | HUMAN PROTEIN DOMAINS (INTERPRO SIGNATURES) |
| | IPR001472 (NLS BP) |
| hP4-09-014 | HUMAN PANTHER CLASSIFICATIONS |
| (SEQ ID NO: 548) | No Panther Hit |
| | HUMAN GENE ONTOLOGY |
| | No Gene Ontology |
| | HUMAN PROTEIN DOMAINS (INTERPRO SIGNATURES) |
| | No Domain Hit |
| hP5-09-014 | HUMAN PANTHER CLASSIFICATIONS |
| (SEQ ID NO: 550) | No Panther Hit |
| | HUMAN GENE ONTOLOGY |
| | No Gene Ontology |
| | HUMAN PROTEIN DOMAINS (INTERPRO SIGNATURES) |
| | No Domain Hit |
| hP1-10-007 | HUMAN PANTHER CLASSIFICATIONS |
| (SEQ ID NO: 556) | FAMILY (SUBFAMILY) |
| | MOESIN/EZRIN/RADIXIN-RELATED (EZRIN) |
| | MOLECULAR FUNCTIONS |
| | CYTOSKELETAL PROTEIN > OTHER CYTOSKELETAL PROTEINS |
| | BIOLOGICAL PROCESS |
| | CELL STRUCTURE AND MOTILITY > CELL STRUCTURE |
| | HUMAN GENE ONTOLOGY |
| | PROCESS |
| | actin modification > cytoskeletal anchoring |
| | cell growth and maintenance > cell motility |
| | cell growth and maintenance > cell shape and cell size control |
| | cell proliferation > negative control of cell proliferation |
| | protein modification > protein dephosphorylation |
| | FUNCTION |
| | protein binding > actin binding |
| | protein phosphatase > protein tyrosine phosphatase |
| | protein tyrosine phosphatase > prenylated protein tyrosine phosphatase |
| | enzyme > protein phosphatase |
| | protein tyrosine phosphatase > non-membrane spanning protein tyrosine |
| | phosphatase |
| | LOCATION |
| | cytoplasm > cytoskeleton |
| | plasma membrane > microvilli |
| | cytoskeleton > actin cytoskeleton |
| | cell > plasma membrane |
| | actin filament > spectrin |
| | HUMAN PROTEIN DOMAINS (INTERPRO SIGNATURES) |
| | IPR000798 (ERMFAMILY) |
| | IPR000299 (BAND41) |
| | IPR000299 (B41) |
| | IPR000798 (ERM) |
| | IPR000299 (Band 41) |
| | IPR000299 (BAND 41 3) |
| | NULL (GLU RICH) |
| | IPR000299 (BAND 41 2) |
| hP2-10-007 | HUMAN PANTHER CLASSIFICATIONS |
| (SEQ ID NO: 558) | FAMILY (SUBFAMILY) |
| | MOESIN/EZRIN/RADIXIN-RELATED (EZRIN) |
| | MOLECULAR FUNCTIONS |
| | CYTOSKELETAL PROTEIN > OTHER CYTOSKELETAL PROTEINS |
| | BIOLOGICAL PROCESS |
| | CELL STRUCTURE AND MOTILITY > CELL STRUCTURE |
| | HUMAN GENE ONTOLOGY |
| | PROCESS |
| | actin modification > cytoskeletal anchoring |
| | cell growth and maintenance > cell motility |
| | cell growth and maintenance > cell shape and cell size control |
| | cell proliferation > negative control of cell proliferation |
| | protein modification > protein dephosphorylation |
| | FUNCTION |
| | protein binding > actin binding |
| | protein phosphatase > protein tyrosine phosphatase |
| | protein tyrosine phosphatase > prenylated protein tyrosine phosphatase |
| | enzyme > protein phosphatase |
| | protein tyrosine phosphatase > non-membrane spanning protein tyrosine |
| | phosphatase |
| | LOCATION |
| | cytoplasm > cytoskeleton |
| | plasma membrane > microvilli |
| | cytoskeleton > actin cytoskeleton |
| | cell > plasma membrane |
| | actin filament > spectrin |
| | HUMAN PROTEIN DOMAINS (INTERPRO SIGNATURES) |
| | IPR000798 (ERMFAMILY) |
| | IPR000299 (BAND41) |
| | IPR000299 (B41) |
| | IPR000798 (ERM) |
| | IPR000299 (Band 41) |
| | IPR000299 (BAND 41 3) |
| | NULL (GLU RICH) |
| | IPR000299 (BAND 41 1) |
| | IPR000299 (BAND 41 2) |
| hP3-10-007 | HUMAN PANTHER CLASSIFICATIONS |
| (SEQ ID NO: 560) | FAMILY (SUBFAMILY) |
| | MOESIN/EZRIN/RADIXIN-RELATED(EZRIN) |
| | MOLECULAR FUNCTIONS |
| | CYTOSKELETAL PROTEIN > OTHER CYTOSKELETAL PROTEINS |
| | BIOLOGICAL PROCESS |
| | CELL STRUCTURE AND MOTILITY > CELL STRUCTURE |
| | HUMAN GENE ONTOLOGY |
| | PROCESS |
| | actin modification > cytoskeletal anchoring |
| | cell growth and maintenance > cell motility |
| | cell growth and maintenance > cell shape and cell size control |
| | protein modification > protein dephosphorylation |
| | cell proliferation > negative control of cell proliferation |
| | FUNCTION |
| | protein binding > actin binding |
| | protein phosphatase > protein tyrosine phosphatase |
| | protein tyrosine phosphatase > prenylated protein tyrosine phosphatase |
| | enzyme > protein phosphatase |
| | protein tyrosine phosphatase > non-membrane spanning protein tyrosine |
| | phosphatase |
| | LOCATION |
| | cytoplasm > cytoskeleton |
| | cytoskeleton > actin cytoskeleton |
| | cell > plasma membrane |
| | plasma membrane > microvilli |
| | actin filament > spectrin |
| | HUMAN PROTEIN DOMAINS (INTERPRO SIGNATURES) |
| | IPR000798 (ERMFAMILY) |
| | IPR000299 (BAND41) |
| | IPR000299 (B41) |
| | IPR000299 (Band 41) |
| | IPR000299 (BAND 41 3) |
| | IPR000299 (BAND 41 2) |
| hP10-009 | HUMAN PANTHER CLASSIFICATIONS |
| (SEQ ID NO: 566) | FAMILY (SUBFAMILY) |
| | BETA-1,3-GLUCURONYLTRANSFERASE-RELATED(BETA-1,3- |
| | GLUCURONYLTRANSFERASE 1) |
| | MOLECULAR FUNCTIONS |
| | TRANSFERASE > GLYCOSYLTRANSFERASE |
| | BIOLOGICAL PROCESS |
| | CARBOHYDRATE METABOLISM > OTHER CARBOHYDRATE |
| | METABOLISM |
| | CARBOHYDRATE METABOLISM > OTHER POLYSACCHARIDE |
| | METABOLISM |
| | PROTEIN METABOLISM AND MODIFICATION > PROTEIN |
| | MODIFICATION > PROTEIN GLYCOSYLATION |
| | HUMAN GENE ONTOLOGY |
| | PROCESS |
| | protein modification > protein glycosylation |
| | metabolism > carbohydrate metabolism |
| | FUNCTION |
| | enzyme > glucuronosyltransferase |
| | LOCATION |
| | cell > membrane fraction |
| | HUMAN PROTEIN DOMAINS (INTERPRO SIGNATURES) |
| | No Domain Hit |
| hP10-011 | HUMAN PANTHER CLASSIFICATIONS |
| (SEQ ID NO: 572) | FAMILY (SUBFAMILY) |
| | DNA PRIMASE LARGE SUBUNIT(DNA PRIMASE LARGE |
| | SUBUNIT) |
| | MOLECULAR FUNCTIONS |
| | NUCLEIC ACID BINDING > PRIMASE |
| | BIOLOGICAL PROCESS |
| | NUCLEOSIDE, NUCLEOTIDE AND NUCLEIC ACID METABOLISM > DNA |
| | METABOLISM |
| | CELL CYCLE > DNA REPLICATION |
| | HUMAN GENE ONTOLOGY |
| | PROCESS |
| | DNA dependent DNA replication > DNA replication, priming |
| | DNA metabolism |
| | mitotic S phase |
| | DNA replication and chromosome cycle |
| | peptidoglycan catabolism > DNA replication |
| | DNA dependent DNA replication > DNA replication, priming |
| | DNA strand elongation > lagging strand elongation |
| | FUNCTION |
| | nucleic acid binding > DNA binding |
| | enzyme > DNA-directed RNA polymerase |
| | DNA-directed DNA polymerase > DNA primase |
| | DNA-directed DNA polymerase > alpha DNA polymerase |
| | LOCATION |
| | replication fork > alpha DNA polymerase:primase complex |
| | cell > cytoplasm |
| | HUMAN PROTEIN DOMAINS (INTERPRO SIGNATURES) |
| | No Domain Hit |
| hP10-012 | HUMAN PANTHER CLASSIFICATIONS |
| (SEQ ID NO: 578) | FAMILY (SUBFAMILY) |
| | UDP-GLUCOSE GLYCOPROTEIN:GLUCOSYLTRANSFERASE(UDP- |
| | GLUCOSE GLYCOPROTEIN:GLUCOSYLTRANSFERASE) |
| | MOLECULAR FUNCTIONS |
| | TRANSFERASE > GLYCOSYLTRANSFERASE |
| | BIOLOGICAL PROCESS |
| | PROTEIN METABOLISM AND MODIFICATION > PROTEIN |
| | MODIFICATION > PROTEIN GLYCOSYLATION |
| | HUMAN GENE ONTOLOGY |
| | PROCESS |
| | protein metabolism and modification > protein modification |
| | glucan metabolism > beta-1,6 glucan metabolism |
| | FUNCTION |
| | enzyme > UDP-glucose:glycoprotein glucosyltransferase |
| | LOCATION |
| | cytoplasm > endoplasmic reticulum |
| | cell > soluble fraction |
| | HUMAN PROTEIN DOMAINS (INTERPRO SIGNATURES) |
| | No Domain Hit |
| hP10-013 | HUMAN PANTHER CLASSIFICATIONS |
| (SEQ ID NO: 584) | No Panther Hit |
| | HUMAN GENE ONTOLOGY |
| | No Gene Ontology |
| | HUMAN PROTEIN DOMAINS (INTERPRO SIGNATURES) |
| | No Domain Hit |
| hP10-014 | HUMAN PANTHER CLASSIFICATIONS |
| (SEQ ID NO: 590) | FAMILY (SUBFAMILY) |
| | XANTHINE DEHYDROGENASE-RELATED(ALDEHYDE OXIDASE |
| | 1) |
| | MOLECULAR FUNCTIONS |
| | OXIDOREDUCTASE > OXIDASE |
| | BIOLOGICAL PROCESS |
| | IMMUNITY AND DEFENSE > ANTIOXIDATION AND FREE |
| | RADICAL REMOVAL |
| | HUMAN GENE ONTOLOGY |
| | PROCESS |
| | metabolism > electron transport |
| | isoprenoid catabolism > oxygen and radical metabolism |
| | FUNCTION |
| | iron-sulfur electron transfer carrier > Fe2S2 electron transfer carrier |
| | flavin-containing electron transfer protein > electron transfer flavoprotein |
| | enzyme > xanthine dehydrogenase |
| | electron carrier > iron-sulfur electron transfer carrier |
| | enzyme > aldehyde oxidase |
| | LOCATION |
| | cytoplasm > peroxisome |
| | mitochondrion > mitochondrial matrix |
| | HUMAN PROTEIN DOMAINS (INTERPRO SIGNATURES) |
| | IPR000674 (Ald Xan dh C) |
| | IPR001472 (NLS BP) |
| hP1-10-015 | HUMAN PANTHER CLASSIFICATIONS |
| (SEQ ID NO: 979) | FAMILY (SUBFAMILY) |
| | ARP2/3 COMPLEX 34 KD SUBUNIT-RELATED (ARP2/3 COMPLEX |
| | 34 KD SUBUNIT-RELATED) |
| | MOLECULAR FUNCTIONS |
| | CYTOSKELETAL PROTEIN > ACTIN FAMILY CYTOSKELETAL |
| | PROTEIN > NON-MOTOR ACTIN BINDING PROTEIN |
| | BIOLOGICAL PROCESS |
| | CELL STRUCTURE AND MOTILITY > CELL MOTILITY |
| | CELL STRUCTURE AND MOTILITY > CELL STRUCTURE |
| | HUMAN GENE ONTOLOGY |
| | PROCESS |
| | cell growth and maintenance > cell motility |
| | cytoplasm organization and biogenesis > organelle organization and |
| | biogenesis |
| | GO biological process > cell growth and maintenance |
| | FUNCTION |
| | protein binding > actin binding |
| | LOCATION |
| | cytoskeleton > actin cytoskeleton |
| | HUMAN PROTEIN DOMAINS (INTERPRO SIGNATURES) |
| | No Domain Hit |
| hP2-10-015 | HUMAN PANTHER CLASSIFICATIONS |
| (SEQ ID NO: 981) | FAMILY (SUBFAMILY) |
| | ARP2/3 COMPLEX 34 KD SUBUNIT-RELATED (ARP2/3 COMPLEX |
| | 34 KD SUBUNIT-RELATED) |
| | MOLECULAR FUNCTIONS |
| | CYTOSKELETAL PROTEIN > ACTIN FAMILY CYTOSKELETAL |
| | PROTEIN > NON-MOTOR ACTIN BINDING PROTEIN |
| | BIOLOGICAL PROCESS |
| | CELL STRUCTURE AND MOTILITY > CELL MOTILITY |
| | CELL STRUCTURE AND MOTILITY > CELL STRUCTURE |
| | HUMAN GENE ONTOLOGY |
| | PROCESS |
| | cell growth and maintenance > cell motility |
| | cytoplasm organization and biogenesis > organelle organization and |
| | biogenesis |
| | GO biological process > cell growth and maintenance |
| | FUNCTION |
| | protein binding > actin binding |
| | LOCATION |
| | cytoskeleton > actin cytoskeleton |
| | HUMAN PROTEIN DOMAINS (INTERPRO SIGNATURES) |
| | No Domain Hit |
| hP3-10-015 | HUMAN PANTHER CLASSIFICATIONS |
| (SEQ ID NO: 596) | FAMILY (SUBFAMILY) |
| | ARP2/3 COMPLEX 34 KD SUBUNIT-RELATED(ARP2/3 COMPLEX |
| | 34 KD SUBUNIT-RELATED) |
| | MOLECULAR FUNCTIONS |
| | CYTOSKELETAL PROTEIN > ACTIN FAMILY CYTOSKELETAL |
| | PROTEIN > NON-MOTOR ACTIN BINDING PROTEIN |
| | BIOLOGICAL PROCESS |
| | CELL STRUCTURE AND MOTILITY > CELL MOTILITY |
| | CELL STRUCTURE AND MOTILITY > CELL STRUCTURE |
| | HUMAN GENE ONTOLOGY |
| | PROCESS |
| | cell growth and maintenance > cell motility |
| | cytoplasm organization and biogenesis > organelle organization and |
| | biogenesis |
| | GO biological process > cell growth and maintenance |
| | FUNCTION |
| | protein binding > actin binding |
| | LOCATION |
| | cytoskeleton > actin cytoskeleton |
| | HUMAN PROTEIN DOMAINS (INTERPRO SIGNATURES) |
| | No Domain Hit |
| hP10-016 | HUMAN PANTHER CLASSIFICATIONS |
| (SEQ ID NO: 602) | FAMILY (SUBFAMILY) |
| | WD DOMAIN-CONTAINING PROTEINHUMAN GENE ONTOLOGY |
| | PROCESS |
| | cell communication > signal transduction |
| | proteolysis and peptidolysis > ubiquitin-dependent protein degradation |
| | cell growth and maintenance > cell motility |
| | ectoderm development > neurogenesis |
| | nucleotide metabolism > lipid metabolism |
| | FUNCTION |
| | heterotrimeric G-protein GTPase > heterotrimeric G-protein GTPase, |
| | alpha-subunit |
| | DNA binding > transcription factor |
| | small protein conjugating enzyme > ubiquitin conjugating enzyme |
| | enzyme > 2-acetyl-1-alkylglycerophosphocholine esterase |
| | heterotrimeric G-protein GTPase > heterotrimeric G-protein GTPase, beta- |
| | subunit |
| | LOCATION |
| | plasma membrane > peripheral plasma membrane protein |
| | cell > cytoplasm |
| | cytoplasm > endoplasmic reticulum |
| | cell > nucleus |
| | mitochondrial membrane > mitochondrial outer membrane |
| | HUMAN PROTEIN DOMAINS (INTERPRO SIGNATURES) |
| | IPR001680 (GPROTEINBRPT) |
| | IPR001680 (WD40) |
| | IPR000306 (FYVE) |
| | IPR001680 (WD40) |
| | IPR000306 (FYVE) |
| | IPR000306 (FYVE DOMAIN) |
| | IPR001680 (WD REPEATS 2 3) |
| | IPR001680 (WD REPEATS REGION) |
| | IPR001680 (WD REPEATS 1) |
| hP10-017 | HUMAN PANTHER CLASSIFICATIONS |
| (SEQ ID NO: 608) | No Panther Hit |
| | HUMAN GENE ONTOLOGY |
| | FUNCTION |
| | glucosidase > mannosyl-oligosaccharide glucosidase (processing A- |
| | glucosidase I) |
| | LOCATION |
| | mitochondrial membrane > mitochondrial inner membrane |
| | HUMAN PROTEIN DOMAINS (INTERPRO SIGNATURES) |
| | IPR002665 (MgtE) |
| hP1-10-019 | HUMAN PANTHER CLASSIFICATIONS |
| (SEQ ID NO: 614) | No Panther Hit |
| | HUMAN GENE ONTOLOGY |
| | No Gene Ontology |
| | HUMAN PROTEIN DOMAINS (INTERPRO SIGNATURES) |
| | No Domain Hit |
| hP2-10-019 | HUMAN PANTHER CLASSIFICATIONS |
| (SEQ ID NO: 616) | No Panther Hit |
| | HUMAN GENE ONTOLOGY |
| | No Gene Ontology |
| | HUMAN PROTEIN DOMAINS (INTERPRO SIGNATURES) |
| | No Domain Hit |
| hP1-10-020 | HUMAN PANTHER CLASSIFICATIONS |
| (SEQ ID NO: 622) | FAMILY (SUBFAMILY) |
| | LAMININ-RELATED HUMAN GENE ONTOLOGY |
| | PROCESS |
| | GO biological process > cell communication |
| | FUNCTION |
| | GO molecular function > enzyme inhibitor |
| | LOCATION |
| | cell > cytoplasm |
| | HUMAN PROTEIN DOMAINS (INTERPRO SIGNATURES) |
| | IPR001472 (NLS BP) |
| hP2-10-020 | HUMAN PANTHER CLASSIFICATIONS |
| (SEQ ID NO: 624) | FAMILY (SUBFAMILY) |
| | LAMININ-RELATEDHUMAN GENE ONTOLOGY |
| | PROCESS |
| | GO biological process > cell communication |
| | FUNCTION |
| | GO molecular function > enzyme inhibitor |
| | LOCATION |
| | cell > cytoplasm |
| | HUMAN PROTEIN DOMAINS (INTERPRO SIGNATURES) |
| | IPR001472 (NLS BP) |
| hP10-021 | HUMAN PANTHER CLASSIFICATIONS |
| (SEQ ID NO: 630) | FAMILY (SUBFAMILY) |
| | MUCIN-RELATEDHUMAN GENE ONTOLOGY |
| | PROCESS |
| | cell motility > muscle contraction |
| | lipid metabolism > membrane lipid metabolism |
| | FUNCTION |
| | major histocompatibility complex antigen > MHC-interacting protein |
| | glucosidase > glucan 1,4-alpha-glucosidase |
| | LOCATION |
| | nuclear membrane > nuclear membrane lumen |
| | cytoplasm > vacuole |
| | HUMAN PROTEIN DOMAINS (INTERPRO SIGNATURES) |
| | NULL (ARG RICH) |
| | NULL (ALA RICH) |
| | IPR000694 (PRO RICH 3) |
| | NULL (GLU RICH) |
| | NULL (GLN RICH 2) |
| | IPR001472 (NLS BP 5) |
| hP10-022 | HUMAN PANTHER CLASSIFICATIONS |
| (SEQ ID NO: 636) | No Panther Hit |
| | HUMAN GENE ONTOLOGY |
| | PROCESS |
| | transcription, DNA-dependent > transcription regulation |
| | transcription regulation > transcription regulation from Pol II promoter |
| | GO biological process > developmental processes |
| | cell growth and maintenance > cell proliferation |
| | FUNCTION |
| | transcription factor > RNA polymerase II transcription factor |
| | LOCATION |
| | nucleoplasm > transcription factor complex |
| | endoplasmic reticulum > endoplasmic reticulum lumen |
| | HUMAN PROTEIN DOMAINS (INTERPRO SIGNATURES) |
| | No Domain Hit |
| hP1-10-023 | HUMAN PANTHER CLASSIFICATIONS |
| (SEQ ID NO: 642) | No Panther Hit |
| | HUMAN GENE ONTOLOGY |
| | PROCESS |
| | nucleotide metabolism > protein metabolism and modification |
| | LOCATION |
| | endoplasmic reticulum > endoplasmic reticulum lumen |
| | HUMAN PROTEIN DOMAINS (INTERPRO SIGNATURES) |
| | IPR001472 (NLS BP 2) |
| hP2-10-023 | HUMAN PANTHER CLASSIFICATIONS |
| (SEQ ID NO: 644) | No Panther Hit |
| | HUMAN GENE ONTOLOGY |
| | PROCESS |
| | nucleotide metabolism > protein metabolism and modification |
| | LOCATION |
| | endoplasmic reticulum > endoplasmic reticulum lumen |
| | HUMAN PROTEIN DOMAINS (INTERPRO SIGNATURES) |
| | No Domain Hit |
| hP10-026 | HUMAN PANTHER CLASSIFICATIONS |
| (SEQ ID NO: 650) | No Panther Hit |
| | HUMAN GENE ONTOLOGY |
| | PROCESS |
| | chromatin silencing > chromatin silencing at ribosomal DNA (rDNA) |
| | cytoplasm organization and biogenesis > organelle organization and |
| | biogenesis |
| | FUNCTION |
| | DNA binding > ribosomal DNA (rDNA) binding |
| | LOCATION |
| | cell > membrane fraction |
| | HUMAN PROTEIN DOMAINS (INTERPRO SIGNATURES) |
| | No Domain Hit |
| hP1-10-027 | HUMAN PANTHER CLASSIFICATIONS |
| (SEQ ID NO: 656) | FAMILY (SUBFAMILY) |
| | STEROL REDUCTASE-RELATED (LAMIN B RECEPTOR) |
| | MOLECULAR FUNCTIONS |
| | NUCLEIC ACID BINDING > CHROMATIN/CHROMATIN-BINDING |
| | PROTEIN |
| | CYTOSKELETAL PROTEIN > OTHER CYTOSKELETAL PROTEINS |
| | BIOLOGICAL PROCESS |
| | CELL STRUCTURE AND MOTILITY > CELL STRUCTURE |
| | HUMAN GENE ONTOLOGY |
| | PROCESS |
| | peptidoglycan catabolism > ergosterol biosynthesis |
| | ergosterol metabolism |
| | peptidoglycan catabolism > ergosterol biosynthesis |
| | cholesterol metabolism |
| | steroid metabolism > cholesterol metabolism |
| | nucleotide metabolism > lipid metabolism |
| | FUNCTION |
| | protein binding > lamin binding |
| | nucleic acid binding > DNA binding |
| | enzyme > C-14 sterol reductase |
| | steroid binding > cholesterol binding |
| | enzyme > sterol C-24(28) reductase |
| | LOCATION |
| | nuclear inner membrane > nuclear inner membrane, integral protein |
| | cell > membrane fraction |
| | cytoplasm > endoplasmic reticulum |
| | plasma membrane > integral plasma membrane protein |
| | HUMAN PROTEIN DOMAINS (INTERPRO SIGNATURES) |
| | IPR002999 (TUDOR) |
| | IPR001171 (ERG4 ERG24) |
| | IPR001472 (NLS BP 2) |
| | IPR001171 (ERG4 ERG24 1) |
| | IPR001171 (ERG4 ERG24 2) |
| hP2-10-027 | HUMAN PANTHER CLASSIFICATIONS |
| (SEQ ID NO: 658) | FAMILY (SUBFAMILY) |
| | STEROL REDUCTASE-RELATED(LAMIN B RECEPTOR) |
| | MOLECULAR FUNCTIONS |
| | NUCLEIC ACID BINDING > CHROMATIN/CHROMATIN-BINDING |
| | PROTEIN |
| | CYTOSKELETAL PROTEIN > OTHER CYTOSKELETAL PROTEINS |
| | BIOLOGICAL PROCESS |
| | CELL STRUCTURE AND MOTILITY > CELL STRUCTURE |
| | HUMAN GENE ONTOLOGY |
| | PROCESS |
| | peptidoglycan catabolism > ergosterol biosynthesis |
| | ergosterol metabolism |
| | peptidoglycan catabolism > ergosterol biosynthesis |
| | cholesterol metabolism |
| | steroid metabolism > cholesterol metabolism |
| | nucleotide metabolism > lipid metabolism |
| | FUNCTION |
| | protein binding > lamin binding |
| | nucleic acid binding > DNA binding |
| | enzyme > C-14 sterol reductase |
| | steroid binding > cholesterol binding |
| | enzyme > sterol C-24(28) reductase |
| | LOCATION |
| | nuclear inner membrane > nuclear inner membrane, integral protein |
| | cell > membrane fraction |
| | cytoplasm > endoplasmic reticulum |
| | plasma membrane > integral plasma membrane protein |
| | HUMAN PROTEIN DOMAINS (INTERPRO SIGNATURES) |
| | IPR002999 (TUDOR) |
| | IPR001171 (ERG4 ERG24) |
| | IPR001472 (NLS BP 2) |
| | IPR001171 (ERG4 ERG24 1) |
| | IPR001171 (ERG4 ERG24 2) |
| hP1-10-028 | HUMAN PANTHER CLASSIFICATIONS |
| (SEQ ID NO: 666) | FAMILY (SUBFAMILY) |
| | VASODILATOR-STIMULATED PHOSPHOPROTEIN-RELATED |
| | (VASODILATOR-STIMULATED PHOSPHOPROTEIN-RELATED) |
| | MOLECULAR FUNCTIONS |
| | CYTOSKELETAL PROTEIN > ACTIN FAMILY CYTOSKELETAL |
| | PROTEIN > NON-MOTOR ACTIN BINDING PROTEIN |
| | BIOLOGICAL PROCESS |
| | BIOLOGICAL PROCESS UNCLASSIFIED |
| | HUMAN GENE ONTOLOGY |
| | PROCESS |
| | peptidoglycan catabolism > actin filament organization |
| | actin modification |
| | glutamate signaling pathway > metabotrophic glutamate receptor signaling |
| | pathway |
| | cell growth and maintenance > cell shape and cell size control |
| | cell growth and maintenance > cell shape and cell size control |
| | steroid metabolism > mineralcorticoid metabolism |
| | FUNCTION |
| | protein binding > actin binding |
| | ligand binding or carrier > protein binding |
| | LOCATION |
| | cell-substrate adherens junction > focal adhesion |
| | integral plasma membrane protein > integral plasma membrane |
| | proteoglycan |
| | nuclear membrane > nuclear membrane lumen |
| | cytoskeleton > actin cytoskeleton |
| | HUMAN PROTEIN DOMAINS (INTERPRO SIGNATURES) |
| | IPR002965 (PRICHEXTENSN) |
| | IPR001960 (WH1) |
| | IPR001960 (WH1) |
| | NULL (ARG RICH) |
| | IPR000697 (RANBP1 WASP) |
| | IPR000694 (PRO RICH) |
| | NULL (GLU RICH) |
| hP2-10-028 | HUMAN PANTHER CLASSIFICATIONS |
| (SEQ ID NO: 668) | FAMILY (SUBFAMILY) |
| | VASODILATOR-STIMULATED PHOSPHOPROTEIN- |
| | RELATED(VASODILATOR-STIMULATED PHOSPHOPROTEIN-RELATED) |
| | MOLECULAR FUNCTIONS |
| | CYTOSKELETAL PROTEIN > ACTIN FAMILY CYTOSKELETAL |
| | PROTEIN > NON-MOTOR ACTIN BINDING PROTEIN |
| | BIOLOGICAL PROCESS |
| | BIOLOGICAL PROCESS UNCLASSIFIED |
| | HUMAN GENE ONTOLOGY |
| | PROCESS |
| | peptidoglycan catabolism > actin filament organization |
| | actin modification |
| | glutamate signaling pathway > metabotrophic glutamate receptor signaling |
| | pathway |
| | cell growth and maintenance > cell shape and cell size control |
| | cell growth and maintenance > cell shape and cell size control |
| | steroid metabolism > mineralcorticoid metabolism |
| | FUNCTION |
| | protein binding > actin binding |
| | ligand binding or carrier > protein binding |
| | LOCATION |
| | cell-substrate adherens junction > focal adhesion |
| | integral plasma membrane protein > integral plasma membrane |
| | proteoglycan |
| | nuclear membrane > nuclear membrane lumen |
| | cytoskeleton > actin cytoskeleton |
| | HUMAN PROTEIN DOMAINS (INTERPRO SIGNATURES) |
| | IPR002965 (PRICHEXTENSN) |
| | IPR001960 (WH1) |
| | IPR001960 (WH1) |
| | NULL (ARG RICH) |
| | IPR000697 (RANBP1 WASP) |
| | IPR000694 (PRO RICH) |
| | NULL (GLU RICH) |
| hP1-10-029 | HUMAN PANTHER CLASSIFICATIONS |
| (SEQ ID NO: 674) | FAMILY (SUBFAMILY) |
| | WD DOMAIN-CONTAINING PROTEINHUMAN GENE ONTOLOGY |
| | PROCESS |
| | transcription from mitochondrial promoter > RNA transcription termination |
| | from mitochondrial promoter |
| | cell growth and maintenance > cell motility |
| | cell surface receptor linked signal transduction > G protein linked receptor |
| | protein signaling pathway |
| | cell proliferation > negative control of cell proliferation |
| | ectoderm development > neurogenesis |
| | FUNCTION |
| | enzyme > N-acetylglucosamine-6-phosphate deacetylase |
| | heterotrimeric G-protein GTPase > heterotrimeric G-protein GTPase, beta- |
| | subunit |
| | enzyme > 2-acetyl-1-alkylglycerophosphocholine esterase |
| | GO molecular function > chaperone |
| | heterotrimeric G-protein GTPase > heterotrimeric G-protein GTPase, |
| | alpha-subunit |
| | LOCATION |
| | nuclear membrane > nuclear membrane lumen |
| | cell > nucleus |
| | plasma membrane > peripheral plasma membrane protein |
| | cytosol > heterotrimeric G-protein complex |
| | cell > cytoplasm |
| | HUMAN PROTEIN DOMAINS (INTERPRO SIGNATURES) |
| | IPR001680 (GPROTEINBRPT) |
| | IPR001680 (WD40) |
| | IPR001680 (WD40) |
| | IPR001680 (WD REPEATS 2 4) |
| | IPR001680 (WD REPEATS REGION) |
| | IPR001680 (WD REPEATS 1) |
| hP2-10-029 | HUMAN PANTHER CLASSIFICATIONS |
| (SEQ ID NO: 676) | No Panther Hit |
| | HUMAN GENE ONTOLOGY |
| | PROCESS |
| | transcription from mitochondrial promoter > RNA transcription termination |
| | from mitochondrial promoter |
| | FUNCTION |
| | enzyme > N-acetylglucosamine-6-phosphate deacetylase |
| | LOCATION |
| | nuclear membrane > nuclear membrane lumen |
| | HUMAN PROTEIN DOMAINS (INTERPRO SIGNATURES) |
| | No Domain Hit |
| hP1-10-031 | HUMAN PANTHER CLASSIFICATIONS |
| (SEQ ID NO: 682) | No Panther Hit |
| | HUMAN GENE ONTOLOGY |
| | FUNCTION |
| | monocarboxylic acid transporter > mevalonate transporter |
| | DNA-directed DNA polymerase > iota DNA polymerase |
| | LOCATION |
| | nuclear membrane > nuclear membrane lumen |
| | HUMAN PROTEIN DOMAINS (INTERPRO SIGNATURES) |
| | IPR001472 (NLS BP) |
| hP2-10-031 | HUMAN PANTHER CLASSIFICATIONS |
| (SEQ ID NO: 684) | No Panther Hit |
| | HUMAN GENE ONTOLOGY |
| | FUNCTION |
| | monocarboxylic acid transporter > mevalonate transporter |
| | DNA-directed DNA polymerase > iota DNA polymerase |
| | LOCATION |
| | nuclear membrane > nuclear membrane lumen |
| | HUMAN PROTEIN DOMAINS (INTERPRO SIGNATURES) |
| | IPR001472 (NLS BP) |
| hP3-10-031 | HUMAN PANTHER CLASSIFICATIONS |
| (SEQ ID NO: 686) | No Panther Hit |
| | HUMAN GENE ONTOLOGY |
| | FUNCTION |
| | monocarboxylic acid transporter > mevalonate transporter |
| | DNA-directed DNA polymerase > iota DNA polymerase |
| | LOCATION |
| | nuclear membrane > nuclear membrane lumen |
| | HUMAN PROTEIN DOMAINS (INTERPRO SIGNATURES) |
| | IPR001472 (NLS BP) |
| hP4-10-031 | HUMAN PANTHER CLASSIFICATIONS |
| (SEQ ID NO: 688) | No Panther Hit |
| | HUMAN GENE ONTOLOGY |
| | FUNCTION |
| | monocarboxylic acid transporter > mevalonate transporter |
| | DNA-directed DNA polymerase > iota DNA polymerase |
| | LOCATION |
| | nuclear membrane > nuclear membrane lumen |
| | HUMAN PROTEIN DOMAINS (INTERPRO SIGNATURES) |
| | IPR001472 (NLS BP) |
| hP10-032 | HUMAN PANTHER CLASSIFICATIONS |
| (SEQ ID NO: 694) | FAMILY (SUBFAMILY) |
| | ANKYRIN-RELATEDHUMAN GENE ONTOLOGY |
| | PROCESS |
| | actin modification > cytoskeletal anchoring |
| | muscle contraction > muscle contraction regulation |
| | cell communication > signal transduction |
| | induction of apoptosis by extracellular signals > induction of apoptosis via |
| | death domain receptors |
| | cell surface receptor linked signal transduction > integrin receptor signal |
| | signaling pathway |
| | FUNCTION |
| | enzyme > NAD(+) ADP-ribosyltransferase |
| | protein binding > calmodulin binding |
| | cysteine-type endopeptidase > caspase |
| | transcription factor > transcription activating factor |
| | GO molecular function > enzyme activator |
| | LOCATION |
| | cytoskeleton > actin cytoskeleton |
| | cell > cytoplasm |
| | cytoplasm > cytoskeleton |
| | cell > plasma membrane |
| | cytoplasm > peroxisome |
| | HUMAN PROTEIN DOMAINS (INTERPRO SIGNATURES) |
| | IPR002110 (ANK) |
| | IPR002110 (ank) |
| | IPR002110 (ANK REPEAT 2) |
| | IPR002110 (ANK REP REGION) |
| hP10-033 | HUMAN PANTHER CLASSIFICATIONS |
| (SEQ ID NO: 700) | FAMILY (SUBFAMILY) |
| | COILED-COIL PROTEINHUMAN GENE ONTOLOGY |
| | PROCESS |
| | neurogenesis > central nervous system development |
| | peptidoglycan catabolism > cell cycle arrest |
| | pheromone response |
| | cell cycle |
| | peptidoglycan catabolism > cell cycle arrest |
| | cytoskeleton organization and biogenesis |
| | transcription, DNA-dependent > transcription regulation |
| | microtubule-based process |
| | nuclear congression |
| | peptidoglycan catabolism > cell cycle arrest |
| | cell cycle control |
| | FUNCTION |
| | enzyme > nitric oxide synthase |
| | ligand binding or carrier > protein binding |
| | GO molecular function > cell cycle regulator |
| | DNA binding > transcription factor |
| | nucleotide binding > ATP binding |
| | LOCATION |
| | nucleus > nuclear membrane |
| | GO cellular component > extracellular |
| | mitochondrial membrane > mitochondrial inner membrane |
| | cytoskeleton > actin cytoskeleton |
| | extracellular > extracellular space |
| | HUMAN PROTEIN DOMAINS (INTERPRO SIGNATURES) |
| | IPR001452 (SH3) |
| | IPR001060 (FCH) |
| | IPR001452 (SH3) |
| | IPR001060 (FCH) |
| | IPR001452 (SH3) |
| | IPR001060 (CDC15 NT) |
| hP10-034 | HUMAN PANTHER CLASSIFICATIONS |
| (SEQ ID NO: 706) | FAMILY (SUBFAMILY) |
| | GALACTOSAMINYLTRANSFERASE-RELATED(N- |
| | ACETYLLACTOSAMINIDE ALPHA-1,3-GALACTOSYLTRANSFERASE) |
| | MOLECULAR FUNCTIONS |
| | TRANSFERASE > GLYCOSYLTRANSFERASE |
| | BIOLOGICAL PROCESS |
| | CARBOHYDRATE METABOLISM > OTHER POLYSACCHARIDE |
| | METABOLISM |
| | PROTEIN METABOLISM AND MODIFICATION > PROTEIN |
| | MODIFICATION > PROTEIN GLYCOSYLATION |
| | HUMAN GENE ONTOLOGY |
| | FUNCTION |
| | galactosyltransferase > N-acetyllactosaminide alpha-1,3- |
| | galactosyltransferase |
| | galactosyltransferase > N-acetyllactosaminide alpha-1,3- |
| | galactosyltransferase |
| | blood group antigen |
| | enzyme > glycoprotein-fucosylgalactoside alpha-N- |
| | acetylgalactosaminyltransferase |
| | acetylgalactosaminyltransferase |
| | LOCATION |
| | cytoplasm > Golgi apparatus |
| | cell > membrane fraction |
| | HUMAN PROTEIN DOMAINS (INTERPRO SIGNATURES) |
| | No Domain Hit |
| hP10-035 | HUMAN PANTHER CLASSIFICATIONS |
| (SEQ ID NO: 712) | FAMILY (SUBFAMILY) |
| | KINESIN-RELATED(KINESIN HEAVY CHAIN) |
| | MOLECULAR FUNCTIONS |
| | CYTOSKELETAL PROTEIN > MICROTUBULE FAMILY |
| | CYTOSKELETAL PROTEIN > MICROTUBULE BINDING MOTOR PROTEIN |
| | BIOLOGICAL PROCESS |
| | INTRACELLULAR PROTEIN TRAFFIC > GENERAL VESICLE |
| | TRANSPORT |
| | HUMAN GENE ONTOLOGY |
| | PROCESS |
| | cytoskeleton organization and biogenesis > microtubule-based process |
| | axon cargo transport > anterograde axon cargo transport |
| | microtubule-based process |
| | nuclear congression |
| | peptidoglycan catabolism > microtubule-based movement |
| | M phase > mitosis |
| | intracellular protein traffic > non-selective vesicle transport |
| | FUNCTION |
| | GO molecular function > motor |
| | nucleotide binding > ATP binding |
| | microtubule binding |
| | motor > microtubule motor |
| | enzyme > adenosinetriphosphatase |
| | adenosinetriphosphatase > plus-end-directed kinesin ATPase |
| | LOCATION |
| | microtubule cytoskeleton > microtubule associated protein |
| | cell wall > kinesin |
| | microtubule cytoskeleton > microtubule associated protein |
| | kinesin > plus-end kinesin |
| | cell > membrane fraction |
| | spindle > spindle microtubule |
| | microtubule |
| | HUMAN PROTEIN DOMAINS (INTERPRO SIGNATURES) |
| | IPR001752 (KINESINHEAVY) |
| | IPR001752 (KISc) |
| | IPR001752 (kinesin) |
| | IPR001752 (KINESIN MOTOR DOMAIN2) |
| | IPR001752 (KINESIN MOTOR DOMAIN1) |
| | IPR001687 (ATP GTP A) |
| hP1-10-026 | HUMAN PANTHER CLASSIFICATIONS |
| (SEQ ID NO: 718) | FAMILY (SUBFAMILY) |
| | RAS-RELATED FAMILIES ARF AND RAB (ADP-RIBOSYLATION |
| | FACTOR) |
| | MOLECULAR FUNCTIONS |
| | SELECT REGULATORY MOLECULE > G-PROTEIN > SMALL |
| | GTPASE |
| | BIOLOGICAL PROCESS |
| | SIGNAL TRANSDUCTION > CELL SURFACE RECEPTOR |
| | MEDIATED SIGNAL TRANSDUCTION |
| | INTRACELLULAR PROTEIN TRAFFIC > GENERAL VESICLE |
| | TRANSPORT |
| | HUMAN GENE ONTOLOGY |
| | PROCESS |
| | cell growth and maintenance > intracellular protein traffic |
| | N-terminal fatty acid:protein modification > protein myristylation |
| | non-selective vesicle transport > vesicle assembly |
| | endocytosis |
| | peptidoglycan catabolism > synaptic vesicle endocytosis |
| | intracellular protein traffic > non-selective vesicle transport |
| | FUNCTION |
| | nucleotide binding > GTP binding |
| | small monomeric GTPase > ARF small monomeric GTPase |
| | heterotrimeric G-protein GTPase > heterotrimeric G-protein GTPase, |
| | alpha-subunit |
| | enzyme > GTPase |
| | GTP binding |
| | GO molecular function > enzyme activator |
| | LOCATION |
| | cytoplasm > Golgi apparatus |
| | cell > plasma membrane |
| | Golgi apparatus > Golgi vesicle |
| | cell > nucleus |
| | cytoplasm > endoplasmic reticulum |
| | HUMAN PROTEIN DOMAINS (INTERPRO SIGNATURES) |
| | IPR002046 (SAR1GTPBP) |
| | IPR001806 (RASTRNSFRMNG) |
| | IPR002046 (SAR) |
| | IPR003579 (RAB) |
| | IPR000251 (ARF) |
| | IPR000251 (arf) |
| | IPR000251 (ARF) |
| | IPR001687 (ATP GTP A) |
| hP2-10-036 | HUMAN PANTHER CLASSIFICATIONS |
| (SEQ ID NO: 720) | FAMILY (SUBFAMILY) |
| | RAS-RELATED FAMILIES ARF AND RAB (ADP-RIBOSYLATION |
| | FACTOR) |
| | MOLECULAR FUNCTIONS |
| | SELECT REGULATORY MOLECULE > G-PROTEIN > SMALL |
| | GTPASE |
| | BIOLOGICAL PROCESS |
| | SIGNAL TRANSDUCTION > CELL SURFACE RECEPTOR |
| | MEDIATED SIGNAL TRANSDUCTION |
| | INTRACELLULAR PROTEIN TRAFFIC > GENERAL VESICLE |
| | TRANSPORT |
| | HUMAN GENE ONTOLOGY |
| | PROCESS |
| | cell growth and maintenance > intracellular protein traffic |
| | N-terminal fatty acid:protein modification > protein myristylation |
| | non-selective vesicle transport > vesicle assembly |
| | endocytosis |
| | peptidoglycan catabolism > synaptic vesicle endocytosis |
| | intracellular protein traffic > non-selective vesicle transport |
| | FUNCTION |
| | nucleotide binding > GTP binding |
| | small monomeric GTPase > ARF small monomeric GTPase |
| | heterotrimeric G-protein GTPase > heterotrimeric G-protein GTPase, |
| | alpha-subunit |
| | enzyme > GTPase |
| | GTP binding |
| | GO molecular function > enzyme activator |
| | LOCATION |
| | cytoplasm > Golgi apparatus |
| | cell > plasma membrane |
| | Golgi apparatus > Golgi vesicle |
| | cell > nucleus |
| | cell > membrane fraction |
| | HUMAN PROTEIN DOMAINS (INTERPRO SIGNATURES) |
| | IPR000251 (ARF) |
| | IPR001687 (ATP GTP A) |
| hP3-10-036 | HUMAN PANTHER CLASSIFICATIONS |
| (SEQ ID NO: 722) | FAMILY (SUBFAMILY) |
| | RAS-RELATED FAMILIES ARF AND RAB(ADP-RIBOSYLATION |
| | FACTOR) |
| | MOLECULAR FUNCTIONS |
| | SELECT REGULATORY MOLECULE > G-PROTEIN > SMALL |
| | GTPASE |
| | BIOLOGICAL PROCESS |
| | SIGNAL TRANSDUCTION > CELL SURFACE RECEPTOR |
| | MEDIATED SIGNAL TRANSDUCTION |
| | INTRACELLULAR PROTEIN TRAFFIC > GENERAL VESICLE |
| | TRANSPORT |
| | HUMAN GENE ONTOLOGY |
| | PROCESS |
| | cell growth and maintenance > intracellular protein traffic |
| | N-terminal fatty acid:protein modification > protein myristylation |
| | non-selective vesicle transport > vesicle assembly |
| | endocytosis |
| | peptidoglycan catabolism > synaptic vesicle endocytosis |
| | intracellular protein traffic > non-selective vesicle transport |
| | FUNCTION |
| | nucleotide binding > GTP binding |
| | small monomeric GTPase > ARF small monomeric GTPase |
| | heterotrimeric G-protein GTPase > heterotrimeric G-protein GTPase, |
| | alpha-subunit |
| | enzyme > GTPase |
| | GTP binding |
| | GO molecular function > enzyme activator |
| | LOCATION |
| | cytoplasm > Golgi apparatus |
| | cell > plasma membrane |
| | Golgi apparatus > Golgi vesicle |
| | cell > nucleus |
| | cytoplasm > endoplasmic reticulum |
| | HUMAN PROTEIN DOMAINS (INTERPRO SIGNATURES) |
| | IPR002046 (SAR1GTPBP) |
| | IPR001806 (RASTRNSFRMNG) |
| | IPR002046 (SAR) |
| | IPR003579 (RAB) |
| | IPR000251 (ARF) |
| | IPR000251 (arf) |
| | IPR000251 (ARF) |
| | IPR001687 (ATP GTP A) |
| hP10-039 | HUMAN PANTHER CLASSIFICATIONS |
| (SEQ ID NO: 728) | FAMILY (SUBFAMILY) |
| | TRANSCRIPTION FACTOR ETS-RELATED(ETS-RELATED |
| | PROTEIN) |
| | MOLECULAR FUNCTIONS |
| | TRANSCRIPTION FACTOR > OTHER TRANSCRIPTION FACTOR |
| | BIOLOGICAL PROCESS |
| | ONCOGENESIS > ONCOGENE |
| | HUMAN GENE ONTOLOGY |
| | PROCESS |
| | transcription, DNA-dependent > transcription regulation |
| | transcription, DNA-dependent > transcription from Pol II promoter |
| | cell growth and maintenance > cell proliferation |
| | GO biological process > developmental processes |
| | developmental processes > embryogenesis and morphogenesis |
| | FUNCTION |
| | DNA binding > transcription factor |
| | transcription factor > transcription activating factor |
| | nucleic acid binding > DNA binding |
| | RNA polymerase II transcription factor > specific RNA polymerase II |
| | transcription factor |
| | GO molecular function > cell cycle regulator |
| | LOCATION |
| | cell > nucleus |
| | nuclear membrane > nuclear membrane lumen |
| | nucleoplasm > transcription factor complex |
| | GO cellular component > intracellular |
| | HUMAN PROTEIN DOMAINS (INTERPRO SIGNATURES) |
| | IPR000418 (ETSDOMAIN) |
| | IPR000418 (ETS) |
| | IPR003118 (SAM PNT) |
| | IPR000418 (Ets) |
| | IPR003118 (SAM PNT) |
| | IPR002341 (HSF ETS) |
| | IPR000418 (ETS DOMAIN 3) |
| hP1-10-041 | HUMAN PANTHER CLASSIFICATIONS |
| (SEQ ID NO: 734) | FAMILY (SUBFAMILY) |
| | CATION-TRANSPORTING ATPASE(PHOSPHOLIPID- |
| | TRANSPORTING ATPASE-RELATED) |
| | HUMAN GENE ONTOLOGY |
| | PROCESS |
| | ion transport > cation transport |
| | nucleotide metabolism > lipid metabolism |
| | monocarboxylic acid transport > bile acid transport |
| | monovalent inorganic cation transport > potassium transport |
| | monovalent inorganic cation transport > hydrogen transport |
| | FUNCTION |
| | nucleotide binding > ATP binding |
| | obsolete |
| | adenosinetriphosphatase > plasma membrane cation-transporting ATPase |
| | protein binding > calmodulin binding |
| | enzyme > adenosinetriphosphatase |
| | P-type ATPase |
| | calcium ion transporter |
| | adenosinetriphosphatase > plasma membrane cation-transporting ATPase |
| | LOCATION |
| | cell > membrane fraction |
| | plasma membrane > integral plasma membrane protein |
| | cell > plasma membrane |
| | Golgi apparatus > Golgi membrane |
| | cytoplasm > endoplasmic reticulum |
| | HUMAN PROTEIN DOMAINS (INTERPRO SIGNATURES) |
| | No Domain Hit |
| hP2-10-041 | HUMAN PANTHER CLASSIFICATIONS |
| (SEQ ID NO: 737) | No Panther Hit |
| | HUMAN GENE ONTOLOGY |
| | PROCESS |
| | ion transport > cation transport |
| | nucleotide metabolism > lipid metabolism |
| | monocarboxylic acid transport > bile acid transport |
| | metabolism > carbohydrate metabolism |
| | monovalent inorganic cation transport > potassium transport |
| | FUNCTION |
| | nucleotide binding > ATP binding |
| | obsolete |
| | adenosinetriphosphatase > plasma membrane cation-transporting ATPase |
| | aminophospholipid transporter |
| | P-type ATPase |
| | adenosinetriphosphatase > plasma membrane cation-transporting ATPase |
| | GO molecular function > enzyme |
| | enzyme > adenosinetriphosphatase |
| | LOCATION |
| | cell > membrane fraction |
| | plasma membrane > integral plasma membrane protein |
| | Golgi apparatus > Golgi membrane |
| | cytoplasm > endoplasmic reticulum |
| | HUMAN PROTEIN DOMAINS (INTERPRO SIGNATURES) |
| | No Domain Hit |
| hP10-042 | HUMAN PANTHER CLASSIFICATIONS |
| (SEQ ID NO: 743) | FAMILY (SUBFAMILY) |
| | BCL-2 FAMILY MEMBER(APOPTOSIS REGULATOR BCL-X) |
| | MOLECULAR FUNCTIONS |
| | MISCELLANEOUS FUNCTION > OTHER MISCELLANEOUS |
| | FUNCTION PROTEIN |
| | BIOLOGICAL PROCESS |
| | ONCOGENESIS > ONCOGENE |
| | DEVELOPMENTAL PROCESSES > GAMETOGENESIS > SPERMATOGENESIS |
| | AND MOTILITY |
| | APOPTOSIS > INHIBITION OF APOPTOSIS |
| | APOPTOSIS > INDUCTION OF APOPTOSIS |
| | HUMAN GENE ONTOLOGY |
| | PROCESS |
| | cell death > apoptosis |
| | apoptosis > anti-apoptosis |
| | defence response > humoral defense mechanism |
| | apoptosis > induction of apoptosis |
| | gametogenesis > spermatogenesis |
| | FUNCTION |
| | GO molecular function > apoptosis inhibitor |
| | GO molecular function > cell cycle regulator |
| | cysteine-type endopeptidase > caspase |
| | LOCATION |
| | cytoplasm > mitochondrion |
| | cell > membrane fraction |
| | mitochondrial membrane > mitochondrial inner membrane |
| | mitochondrial membrane > mitochondrial outer membrane |
| | cell > cytoplasm |
| | HUMAN PROTEIN DOMAINS (INTERPRO SIGNATURES) |
| | IPR000712 (BCL) |
| | IPR000712 (BH3) |
| | IPR003093 (BH4) |
| | IPR000712 (Bcl-2) |
| | IPR003093 (BH4) |
| | IPR002475 (BCL2 FAMILY) |
| | IPR003093 (BH4 2) |
| | IPR000712 (BH1) |
| | IPR000712 (BH2) |
| | IPR003093 (BH4 1) |
| hP10-043 | HUMAN PANTHER CLASSIFICATIONS |
| (SEQ ID NO: 749) | FAMILY (SUBFAMILY) |
| | PROTEIN TYROSINE KINASE(PROTO-ONCOGENE SRC |
| | (SRC/YES/YRK/FYN/FGR) (PTK GROUP I)) |
| | MOLECULAR FUNCTIONS |
| | KINASE > PROTEIN KINASE > NON-RECEPTOR TYROSINE |
| | PROTEIN KINASE |
| | BIOLOGICAL PROCESS |
| | PROTEIN METABOLISM AND MODIFICATION > PROTEIN |
| | MODIFICATION > PROTEIN PHOSPHORYLATION |
| | SIGNAL TRANSDUCTION > INTRACELLULAR SIGNALING |
| | CASCADE |
| | ONCOGENESIS > ONCOGENE |
| | HUMAN GENE ONTOLOGY |
| | PROCESS |
| | protein modification > protein dephosphorylation |
| | protein modification > protein phosphorylation |
| | N-terminal fatty acid:protein modification > protein myristylation |
| | intracellular signaling cascade > protein kinase cascade |
| | FUNCTION |
| | protein kinase > protein tyrosine kinase |
| | nucleotide binding > ATP binding |
| | enzyme > protein kinase |
| | GO molecular function > cell cycle regulator |
| | protein tyrosine kinase > non-membrane spanning protein tyrosine kinase |
| | LOCATION |
| | GO cellular component > intracellular |
| | plasma membrane > peripheral plasma membrane protein |
| | cell > cytoplasm |
| | cell > membrane fraction |
| | cell > nucleus |
| | HUMAN PROTEIN DOMAINS (INTERPRO SIGNATURES) |
| | IPR001452 (SH3DOMAIN) |
| | IPR000719 (pkinase) |
| | IPR000980 (SH2) |
| | IPR001452 (SH3) |
| | IPR000719 (PROTEIN KINASE DOM) |
| | IPR000719 (PROTEIN KINASE ATP) |
| | IPR001245 (PROTEIN KINASE TYR) |
| | IPR001245 (TYRKINASE) |
| | IPR000980 (SH2DOMAIN) |
| | IPR001245 (TyrKc) |
| | IPR000980 (SH2) |
| | IPR002290 (S TKc) |
| | IPR001452 (SH3) |
| | IPR000980 (SH2) |
| | IPR001452 (SH3) |
| hP10-045 | HUMAN PANTHER CLASSIFICATIONS |
| (SEQ ID NO: 755) | No Panther Hit |
| | HUMAN GENE ONTOLOGY |
| | PROCESS |
| | cell cycle control > degradation of cyclin |
| | FUNCTION |
| | oligosaccharyl transferase > dolichyl-diphosphooligosaccharide-protein |
| | glycosyltransferase |
| | LOCATION |
| | meiotic chromosome > synaptonemal complex |
| | HUMAN PROTEIN DOMAINS (INTERPRO SIGNATURES) |
| | No Domain Hit |
| hP1-10-046 | HUMAN PANTHER CLASSIFICATIONS |
| (SEQ ID NO: 761) | FAMILY (SUBFAMILY) |
| | HETEROGENEOUS NUCLEAR RIBONUCLEOPROTEIN-RELATED |
| | (RIBONUCLEOPROTEIN) |
| | MOLECULAR FUNCTIONS |
| | NUCLEIC ACID BINDING > RIBONUCLEOPROTEIN |
| | BIOLOGICAL PROCESS |
| | NUCLEOSIDE, NUCLEOTIDE AND NUCLEIC ACID METABOLISM |
| | HUMAN GENE ONTOLOGY |
| | PROCESS |
| | temperature response > cold response |
| | RNA processing > pre-mRNA processing |
| | transcription, DNA-dependent > RNA processing |
| | ectoderm development > neurogenesis |
| | peptidoglycan catabolism > nuclear RNA-nucleus export |
| | RNA localization |
| | FUNCTION |
| | nucleic acid binding > RNA binding |
| | GO molecular function > nucleic acid binding |
| | nucleic acid binding > RNA binding |
| | ribonucleoprotein > heterogeneous nuclear ribonucleoprotein |
| | helicase |
| | RNA binding > RNA helicase |
| | LOCATION |
| | cell > nucleus |
| | nuclear membrane > nuclear membrane lumen |
| | nucleus > nucleoplasm |
| | nucleus > coiled body |
| | cytoplasm > lysosome |
| | HUMAN PROTEIN DOMAINS (INTERPRO SIGNATURES) |
| | IPR000504 (RRM) |
| | IPR000504 (rrm) |
| | IPR000504 (RRM) |
| | IPR000504 (RRM RNP 1) |
| hP2-10-046 | HUMAN PANTHER CLASSIFICATIONS |
| (SEQ ID NO: 763) | FAMILY (SUBFAMILY) |
| | HETEROGENEOUS NUCLEAR RIBONUCLEOPROTEIN-RELATED |
| | (RIBONUCLEOPROTEIN) |
| | MOLECULAR FUNCTIONS |
| | NUCLEIC ACID BINDING > RIBONUCLEOPROTEIN |
| | BIOLOGICAL PROCESS |
| | NUCLEOSIDE, NUCLEOTIDE AND NUCLEIC ACID METABOLISM |
| | HUMAN GENE ONTOLOGY |
| | PROCESS |
| | ectoderm development > neurogenesis |
| | temperature response > cold response |
| | gametogenesis > spermatogenesis |
| | FUNCTION |
| | nucleic acid binding > RNA binding |
| | nucleic acid binding > ribonucleoprotein |
| | LOCATION |
| | nuclear membrane > nuclear membrane lumen |
| | cell > nucleus |
| | nucleus > nucleoplasm |
| | HUMAN PROTEIN DOMAINS (INTERPRO SIGNATURES) |
| | No Domain Hit |
| hP3-10-046 | HUMAN PANTHER CLASSIFICATIONS |
| (SEQ ID NO: 765) | FAMILY (SUBFAMILY) |
| | HETEROGENEOUS NUCLEAR RIBONUCLEOPROTEIN- |
| | RELATED(RIBONUCLEOPROTEIN) |
| | MOLECULAR FUNCTIONS |
| | NUCLEIC ACID BINDING > RIBONUCLEOPROTEIN |
| | BIOLOGICAL PROCESS |
| | NUCLEOSIDE, NUCLEOTIDE AND NUCLEIC ACID METABOLISM |
| | HUMAN GENE ONTOLOGY |
| | PROCESS |
| | ectoderm development > neurogenesis |
| | FUNCTION |
| | nucleic acid binding > RNA binding |
| | LOCATION |
| | nuclear membrane > nuclear membrane lumen |
| | HUMAN PROTEIN DOMAINS (INTERPRO SIGNATURES) |
| | No Domain Hit |
| hP4-10-046 | HUMAN PANTHER CLASSIFICATIONS |
| (SEQ ID NO: 767) | No Panther Hit |
| | HUMAN GENE ONTOLOGY |
| | PROCESS |
| | temperature response > cold response |
| | RNA processing > pre-mRNA processing |
| | transcription, DNA-dependent > RNA processing |
| | ectoderm development > neurogenesis |
| | peptidoglycan catabolism > nuclear RNA-nucleus export |
| | RNA localization |
| | FUNCTION |
| | nucleic acid binding > RNA binding |
| | GO molecular function > nucleic acid binding |
| | nucleic acid binding > RNA binding |
| | ribonucleoprotein > heterogeneous nuclear ribonucleoprotein |
| | helicase |
| | RNA binding > RNA helicase |
| | LOCATION |
| | cell > nucleus |
| | nuclear membrane > nuclear membrane lumen |
| | nucleus > nucleoplasm |
| | nucleus > coiled body |
| | cytoplasm > lysosome |
| | HUMAN PROTEIN DOMAINS (INTERPRO SIGNATURES) |
| | IPR000504 (RRM) |
| | IPR000504 (rrm) |
| | IPR000504 (RRM) |
| | IPR000504 (RRM RNP 1) |
| hP5-10-046 | HUMAN PANTHER CLASSIFICATIONS |
| (SEQ ID NO: 769) | No Panther Hit |
| | HUMAN GENE ONTOLOGY |
| | PROCESS |
| | ectoderm development > neurogenesis |
| | FUNCTION |
| | nucleic acid binding > RNA binding |
| | LOCATION |
| | nuclear membrane > nuclear membrane lumen |
| | HUMAN PROTEIN DOMAINS (INTERPRO SIGNATURES) |
| | No Domain Hit |
| hP6-10-046 | HUMAN PANTHER CLASSIFICATIONS |
| (SEQ ID NO: 771) | No Panther Hit |
| | HUMAN GENE ONTOLOGY |
| | PROCESS |
| | temperature response > cold response |
| | RNA processing > pre-mRNA processing |
| | transcription, DNA-dependent > RNA processing |
| | ectoderm development > neurogenesis |
| | peptidoglycan catabolism > nuclear RNA-nucleus export |
| | RNA localization |
| | FUNCTION |
| | nucleic acid binding > RNA binding |
| | GO molecular function > nucleic acid binding |
| | nucleic acid binding > RNA binding |
| | ribonucleoprotein > heterogeneous nuclear ribonucleoprotein |
| | helicase |
| | RNA binding > RNA helicase |
| | LOCATION |
| | cell > nucleus |
| | nuclear membrane > nuclear membrane lumen |
| | nucleus > nucleoplasm |
| | nucleus > coiled body |
| | cytoplasm > lysosome |
| | HUMAN PROTEIN DOMAINS (INTERPRO SIGNATURES) |
| | IPR000504 (RRM) |
| | IPR000504 (rrm) |
| | IPR000504 (RRM) |
| | IPR000504 (RRM RNP 1) |
| hP10-047 | HUMAN PANTHER CLASSIFICATIONS |
| (SEQ ID NO: 777) | FAMILY (SUBFAMILY) |
| | FATTY ACID-BINDING PROTEIN(gb def: data source: sptr, source |
| | key: p24526, evidence: iss˜putative˜similar to myelin p2 protein [mus musculus]) |
| | MOLECULAR FUNCTIONS |
| | MOLECULAR FUNCTION UNCLASSIFIED |
| | BIOLOGICAL PROCESS |
| | BIOLOGICAL PROCESS UNCLASSIFIED |
| | HUMAN GENE ONTOLOGY |
| | PROCESS |
| | cell proliferation > negative control of cell proliferation |
| | lipid metabolism > fatty acid metabolism |
| | ectoderm development > epidermal differentiation |
| | action potential regulation > ionic insulation of neurons by glial cells |
| | fat-soluble vitamin metabolism > vitamin A metabolism |
| | FUNCTION |
| | ligand binding or carrier > lipid binding |
| | GO molecular function > ligand binding or carrier |
| | lipid binding > fatty acid binding |
| | ligand binding or carrier > retinoid binding |
| | ligand binding or carrier > steroid binding |
| | LOCATION |
| | cell > cytoplasm |
| | cell > soluble fraction |
| | endoplasmic reticulum > smooth endoplasmic reticulum |
| | HUMAN PROTEIN DOMAINS (INTERPRO SIGNATURES) |
| | IPR000463 (FATTYACIDBP) |
| | IPR000566 (lipocalin) |
| hP10-048 | HUMAN PANTHER CLASSIFICATIONS |
| (SEQ ID NO: 783) | No Panther Hit |
| | HUMAN GENE ONTOLOGY |
| | No Gene Ontology |
| | HUMAN PROTEIN DOMAINS (INTERPRO SIGNATURES) |
| | IPR000225 (Armadillo seg) |
| | IPR001472 (NLS BP) |
| hP11-001 | HUMAN PANTHER CLASSIFICATIONS |
| (SEQ ID NO: 789) | FAMILY (SUBFAMILY) |
| | GLUCOSE-REPRESSIBLE ALCOHOL DEHYDROGENASE |
| | TRANSCRIPTIONAL EFFECTOR-RELATED(NOCTURNIN) |
| | MOLECULAR FUNCTIONS |
| | NUCLEIC ACID BINDING |
| | BIOLOGICAL PROCESS |
| | BIOLOGICAL PROCESS UNCLASSIFIED |
| | HUMAN GENE ONTOLOGY |
| | PROCESS |
| | transcription, DNA-dependent > transcription from Pol II promoter |
| | neurogenesis > central nervous system development |
| | transcription, DNA-dependent > transcription from Pol II promoter |
| | cell death > apoptosis |
| | pheromone induction of gene expression |
| | peptidoglycan catabolism > pheromone induction of gene expression from |
| | Pol II promoter |
| | transcription regulation from Pol II promoter |
| | pheromone response |
| | FUNCTION |
| | DNA binding > transcription factor |
| | enzyme > nitric oxide synthase |
| | GO molecular function > cell cycle regulator |
| | enzyme > N-acetylglucosaminylphosphatidylinositol deacetylase |
| | GO molecular function > enzyme |
| | LOCATION |
| | cell > nucleus |
| | GO cellular component > extracellular |
| | extracellular > extracellular space |
| | cell > membrane fraction |
| | mitochondrion > mitochondrial matrix |
| | HUMAN PROTEIN DOMAINS (INTERPRO SIGNATURES) |
| | No Domain Hit |
| hP11-002 | HUMAN PANTHER CLASSIFICATIONS |
| (SEQ ID NO: 797) | No Panther Hit |
| | HUMAN GENE ONTOLOGY |
| | PROCESS |
| | cell growth and maintenance > cell shape and cell size control |
| | FUNCTION |
| | nucleotide binding > ATP binding |
| | LOCATION |
| | cell > nucleus |
| | HUMAN PROTEIN DOMAINS (INTERPRO SIGNATURES) |
| | NULL (GLN RICH) |
| hP1-11-004 | HUMAN PANTHER CLASSIFICATIONS |
| (SEQ ID NO: 803) | No Panther Hit |
| | HUMAN GENE ONTOLOGY |
| | PROCESS |
| | transport > amino-acid transport |
| | FUNCTION |
| | glucosidase > mannosyl-oligosaccharide glucosidase (processing A- |
| | glucosidase I) |
| | LOCATION |
| | cell > membrane fraction |
| | HUMAN PROTEIN DOMAINS (INTERPRO SIGNATURES) |
| | No Domain Hit |
| hP2-11-004 | HUMAN PANTHER CLASSIFICATIONS |
| (SEQ ID NO: 805) | No Panther Hit |
| | HUMAN GENE ONTOLOGY |
| | PROCESS |
| | transport > amino-acid transport |
| | FUNCTION |
| | glucosidase > mannosyl-oligosaccharide glucosidase (processing A- |
| | glucosidase I) |
| | LOCATION |
| | cell > membrane fraction |
| | HUMAN PROTEIN DOMAINS (INTERPRO SIGNATURES) |
| | No Domain Hit |
| hP3-11-004 | HUMAN PANTHER CLASSIFICATIONS |
| (SEQ ID NO: 807) | No Panther Hit |
| | HUMAN GENE ONTOLOGY |
| | PROCESS |
| | transport > amino-acid transport |
| | FUNCTION |
| | glucosidase > mannosyl-oligosaccharide glucosidase (processing A- |
| | glucosidase I) |
| | LOCATION |
| | cell > membrane fraction |
| | HUMAN PROTEIN DOMAINS (INTERPRO SIGNATURES) |
| | No Domain Hit |
| hP11-008 | HUMAN PANTHER CLASSIFICATIONS |
| (SEQ ID NO: 813) | No Panther Hit |
| | HUMAN GENE ONTOLOGY |
| | No Gene Ontology |
| | HUMAN PROTEIN DOMAINS (INTERPRO SIGNATURES) |
| | NULL (LYS RICH) |
| hP11-009 | HUMAN PANTHER CLASSIFICATIONS |
| (SEQ ID NO: 819) | No Panther Hit |
| | HUMAN GENE ONTOLOGY |
| | PROCESS |
| | protein localization > protein secretion |
| | defence response > cellular defense response |
| | FUNCTION |
| | B cell receptor |
| | defense/immunity protein > immunoglobulin |
| | molecular_function unknown > lymphocyte antigen |
| | ligand binding or carrier > protein binding |
| | LOCATION |
| | cell > plasma membrane |
| | cell > membrane fraction |
| | plasma membrane > integral plasma membrane protein |
| | HUMAN PROTEIN DOMAINS (INTERPRO SIGNATURES) |
| | IPR001230 (PRENYLATION) |
| hP11-010 | HUMAN PANTHER CLASSIFICATIONS |
| (SEQ ID NO: 825) | No Panther Hit |
| | HUMAN GENE ONTOLOGY |
| | No Gene Ontology |
| | HUMAN PROTEIN DOMAINS (INTERPRO SIGNATURES) |
| | No Domain Hit |
| hP11-011 | HUMAN PANTHER CLASSIFICATIONS |
| (SEQ ID NO: 831) | FAMILY (SUBFAMILY) |
| | ALPHA-N-ACETYLGALACTOSAMINIDE ALPHA-2,6- |
| | SIALYLTRANSFERASE-RELATED(ALPHA-N-ACETYLGALACTOSAMINIDE ALPHA- |
| | 2,6-SIALYLTRANSFERASE) |
| | MOLECULAR FUNCTIONS |
| | TRANSFERASE > GLYCOSYLTRANSFERASE |
| | BIOLOGICAL PROCESS |
| | PROTEIN METABOLISM AND MODIFICATION > PROTEIN |
| | MODIFICATION > PROTEIN GLYCOSYLATION |
| | HUMAN GENE ONTOLOGY |
| | PROCESS |
| | protein modification > protein glycosylation |
| | biosynthesis > glycosphingolipid biosynthesis |
| | DNA metabolism > DNA repair |
| | phospholipid metabolism > glycolipid metabolism |
| | FUNCTION |
| | enzyme > sialyltransferase |
| | sialyltransferase > beta-galactoside alpha-2,3-sialyltransferase |
| | sialyltransferase > N-acetyllactosaminide alpha-2,3-sialyltransferase |
| | sialyltransferase > beta-galactosamide alpha-2,6-sialyltransferase |
| | nuclease > endonuclease |
| | LOCATION |
| | cytoplasm > Golgi apparatus |
| | cell > membrane fraction |
| | plasma membrane > integral plasma membrane protein |
| | cell > soluble fraction |
| | cell > plasma membrane |
| | HUMAN PROTEIN DOMAINS (INTERPRO SIGNATURES) |
| | IPR001675 (Glyco transf 29) |
| hP11-013 | HUMAN PANTHER CLASSIFICATIONS |
| (SEQ ID NO: 837) | No Panther Hit |
| | HUMAN GENE ONTOLOGY |
| | PROCESS |
| | cell communication > cell adhesion |
| | LOCATION |
| | nuclear membrane > nuclear membrane lumen |
| | HUMAN PROTEIN DOMAINS (INTERPRO SIGNATURES) |
| | IPR001472 (NLS BP) |
| hP11-014 | HUMAN PANTHER CLASSIFICATIONS |
| (SEQ ID NO: 843) | No Panther Hit |
| | HUMAN GENE ONTOLOGY |
| | No Gene Ontology |
| | HUMAN PROTEIN DOMAINS (INTERPRO SIGNATURES) |
| | IPR001680 (WD40) |
| | IPR001680 (WD40) |
| | IPR001680 (WD REPEATS 2) |
| | IPR001680 (WD REPEATS REGION) |
| | IPR001680 (WD REPEATS 1) |
| hP11-015 | HUMAN PANTHER CLASSIFICATIONS |
| (SEQ ID NO: 849) | No Panther Hit |
| | HUMAN GENE ONTOLOGY |
| | No Gene Ontology |
| | HUMAN PROTEIN DOMAINS (INTERPRO SIGNATURES) |
| | No Domain Hit |
| hP11-016 | HUMAN PANTHER CLASSIFICATIONS |
| (SEQ ID NO: 855) | FAMILY (SUBFAMILY) |
| | SORTING NEXIN(SORTING NEXIN 7) |
| | MOLECULAR FUNCTIONS |
| | MEMBRANE TRAFFIC PROTEIN > MEMBRANE TRAFFIC |
| | REGULATORY PROTEIN |
| | BIOLOGICAL PROCESS |
| | INTRACELLULAR PROTEIN TRAFFIC > ENDOCYTOSIS > RECEPTOR |
| | MEDIATED ENDOCYTOSIS |
| | HUMAN GENE ONTOLOGY |
| | PROCESS |
| | intracellular protein traffic > endocytosis |
| | nucleotide metabolism > protein localization |
| | cell growth and maintenance > intracellular protein traffic |
| | intracellular protein traffic > non-selective vesicle transport |
| | FUNCTION |
| | enzyme > gamma-butyrobetaine, 2-oxoglutarate dioxygenase |
| | LOCATION |
| | plasma membrane > peripheral plasma membrane protein |
| | cell > cytoplasm |
| | cytoplasm > Golgi apparatus |
| | HUMAN PROTEIN DOMAINS (INTERPRO SIGNATURES) |
| | IPR001683 (PX) |
| | IPR001683 (PX) |
| | IPR001683 (PX DOMAIN) |
| hP11-018 | HUMAN PANTHER CLASSIFICATIONS |
| (SEQ ID NO: 861) | FAMILY (SUBFAMILY) |
| | FORK HEAD DOMAIN PROTEIN(FORKHEAD BOX PROTEIN D) |
| | MOLECULAR FUNCTIONS |
| | TRANSCRIPTION FACTOR > OTHER TRANSCRIPTION FACTOR |
| | BIOLOGICAL PROCESS |
| | NUCLEOSIDE, NUCLEOTIDE AND NUCLEIC ACID METABOLISM > MRNA |
| | TRANSCRIPTION > MRNA TRANSCRIPTION REGULATION |
| | HUMAN GENE ONTOLOGY |
| | PROCESS |
| | transcription, DNA-dependent > transcription regulation |
| | transcription regulation > transcription regulation from Pol II promoter |
| | transcription, DNA-dependent > transcription from Pol II promoter |
| | developmental processes > embryogenesis and morphogenesis |
| | central nervous system development > brain development |
| | FUNCTION |
| | DNA binding > transcription factor |
| | nucleic acid binding > DNA binding |
| | transcription factor > RNA polymerase II transcription factor |
| | transcription factor > transcription activating factor |
| | RNA polymerase II transcription factor > specific RNA polymerase II |
| | transcription factor |
| | LOCATION |
| | cell > nucleus |
| | nucleoplasm > transcription factor complex |
| | nuclear membrane > nuclear membrane lumen |
| | HUMAN PROTEIN DOMAINS (INTERPRO SIGNATURES) |
| | IPR001766 (FORKHEAD) |
| | IPR001766 (FH) |
| | IPR001766 (Fork head) |
| | NULL (GLY RICH 2) |
| | NULL (ALA RICH) |
| | IPR001766 (FORK HEAD 3) |
| | IPR001766 (FORK HEAD 1) |
| | IPR001766 (FORK HEAD 2) |
| hP11-019 | HUMAN PANTHER CLASSIFICATIONS |
| (SEQ ID NO: 867) | FAMILY (SUBFAMILY) |
| | PROTEIN TYROSINE KINASE(TYROSINE PROTEIN KINASE JAK2 |
| | (PTK GROUP VII)) |
| | MOLECULAR FUNCTIONS |
| | KINASE > PROTEIN KINASE > NON-RECEPTOR TYROSINE |
| | PROTEIN KINASE |
| | BIOLOGICAL PROCESS |
| | PROTEIN METABOLISM AND MODIFICATION > PROTEIN |
| | MODIFICATION > PROTEIN PHOSPHORYLATION |
| | SIGNAL TRANSDUCTION > INTRACELLULAR SIGNALING |
| | CASCADE > JAK-STAT CASCADE |
| | DEVELOPMENTAL PROCESSES > MESODERM DEVELOPMENT |
| | HUMAN GENE ONTOLOGY |
| | PROCESS |
| | protein modification > protein dephosphorylation |
| | protein modification > protein phosphorylation |
| | enzyme linked receptor protein signaling pathway > transmembrane |
| | receptor protein tyrosine kinase signaling pathway |
| | histogenesis and organogenesis > mesoderm development |
| | FUNCTION |
| | protein kinase > protein tyrosine kinase |
| | nucleotide binding > ATP binding |
| | enzyme > protein kinase |
| | transmembrane receptor |
| | protein tyrosine kinase > transmembrane receptor protein tyrosine kinase |
| | transmembrane receptor protein tyrosine kinase > ephrin receptor |
| | LOCATION |
| | plasma membrane > peripheral plasma membrane protein |
| | cell > membrane fraction |
| | plasma membrane > integral plasma membrane protein |
| | GO cellular component > intracellular |
| | cell > cytoplasm |
| | HUMAN PROTEIN DOMAINS (INTERPRO SIGNATURES) |
| | IPR001245 (TYRKINASE) |
| | IPR000719 (PROTEIN KINASE ATP) |
| | IPR001245 (PROTEIN KINASE TYR) |
| | IPR001245 (TyrKc) |
| | IPR000980 (SH2) |
| | IPR002290 (S TKc) |
| | IPR000299 (B41) |
| | IPR000719 (pkinase) |
| | IPR000980 (SH2) |
| | IPR000719 (PROTEIN KINASE DOM 2) |
| | IPR001472 (NLS BP) |
| hP11-020 | HUMAN PANTHER CLASSIFICATIONS |
| (SEQ ID NO: 873) | No Panther Hit |
| | HUMAN GENE ONTOLOGY |
| | PROCESS |
| | protein modification > protein dephosphorylation |
| | protein modification > protein phosphorylation |
| | cell cycle > cell cycle control |
| | cell shape and cell size control > cell size control |
| | cell growth and maintenance > cell proliferation |
| | FUNCTION |
| | enzyme > protein phosphatase |
| | nucleotide binding > ATP binding |
| | enzyme > protein kinase |
| | protein phosphatase > protein tyrosine phosphatase |
| | protein tyrosine phosphatase > prenylated protein tyrosine phosphatase |
| | LOCATION |
| | nuclear membrane > nuclear membrane lumen |
| | cell > cytoplasm |
| | cytoplasm > cytoskeleton |
| | cell > membrane fraction |
| | HUMAN PROTEIN DOMAINS (INTERPRO SIGNATURES) |
| | IPR001623 (DnaJ) |
| | IPR001623 (DnaJ) |
| | IPR000387 (TYR PHOSPHATASE 2) |
| | IPR001623 (DNAJ 2) |
| | IPR000387 (TYR PHOSPHATASE 1) |
| hP1-11-021 | HUMAN PANTHER CLASSIFICATIONS |
| (SEQ ID NO: 879) | FAMILY (SUBFAMILY) |
| | DYNEIN LIGHT CHAINHUMAN GENE ONTOLOGY |
| | PROCESS |
| | gametogenesis > spermatogenesis |
| | FUNCTION |
| | microtubule binding |
| | motor > microtubule motor |
| | LOCATION |
| | cell > cytoplasm |
| | HUMAN PROTEIN DOMAINS (INTERPRO SIGNATURES) |
| | No Domain Hit |
| hP2-11-021 | HUMAN PANTHER CLASSIFICATIONS |
| (SEQ ID NO: 881) | No Panther Hit |
| | HUMAN GENE ONTOLOGY |
| | PROCESS |
| | gametogenesis > spermatogenesis |
| | FUNCTION |
| | microtubule binding |
| | motor > microtubule motor |
| | LOCATION |
| | cell > cytoplasm |
| | HUMAN PROTEIN DOMAINS (INTERPRO SIGNATURES) |
| | No Domain Hit |
| hP3-11-021 | HUMAN PANTHER CLASSIFICATIONS |
| (SEQ ID NO: 883) | No Panther Hit |
| | HUMAN GENE ONTOLOGY |
| | PROCESS |
| | gametogenesis > spermatogenesis |
| | FUNCTION |
| | microtubule binding |
| | motor > microtubule motor |
| | LOCATION |
| | cell > cytoplasm |
| | HUMAN PROTEIN DOMAINS (INTERPRO SIGNATURES) |
| | No Domain Hit |
| hP1-11-022 | HUMAN PANTHER CLASSIFICATIONS |
| (SEQ ID NO: 889) | No Panther Hit |
| | HUMAN GENE ONTOLOGY |
| | LOCATION |
| | mitochondrial membrane > mitochondrial inner membrane |
| | HUMAN PROTEIN DOMAINS (INTERPRO SIGNATURES) |
| | No Domain Hit |
| hP2-11-021 | HUMAN PANTHER CLASSIFICATIONS |
| (SEQ ID NO: 891) | No Panther Hit |
| | HUMAN GENE ONTOLOGY |
| | LOCATION |
| | mitochondrial membrane > mitochondrial inner membrane |
| | HUMAN PROTEIN DOMAINS (INTERPRO SIGNATURES) |
| | No Domain Hit |
| hP3-11-022 | HUMAN PANTHER CLASSIFICATIONS |
| (SEQ ID NO: 893) | No Panther Hit |
| | HUMAN GENE ONTOLOGY |
| | LOCATION |
| | mitochondrial membrane > mitochondrial inner membrane |
| | HUMAN PROTEIN DOMAINS (INTERPRO SIGNATURES) |
| | No Domain Hit |
| hP4-11-022 | HUMAN PANTHER CLASSIFICATIONS |
| (SEQ ID NO: 895) | No Panther Hit |
| | HUMAN GENE ONTOLOGY |
| | LOCATION |
| | mitochondrial membrane > mitochondrial inner membrane |
| | HUMAN PROTEIN DOMAINS (INTERPRO SIGNATURES) |
| | No Domain Hit |
| hP11-023 | HUMAN PANTHER CLASSIFICATIONS |
| (SEQ ID NO: 901) | FAMILY (SUBFAMILY) |
| | PAIRED BOX PROTEINHUMAN GENE ONTOLOGY |
| | PROCESS |
| | transcription, DNA-dependent > transcription regulation |
| | GO biological process > developmental processes |
| | eye-antennal disc metamorphosis > eye morphogenesis |
| | embryogenesis and morphogenesis > histogenesis and organogenesis |
| | neurogenesis > central nervous system development |
| | FUNCTION |
| | DNA binding > transcription factor |
| | nucleic acid binding > DNA binding |
| | transcription factor > transcription activating factor |
| | transcription factor > RNA polymerase II transcription factor |
| | RNA polymerase II transcription factor > specific RNA polymerase II |
| | transcription factor |
| | LOCATION |
| | cell > nucleus |
| | nucleoplasm > transcription factor complex |
| | nuclear membrane > nuclear membrane lumen |
| | cell > cytoplasm |
| | HUMAN PROTEIN DOMAINS (INTERPRO SIGNATURES) |
| | IPR001356 (HOX) |
| | IPR001356 (homeobox) |
| | IPR003654 (OAR DOMAIN) |
| | IPR001356 (HOMEOBOX 2) |
| | IPR001356 (HOMEOBOX 1) |
| hP11-024 | HUMAN PANTHER CLASSIFICATIONS |
| (SEQ ID NO: 907) | FAMILY (SUBFAMILY) |
| | KRUEPPEL-SUBFAMILY C2H2-TYPE ZINC-FINGER PROTEIN(gb |
| | def: hypothetical protein dkfzp434j1015.1 —human) |
| | MOLECULAR FUNCTIONS |
| | TRANSCRIPTION FACTOR > ZINC FINGER TRANSCRIPTION |
| | FACTOR > KRAB BOX TRANSCRIPTION FACTOR |
| | BIOLOGICAL PROCESS |
| | BIOLOGICAL PROCESS UNCLASSIFIED |
| | HUMAN GENE ONTOLOGY |
| | PROCESS |
| | transcription, DNA-dependent > transcription regulation |
| | transcription regulation from Pol II promoter > repression of transcription |
| | from Pol II promoter |
| | gametogenesis > spermatogenesis |
| | transcription, DNA-dependent > transcription from Pol II promoter |
| | GO biological process > developmental processes |
| | FUNCTION |
| | DNA binding > transcription factor |
| | nucleic acid binding > DNA binding |
| | GO molecular function > nucleic acid binding |
| | transcription factor > transcription activating factor |
| | transcription factor > RNA polymerase II transcription factor |
| | LOCATION |
| | cell > nucleus |
| | nuclear membrane > nuclear membrane lumen |
| | nucleoplasm > transcription factor complex |
| | nucleus > nuclear chromosome |
| | chromosome |
| | transcription factor complex > mediator complex |
| | HUMAN PROTEIN DOMAINS (INTERPRO SIGNATURES) |
| | IPR000822 (ZnF C2H2) |
| | IPR000822 (zf-C2H2) |
| | NULL (SER RICH) |
| | IPR000694 (PRO RICH 3) |
| | IPR000822 (ZINC FINGER C2H2 2 5) |
| | IPR000822 (ZINC FINGER C2H2 1) |
| | IPR002034 (AIPM HOMOCIT SYNTH 1) |
| hP1-11-025 | HUMAN PANTHER CLASSIFICATIONS |
| (SEQ ID NO: 913) | FAMILY (SUBFAMILY) |
| | ARF-GTPASE ACTIVATING PROTEIN-RELATED, CENTAURIN |
| | (ARF-GTPASE ACTIVATING PROTEIN-RELATED) |
| | MOLECULAR FUNCTIONS |
| | MOLECULAR FUNCTION UNCLASSIFIED |
| | BIOLOGICAL PROCESS |
| | SIGNAL TRANSDUCTION > CELL SURFACE RECEPTOR |
| | MEDIATED SIGNAL TRANSDUCTION > G-PROTEIN MEDIATED SIGNALING |
| | HUMAN GENE ONTOLOGY |
| | PROCESS |
| | G protein linked receptor protein signaling pathway > regulation of G |
| | protein linked receptor protein signaling pathway |
| | exocytosis > ER to Golgi transport |
| | protein kinase cascade > MAPKKK cascade |
| | FUNCTION |
| | nucleic acid binding > DNA binding |
| | GTPase activator > ARF GTPase activator |
| | GO molecular function > enzyme activator |
| | lipid binding > phospholipid binding |
| | acetylgalactosaminyltransferase > polypeptide N- |
| | acetylgalactosaminyltransferase |
| | LOCATION |
| | nuclear membrane > nuclear membrane lumen |
| | cell > nucleus |
| | cell > cytoplasm |
| | cytoplasm > ER-Golgi intermediate compartment |
| | Golgi apparatus > secretory vesicle |
| | HUMAN PROTEIN DOMAINS (INTERPRO SIGNATURES) |
| | IPR001164 (REVINTRACTNG) |
| | IPR001164 (ArfGap) |
| | IPR001164 (ArfGap) |
| | IPR001164 (ZF GCS) |
| | NULL (MET RICH) |
| hP2-11-025 | HUMAN PANTHER CLASSIFICATIONS |
| (SEQ ID NO: 915) | FAMILY (SUBFAMILY) |
| | ARF-GTPASE ACTIVATING PROTEIN-RELATED, |
| | CENTAURIN(ARF-GTPASE ACTIVATING PROTEIN-RELATED) |
| | MOLECULAR FUNCTIONS |
| | MOLECULAR FUNCTION UNCLASSIFIED |
| | BIOLOGICAL PROCESS |
| | SIGNAL TRANSDUCTION > CELL SURFACE RECEPTOR |
| | MEDIATED SIGNAL TRANSDUCTION > G-PROTEIN MEDIATED SIGNALING |
| | HUMAN GENE ONTOLOGY |
| | FUNCTION |
| | nucleic acid binding > DNA binding |
| | GTPase activator > ARF GTPase activator |
| | lipid binding > phospholipid binding |
| | GO molecular function > enzyme activator |
| | phospholipase A2 > phospholipase C |
| | LOCATION |
| | nuclear membrane > nuclear membrane lumen |
| | cell > nucleus |
| | cell > cytoplasm |
| | cytoplasm > ER-Golgi intermediate compartment |
| | Golgi apparatus > secretory vesicle |
| | HUMAN PROTEIN DOMAINS (INTERPRO SIGNATURES) |
| | IPR001164 (REVINTRACTNG) |
| | IPR001164 (ArfGap) |
| | IPR001164 (ArfGap) |
| | IPR001164 (ZF GCS) |
| | NULL (MET RICH) |
| | IPR001472 (NLS BP) |
| hP11-026 | HUMAN PANTHER CLASSIFICATIONS |
| (SEQ ID NO: 921) | FAMILY (SUBFAMILY) |
| | C—C CHEMOKINE RECEPTOR-RELATED(C-X-C CHEMOKINE |
| | RECEPTOR TYPE 4) |
| | MOLECULAR FUNCTIONS |
| | RECEPTOR > G-PROTEIN COUPLED RECEPTOR |
| | BIOLOGICAL PROCESS |
| | SIGNAL TRANSDUCTION > INTRACELLULAR SIGNALING |
| | CASCADE > CALCIUM MEDIATED SIGNALING |
| | SIGNAL TRANSDUCTION > CELL SURFACE RECEPTOR |
| | MEDIATED SIGNAL TRANSDUCTION > CYTOKINE AND CHEMOKINE MEDIATED |
| | SIGNALING PATHWAY > G-PROTEIN MEDIATED SIGNALING |
| | IMMUNITY AND DEFENSE > CYTOKINE/CHEMOKINE |
| | MEDIATED IMMUNITY |
| | CELL STRUCTURE AND MOTILITY > CELL MOTILITY |
| | HUMAN GENE ONTOLOGY |
| | PROCESS |
| | cell motility > chemotaxis |
| | cell surface receptor linked signal transduction > G protein linked receptor |
| | protein signaling pathway |
| | defence response > inflammatory response |
| | cell growth and maintenance > invasive growth |
| | MAPKKK cascade > activation of MAPK |
| | FUNCTION |
| | enzyme inhibitor > protein kinase inhibitor |
| | enzyme > 2-acetyl-l-alkylglycerophosphocholine esterase |
| | defense/immunity protein > antiviral response protein |
| | defense/immunity protein > blood coagulation factor |
| | ligand binding or carrier > nucleotide binding |
| | LOCATION |
| | cell > membrane fraction |
| | plasma membrane > integral plasma membrane protein |
| | cytoplasm > endosome |
| | cell > plasma membrane |
| | cell > cytoplasm |
| | HUMAN PROTEIN DOMAINS (INTERPRO SIGNATURES) |
| | IPR001277 (CXCCHMKINER4) |
| | IPR000276 (GPCRRHODOPSN) |
| | IPR000355 (CCCHEMOKINER) |
| | IPR000496 (BRADYKININR) |
| | IPR000248 (ANGIOTENSINR) |
| | IPR000276 (7tm 1) |
| | IPR000276 (G PROTEIN RECEP F1 2) |
| | IPR000276 (G PROTEIN RECEP F1 1) |
| | IPR003006 (IG MHC) |
| hP11-027 | HUMAN PANTHER CLASSIFICATIONS |
| (SEQ ID NO: 927) | FAMILY (SUBFAMILY) |
| | KRUEPPEL FAMILY C2H2-TYPE ZINC FINGER |
| | PROTEIN(KRUEPPEL-RELATED C2H2-TYPE ZINC-FINGER PROTEIN) |
| | MOLECULAR FUNCTIONS |
| | TRANSCRIPTION FACTOR > ZINC FINGER TRANSCRIPTION |
| | FACTOR > KRAB BOX TRANSCRIPTION FACTOR |
| | BIOLOGICAL PROCESS |
| | NUCLEOSIDE, NUCLEOTIDE AND NUCLEIC ACID METABOLISM > MRNA |
| | TRANSCRIPTION > MRNA TRANSCRIPTION REGULATION |
| | HUMAN GENE ONTOLOGY |
| | PROCESS |
| | transcription, DNA-dependent > transcription regulation |
| | GO biological process > developmental processes |
| | transcription regulation from Pol II promoter > repression of transcription |
| | from Pol II promoter |
| | gametogenesis > spermatogenesis |
| | transcription regulation > transcription regulation from Pol II promoter |
| | FUNCTION |
| | DNA binding > transcription factor |
| | nucleic acid binding > DNA binding |
| | GO molecular function > nucleic acid binding |
| | transcription factor > RNA polymerase II transcription factor |
| | ligand binding or carrier > protein binding |
| | LOCATION |
| | cell > nucleus |
| | nucleoplasm > transcription factor complex |
| | nuclear membrane > nuclear membrane lumen |
| | nucleus > nucleolus |
| | cell > cytoplasm |
| | HUMAN PROTEIN DOMAINS (INTERPRO SIGNATURES) |
| | IPR000822 (ZINCFINGER) |
| | IPR001005 (SANT) |
| | IPR003309 (LER) |
| | IPR000822 (ZnF C2H2) |
| | IPR000822 (zf-C2H2) |
| | IPR003309 (SCAN) |
| | IPR000822 (ZINC FINGER C2H2 2 10) |
| | IPR003309 (SCAN BOX) |
| | IPR000822 (ZINC FINGER C2H2 1) |
| hP11-028 | HUMAN PANTHER CLASSIFICATIONS |
| (SEQ ID NO: 933) | FAMILY (SUBFAMILY) |
| | CANNABINOID RECEPTOR-RELATED(CANNABINOID RECEPTOR |
| | 2) |
| | MOLECULAR FUNCTIONS |
| | RECEPTOR > G-PROTEIN COUPLED RECEPTOR |
| | BIOLOGICAL PROCESS |
| | SIGNAL TRANSDUCTION > INTRACELLULAR SIGNALING |
| | CASCADE > CALCIUM MEDIATED SIGNALING > MAPKKK CASCADE > NO |
| | MEDIATED SIGNAL TRANSDUCTION |
| | SIGNAL TRANSDUCTION > CELL SURFACE RECEPTOR |
| | MEDIATED SIGNAL TRANSDUCTION > G-PROTEIN MEDIATED SIGNALING |
| | IMMUNITY AND DEFENSE > MACROPHAGE-MEDIATED |
| | IMMUNITY |
| | IMMUNITY AND DEFENSE > NATURAL KILLER CELL MEDIATED |
| | IMMUNITY |
| | IMMUNITY AND DEFENSE > B-CELL- AND ANTIBODY- |
| | MEDIATED IMMUNITY |
| | NEURONAL ACTIVITIES > SYNAPTIC TRANSMISSION > NEUROTRANSMITTER |
| | RELEASE > NERVE-NERVE SYNAPTIC TRANSMISSION |
| | MUSCLE CONTRACTION |
| | BLOOD CIRCULATION AND GAS EXCHANGE > REGULATION OF |
| | VASOCONSTRICTION, DILATION |
| | HUMAN GENE ONTOLOGY |
| | PROCESS |
| | G protein linked receptor protein signaling pathway > G protein signaling, |
| | linked to cyclic nucleotide second messenger |
| | cell surface receptor linked signal transduction > G protein linked receptor |
| | protein signaling pathway |
| | GO biological process > behavior |
| | sensory perception > vision |
| | vision > phototransduction |
| | FUNCTION |
| | ligand binding or carrier > lipid binding |
| | protein binding > lipoprotein binding |
| | amine oxidase > amine oxidase (flavin-containing) |
| | monooxygenase > monophenol monooxygenase |
| | enzyme > 2-acetyl-1-alkylglycerophosphocholine esterase |
| | LOCATION |
| | cell > membrane fraction |
| | plasma membrane > integral plasma membrane protein |
| | cell > plasma membrane |
| | cytoplasm > lysosome |
| | cytoplasm > endosome |
| | HUMAN PROTEIN DOMAINS (INTERPRO SIGNATURES) |
| | IPR000276 (GPCRRHODOPSN) |
| | IPR001551 (CANABINOID2R) |
| | IPR002230 (CANNABINOIDR) |
| | IPR000276 (7tm 1) |
| | IPR000276 (G PROTEIN RECEP F1 2) |
| | IPR000276 (G PROTEIN RECEP F1 1) |
| hP1-11-029 | HUMAN PANTHER CLASSIFICATIONS |
| (SEQ ID NO: 939) | FAMILY (SUBFAMILY) |
| | TRANSLATION INITIATION FACTOR EIF-2B EPSILON SUBUNIT- |
| | RELATED HUMAN GENE ONTOLOGY |
| | PROCESS |
| | protein biosynthesis > translational regulation |
| | translational regulation > translational regulation, initiation |
| | protein metabolism and modification |
| | macromolecule biosynthesis > protein biosynthesis |
| | protein biosynthesis > translational regulation |
| | protein synthesis initiation > cap binding |
| | FUNCTION |
| | RNA binding > translation factor |
| | nucleic acid binding > RNA binding |
| | GO molecular function > nucleic acid binding |
| | mRNA binding > mRNA cap binding |
| | LOCATION |
| | cytoplasm > eukaryotic translation initiation factor 2 complex |
| | cell > cytoplasm |
| | nuclear membrane > nuclear membrane lumen |
| | HUMAN PROTEIN DOMAINS (INTERPRO SIGNATURES) |
| | IPR002965 (PRICHEXTENSN) |
| | IPR003890 (MIF4G) |
| | IPR003891 (MA3) |
| | IPR003307 (eIF5C) |
| | IPR003307 (W2) |
| | IPR000694 (PRO RICH 2) |
| hP2-11-029 | HUMAN PANTHER CLASSIFICATIONS |
| (SEQ ID NO: 941) | FAMILY (SUBFAMILY) |
| | TRANSLATION INITIATION FACTOR EIF-2B EPSILON SUBUNIT- |
| | RELATEDHUMAN GENE ONTOLOGY |
| | PROCESS |
| | protein biosynthesis > translational regulation |
| | translational regulation > translational regulation, initiation |
| | protein metabolism and modification |
| | macromolecule biosynthesis > protein biosynthesis |
| | protein biosynthesis > translational regulation |
| | protein synthesis initiation > cap binding |
| | FUNCTION |
| | RNA binding > translation factor |
| | nucleic acid binding > RNA binding |
| | GO molecular function > nucleic acid binding |
| | mRNA binding > mRNA cap binding |
| | LOCATION |
| | cytoplasm > eukaryotic translation initiation factor 2 complex |
| | cell > cytoplasm |
| | nuclear membrane > nuclear membrane lumen |
| | HUMAN PROTEIN DOMAINS (INTERPRO SIGNATURES) |
| | IPR002965 (PRICHEXTENSN) |
| | IPR003890 (MIF4G) |
| | IPR003891 (MA3) |
| | IPR003307 (eIF5C) |
| | IPR003307 (W2) |
| | IPR000694 (PRO RICH) |
| hP11-032 | HUMAN PANTHER CLASSIFICATIONS |
| (SEQ ID NO: 947) | FAMILY (SUBFAMILY) |
| | COILED-COIL PROTEINHUMAN GENE ONTOLOGY |
| | PROCESS |
| | protein metabolism and modification > protein modification |
| | organelle organization and biogenesis > cytoskeleton organization and |
| | biogenesis |
| | cell cycle > DNA replication and chromosome cycle |
| | cell motility > muscle contraction |
| | mesoderm development > muscle development |
| | FUNCTION |
| | GO molecular function > motor |
| | nucleotide binding > ATP binding |
| | adenosinetriphosphatase > myosin ATPase |
| | microfilament motor > muscle motor |
| | protein binding > actin binding |
| | LOCATION |
| | actin cytoskeleton > non-muscle myosin |
| | cell wall > muscle myosin |
| | thick filament |
| | actin cytoskeleton > non-muscle myosin |
| | cytoplasm > cytoskeleton |
| | cell > nucleus |
| | cell > nucleus |
| | HUMAN PROTEIN DOMAINS (INTERPRO SIGNATURES) |
| | No Domain Hit |
| hP11-033 | HUMAN PANTHER CLASSIFICATIONS |
| (SEQ ID NO: 953) | FAMILY (SUBFAMILY) |
| | BETA/GAMMA CRYSTALLIN(gb def: similar to xenopus laevis gamma- |
| | crystallin 6; similar to af071563 [homo sapiens]) |
| | MOLECULAR FUNCTIONS |
| | MISCELLANEOUS FUNCTION > STRUCTURAL PROTEIN |
| | BIOLOGICAL PROCESS |
| | SENSORY PERCEPTION > VISION |
| | HUMAN GENE ONTOLOGY |
| | PROCESS |
| | peripheral nervous system development > sensory organ development |
| | cell growth and maintenance > cell shape and cell size control |
| | sensory perception > vision |
| | FUNCTION |
| | enzyme > argininosuccinate lyase |
| | LOCATION |
| | cell > cytoplasm |
| | HUMAN PROTEIN DOMAINS (INTERPRO SIGNATURES) |
| | IPR001064 (BGCRYSTALLIN) |
| | IPR001064 (XTALbg) |
| | IPR001064 (crystall) |
| | IPR001064 (CRYSTALLIN BETAGAMMA) |
| hP11-034 | HUMAN PANTHER CLASSIFICATIONS |
| (SEQ ID NO: 959) | FAMILY (SUBFAMILY) |
| | COILED-COIL PROTEINHUMAN GENE ONTOLOGY |
| | PROCESS |
| | organelle organization and biogenesis > cytoskeleton organization and |
| | biogenesis |
| | striated muscle contraction > striated muscle contraction regulation |
| | protein metabolism and modification > protein modification |
| | non-selective vesicle transport > vesicle docking |
| | cytoskeleton organization and biogenesis > microtubule-based process |
| | FUNCTION |
| | adenosinetriphosphatase > myosin ATPase |
| | GO molecular function > motor |
| | nucleotide binding > ATP binding |
| | RNA polymerase II transcription factor > enhancer binding |
| | GO molecular function > ligand binding or carrier |
| | LOCATION |
| | actin cytoskeleton > non-muscle myosin |
| | cell wall > muscle myosin |
| | thick filament |
| | actin cytoskeleton > non-muscle myosin |
| | cytoskeleton > intermediate filament |
| | cell > cytoplasm |
| | cytoplasm > cytoskeleton |
| | HUMAN PROTEIN DOMAINS (INTERPRO SIGNATURES) |
| | No Domain Hit |
| hP11-036 | HUMAN PANTHER CLASSIFICATIONS |
| (SEQ ID NO: 965) | No Panther Hit |
| | HUMAN GENE ONTOLOGY |
| | No Gene Ontology |
| | HUMAN PROTEIN DOMAINS (INTERPRO SIGNATURES) |
| | No Domain Hit |
| hP11-037 | HUMAN PANTHER CLASSIFICATIONS |
| (SEQ ID NO: 971) | No Panther Hit |
| | HUMAN GENE ONTOLOGY |
| | PROCESS |
| | embryogenesis and morphogenesis > histogenesis and organogenesis |
| | LOCATION |
| | GO cellular component > extracellular |
| | HUMAN PROTEIN DOMAINS (INTERPRO SIGNATURES) |
| | NULL (CYS RICH) |
| hP11-038 | HUMAN PANTHER CLASSIFICATIONS |
| (SEQ ID NO: 977) | FAMILY (SUBFAMILY) |
| | DISTAL-LESS HOMEOBOX-RELATED(HOMEOBOX PROTEIN GSH- |
| | 1) |
| | MOLECULAR FUNCTIONS |
| | TRANSCRIPTION FACTOR > HOMEOTIC TRANSCRIPTION |
| | FACTOR |
| | BIOLOGICAL PROCESS |
| | NUCLEOSIDE, NUCLEOTIDE AND NUCLEIC ACID METABOLISM > MRNA |
| | TRANSCRIPTION > MRNA TRANSCRIPTION REGULATION |
| | DEVELOPMENTAL PROCESSES > ANTERIOR/POSTERIOR |
| | PATTERNING |
| | HUMAN GENE ONTOLOGY |
| | PROCESS |
| | transcription, DNA-dependent > transcription regulation |
| | embryogenesis and morphogenesis > histogenesis and organogenesis |
| | embryogenesis and morphogenesis > pattern specification |
| | GO biological process > developmental processes |
| | central nervous system development > brain development |
| | FUNCTION |
| | DNA binding > transcription factor |
| | nucleic acid binding > DNA binding |
| | transcription factor > RNA polymerase II transcription factor |
| | RNA polymerase II transcription factor > specific RNA polymerase II |
| | transcription factor |
| | transcription factor > transcription activating factor |
| | LOCATION |
| | cell > nucleus |
| | nucleoplasm > transcription factor complex |
| | nuclear membrane > nuclear membrane lumen |
| | GO cellular component > extracellular |
| | HUMAN PROTEIN DOMAINS (INTERPRO SIGNATURES) |
| | IPR001356 (HOMEOBOX) |
| | IPR000047 (HTHREPRESSR) |
| | IPR001356 (HOX) |
| | IPR001356 (homeobox) |
| | NULL (HIS RICH) |
| | NULL (ALA RICH) |
| | IPR001356 (HOMEOBOX 2) |
| | IPR001356 (HOMEOBOX 1) |

[0290] A CA protein (CAP) is modulated by a drug candidate, bioactive agent or CAP inhibitor, that is an inhibitor of transcription wherein the CAP sequence (hPxx-yyy) is selected from the group consisting of SEQ ID NOS: 28, 42, 56, 142, 167, 169, 173, 175, 177, 185, 187, 193, 195, 227, 255, 258, 260, 274, 286, 298, 300, 302, 304, 322, 324, 392, 394, 412, 460, 462, 636, 728, 789, 861, 901, 907, 927, and 977.

[0291] A CA protein (CAP) is modulated by a drug candidate, bioactive agent or CAP inhibitor, that is a G-protein coupled receptor antagonist wherein the CAP sequence (hPxx-yyy) is selected from the group consisting of SEQ ID NOS: 46, 913, 915, 921, and 933.

[0292] A CA protein (CAP) is modulated by a drug candidate, bioactive agent or CAP inhibitor, that is a calicium binding protein antagonist wherein the CAP sequence (hPxx-yyy) is selected from the group consisting of SEQ ID NOS: 48, 50, 201, 336, 338, 346, 404, and 406.

[0293] A CA protein (CAP) is modulated by a drug candidate, bioactive agent or CAP inhibitor, that is a ubiquitin cycle antagonist wherein the CAP sequence (hPxx-yyy) is selected from the group consisting of SEQ ID NOS: 34, 36, 62, 104, 106, 108, 110, 151, and 153.

[0294] Involvement of a CA protein (CAP), comprising the CAP sequence (hPxx-yyy), in one or more pathways including but not limited to DNA replication, cell adhesion, nucleic acid binding, etc. are disclosed in Table 130 and may be modulated by a drug candidate, bioactive agent or CAP inhibitor specific for that activity.

[0295] Certain aspects of the present invention are described in greater detail in the non-limiting examples that follow.

### EXAMPLES

[0296] The following examples are put forth so as to provide those of ordinary skill in the art with a complete disclosure and description of how to make and use the present invention, and are not intended to limit the scope of what the inventors regard as their invention nor are they intended to represent that the experiments below are all and only experiments performed. Efforts have been made to ensure accuracy with respect to numbers used (e.g. amounts, temperature, etc.) but some experimental errors and deviations should be accounted for. Unless indicated otherwise, parts are parts by weight, molecular weight is weight average molecular weight, temperature is in degrees Celsius, and pressure is at or near atmospheric.

### Example 1

### Insertion Site Analysis Following Tumor Induction in Mice

[0297] Tumors are induced in mice using either mouse mammary tumor virus (MMTV) or murine leukemia virus (MLV). MMTV causes mammary adenocarcinomas and MLV causes a variety of different hematopoetic malignancies (primarily T- or B-cell lymphomas). Three routes of infection are used: (1) injection of neonates with purified virus preparations, (2) infection by milk-borne virus during nursing, and (3) genetic transmission of pathogenic proviruses via the germ-line (Akvr1 and/or Mtv2). The type of malignancy present in each affected mouse is determined by histological analysis of H&E-stained thin sections of formalin-fixed, paraffin-embedded biopsy samples. Host DNA sequences flanking all clonally-integrated proviruses in each tumor are recovered by nested anchored-PCR using two virus-specific primers and two primers specific for a 40 bp double stranded DNA anchor ligated to restriction enzyme digested tumor DNA. Amplified bands representing host/virus junction fragments are cloned and sequenced. Then the host sequences (called “tags”) are used to BLAST analyze the Celera mouse genomic sequence. For each individual tag, three parameters are recorded: (1) the mouse chromosome assignment, (2) base pair coordinates at which the integration occurred, and (3) provirus orientation. Using this information, all available tags from all analyzed tumors are mapped to the mouse genome. To identify the protooncogene targets of provirus insertion mutation, the provirus integration pattern at each cluster of integrants is analyzed relative to the locations of all known genes in the transcriptome. The presence of provirus at the same locus in two or more independent tumors is prima facie evidence that a protooncogene is present at or very near the proviral integration sites. This is because the genome is too large for random integrations to result in observable clustering. Any clustering that is detected is unequivocal evidence for biological selection during tumorigenesis. In order to identify the human orthologs of the protooncogene targets of provirus insertion mutation, a comparative analysis of syntenic regions of the mouse and human genomes is performed.

[0298] An example of PCR amplification of host/virus junction fragments is presented in FIG. 1. Lane 1 contains the amplification products from normal control DNA and lane 2 contains the amplification products from tumor DNA. The bands result from 5′ host/virus junction fragments present in the DNA samples. Lane 1 has bands from the env/3′ LTR junctions from all proviruses (upper) and the host/5′ LTR from the pathogenic endogenous Mtv2 provirus present in this particular mouse strain. This endogenous provirus is detected because its sequence is identical to the new clonally integrated proviruses in the tumor. All four new clonally integrated proviruses known to be in this tumor are readily detected.

### Example 2

### Analysis of Quantitative RT-PCR: Comparative C_{T} Method

[0299] The expression level of target genes is quantified using the ABI PRISM 7900HT Sequence Detection System (Applied Biosystems, California). The method is based on the quantitation of the initial copy number of target template in comparison to that of a reference (normalizer) housekeeper gene (Pre-Developed TaqMan® Assay Reagents Gene Expression Quantification Protocol, Applied Biosystems, 2001). Accumulation of DNA product with each PCR cycle is related to amplicon efficiency and the initial template concentration. Therefore the amplification efficiency of both the target and the normalizer must be approximately equal. The threshold cycle (C_{T}), which is dependent on the starting template copy number and the DNA amplification efficiency, is a PCR cycle during which PCR product growth is exponential. With a similar dynamic range for the target and normalizer, the comparative C_{T} method is applicable.

[0300] An example of the comparative C_{T} method of gene expression for quantitative RT-PCR is shown in FIG. 2. In the first step, assays are performed in quadruplicate on a normal tissue and several sample tissues. In these tissues, the means and standard deviations of C_{T} values are determined for housekeeper genes (chosen as controls if shown to be biologically stable among various samples, irrespective of disease state) and for the target gene. FIG. 2 shows an example of average C_{T} values for a housekeeper gene and target gene. These values can fall within a range from upper teens to 40 depending on the intrinsic expression level of the gene in the particular tissue. The coefficient of variance of all replicate sets cannot exceed 1.5%.

[0301] An assessment of how the ΔC_{T} changes with template dilution verifies that the efficiencies of the target and housekeeper amplicons are approximately equal if the log input amount of template RNA versus ΔC_{T} plot has a slope <0.10. With the relative efficiencies verified for target and housekeeper, the ΔΔC_{T} comparative calculation becomes valid, as mentioned above. An example of the calculated difference between the C_{T} values of target and housekeeper genes (ΔC_{T}) for various samples is shown in FIG. 3. The ΔΔC_{T} is calculated for each sample by subtracting its ΔC_{T} value from the ΔC_{T} value of the baseline (calibrator) sample. If the expression is increased in some samples and decreased in others, ΔΔC_{T} will be a mixture of negative and positive values. The final step in the calculation is to transform these values to absolute values. The formula for this is:
Comparative expression level=2^{-ΔΔCT}

[0302] The final value for the calibrator should always be one. FIG. 4 shows the ΔΔC_{T} and comparative expression level for each sample from FIG. 3.

### Example 3

### Detection of Elevated Levels of cDNA Associated with Cancer Using Arrays

[0303] cDNA sequences representing a variety of candidate CA genes to be screened for differential expression in cancer are assayed by hybridization on polynucleotide arrays. The cDNA sequences include cDNA clones isolated from cell lines or tissues of interest. The cDNA sequences analyzed also include polynucleotides comprising sequence overlap with sequences in the Unigene database, and which encode a variety of gene products of various origins, functionality, and levels of characterization. cDNAs are spotted onto reflective slides (Amersham) according to methods well known in the art at a density of 9,216 spots per slide representing 4,068 sequences (including controls) spotted in duplicate, with approximately 0.8 μl of an approximately 200 ng/μl solution of cDNA.

[0304] PCR products of selected cDNA clones corresponding to the gene products of interest are prepared in a 50% DMSO solution. These PCR products are spotted onto Amersham aluminum microarray slides at a density of 9216 clones per array using a Molecular Dynamics Generation III spotting robot. Clones are spotted in duplicate, for a total of 4608 different sequences per chip.

[0305] cDNA probes are prepared from total RNA obtained by laser capture microdissection (LCM, Arcturus Enginering Inc., Mountain View, Calif.) of tumor tissue samples and normal tissue samples isolated from patients.

[0306] Total RNA is first reverse transcribed into cDNA using a primer containing a T7 RNA polymerase promoter, followed by second strand DNA synthesis. cDNA is then transcribed in vitro to produce antisense RNA using the T7 promoter-mediated expression (see, e.g., Luo et al. (1999) Nature Med 5:117-122), and the antisense RNA is then converted into cDNA. The second set of cDNAs are again transcribed in vitro, using the T7 promoter, to provide antisense RNA. This antisense RNA is then fluorescently labeled, or the RNA is again converted into cDNA, allowing for a third round of T7-mediated amplification to produce more antisense RNA. Thus the procedure provides for two or three rounds of in vitro transcription to produce the final RNA used for fluorescent labeling. Probes are labeled by making fluorescently labeled cDNA from the RNA starting material. Fluorescently labeled cDNAs prepared from the tumor RNA sample are compared to fluorescently labeled cDNAs prepared from normal cell RNA sample. For example, the cDNA probes from the normal cells are labeled with Cy3 fluorescent dye (green) and the cDNA probes prepared from suspected cancer cells are labeled with Cy5 fluorescent dye (red).

[0307] The differential expression assay is performed by mixing equal amounts of probes from tumor cells and normal cells of the same patient. The arrays are prehybridized by incubation for about 2 hrs at 60° C. in 5×SSC, 0.2% SDS, 1 mM EDTA, and then washing three times in water and twice in isopropanol. Following prehybridization of the array, the probe mixture is then hybridized to the array under conditions of high stringency (overnight at 42° C. in 50% formamide, 5×SSC, and 0.2% SDS. After hybridization, the array is washed at 55° C. three times as follows: 1) first wash in 1×SSC/0.2% SDS; 2) second wash in 0.1×SSC/0.2% SDS; and 3) third wash in 0.1×SSC.

[0308] The arrays are then scanned for green and red fluorescence using a Molecular Dynamics Generation III dual color laser-scanner/detector. The images are processed using BioDiscovery Autogene software, and the data from each scan set normalized. The experiment is repeated, this time labeling the two probes with the opposite color in order to perform the assay in both “color directions.” Each experiment is sometimes repeated with two more slides (one in each color direction). The data from each scan is normalized, and the level of fluorescence for each sequence on the array expressed as a ratio of the geometric mean of 8 replicate spots/genes from the four arrays or 4 replicate spots/gene from 2 arrays or some other permutation.

[0309] Normalization: The objective of normalization is to generate a cDNA library in which all transcripts expressed in a particular cell type or tissue are equally represented (S. M. Weissman, Mol. Biol. Med. 4(3):133-143 (1987); Patanjali, et al., Proc. Natl. Acad. Sci. USA 88(5):1943-1947 (1991)), and therefore isolation of as few as 30,000 recombinant clones in an optimally normalized library may represent the entire gene expression repertoire of a cell, estimated to number 10,000 per cell.

[0310] Total RNA is extracted from harvested cells using RNeasy™ Protect Kit (Qiagen, Valencia, Calif.), following manufacturer's recommended procedures. RNA is quantified using RiboGreen™ RNA quantification kit (Molecular Probes, Inc. Eugene, Oreg.). One μg of total RNA is reverse transcribed and PCR amplified using SMAR™ PCR cDNA synthesis kit (ClonTech, Palo Alto, Calif.). The cDNA products are size-selected by agarose gel electrophoresis using standard procedures (Sambrook, J. T., et al. Molecular Cloning: A Laboratory Manual, 2d ed., Cold Spring Harbor Laboratory Press, NY). The cDNA is extracted using Bio 101 Geneclean® II kit (Qbiogene, Carlsbad, Calif.). Normalization of the cDNA is carried out using kinetics of hybridization principles: 1.0 μg of cDNA is denatured by heat at 100° C. for 10 minutes, then incubated at 42° C. for 42 hours in the presence of 120 mM NaCl, 10 mM Tris.HCl (pH=8.0), 5 mM EDTA.Na+ and 50% formamide. Single-stranded cDNA (“normalized”) is purified by hydroxyapatite chromatography (#130-0520, BioRad, Hercules, Calif.) following the manufacturer's recommended procedures, amplified and converted to double-stranded cDNA by three cycles of PCR amplification, and cloned into plasmid vectors using standard procedures (Sambrook, J. T., et al. Molecular Cloning: A Laboratory Manual, 2d ed., Cold Spring Harbor Laboratory Press, NY). All primers/adaptors used in the normalization and cloning process are provided by the manufacturer in the SMART™ PCR cDNA synthesis kit (ClonTech, Palo Alto, Calif.). Supercompetent cells (XL-2 Blue Ultracompetent Cells, Stratagene, California) are transfected with the normalized cDNA libraries, plated on solid media and grown overnight at 36° C.

[0311] The sequences of 10,000 recombinants per normalized library are analyzed by capillary sequencing using the ABI PRISM 3700 DNA Analyzer (Applied Biosystems, California). To determine the representation of transcripts in a library, BLAST analysis is performed on the clone sequences to assign transcript identity to each isolated clone, i.e., the sequences of the isolated polynucleotides are first masked to eliminate low complexity sequences using the XBLAST masking program (Claverie “Effective Large-Scale Sequence Similarity Searches,” Computer Methods for Macromolecular Sequence Analysis, Doolittle, ed., Meth. Enzymol. 266:212-227 Academic Press, NY, N.Y. (1996); see particularly Claverie, in “Automated DNA Sequencing and Analysis Techniques” Adams et al., eds., Chap. 36, p. 267 Academic Press, San Diego, 1994 and Claverie et al. Comput. Chem. (1993) 17:191). Generally, masking does not influence the final search results, except to eliminate sequences of relative little interest due to their low complexity, and to eliminate multiple “hits” based on similarity to repetitive regions common to multiple sequences, e.g., Alu repeats. The remaining sequences are then used in a BLASTN vs. GenBank search. The sequences are also used as query sequence in a BLASTX vs. NRP (non-redundant proteins) database search.

[0312] Automated sequencing reactions are performed using a Perkin-Elmer PRISM Dye Terminator Cycle Sequencing Ready Reaction Kit containing AmpliTaq DNA Polymerase, FS, according to the manufacturer's directions. The reactions are cycled on a GeneAmp PCR System 9600 as per manufacturer's instructions, except that they are annealed at 20° C. or 30° C. for one minute. Sequencing reactions are ethanol precipitated, pellets are resuspended in 8 microliters of loading buffer, 1.5 microliters is loaded on a sequencing gel, and the data is collected by an ABI PRISM 3700 DNA Sequencer. (Applied Biosystems, Foster City, Calif.).

[0313] The number of times a sequence is represented in a library is determined by performing sequence identity analysis on the cloned cDNA sequences and assigning transcript identity to each isolated clone. First, each sequence is checked to determine if it is a bacterial, ribosomal, or mitochondrial contaminant. Such sequences are excluded from the subsequent analysis. Second, sequence artifacts, such as vector and repetitive elements, are masked and/or removed from each sequence.

[0314] The remaining sequences are compared via BLAST (Altschul et. al, J. Mol. Biol., 215:40, 1990) to GenBank and EST databases for gene identification and are compared with each other via FastA (Pearson & Lipman, PNAS, 85:2444, 1988) to calculate the frequency of cDNA appearance in the normalized cDNA library. The sequences are also searched against the GenBank and GeneSeq nucleotide databases using the BLASTN program (BLASTN 1.3 MP: Altschul et al., J. Mol. Bio. 215:403, 1990). Fourth, the sequences are analyzed against a non-redundant protein (NRP) database with the BLASTX program (BLASTX 1.3MP: Altschul et al., supra). This protein database is a combination of the Swiss-Prot, PIR, and NCBI GenPept protein databases. The BLASTX program is run using the default BLOSUM-62 substitution matrix with the filter parameter: “xnu+seg”. The score cutoff utilized is 75. Assembly of overlapping clones into contigs is done using the program Sequencher (Gene Codes Corp.; Ann Arbor, Mich.). The assembled contigs are analyzed using the programs in the GCG package (Genetic Computer Group, University Research Park, 575 Science Drive, Madison, Wis. 53711) Suite Version 10.1.

### Example 4

### Detection of CA-Sequences in Human Cancer Cells and Tissues

[0315] DNA from prostate and breast cancer tissues and other human cancer tissues, human colon, normal human tissues including non-cancerous prostate, and from other human cell lines are extracted following the procedure of Delli Bovi et al. (1986, Cancer Res. 46:6333-6338). The DNA is resuspended in a solution containing 0.05 M Tris HCl buffer, pH 7.8, and 0.1 mM EDTA, and the amount of DNA recovered is determined by microfluorometry using Hoechst 33258 dye. Cesarone, C. et al., Anal Biochem 100:188-197 (1979).

[0316] Polymerase chain reaction (PCR) is performed using Taq polymerase following the conditions recommended by the manufacturer (Perkin Elmer Cetus) with regard to buffer, Mg²⁺, and nucleotide concentrations. Thermocycling is performed in a DNA cycler by denaturation at 94° C. for 3 min. followed by either 35 or 50 cycles of 94° C. for 1.5 min., 50° C. for 2 min. and 72° C. for 3 min. The ability of the PCR to amplify the selected regions of the CA gene is tested by using a cloned CA polynucleotide(s) as a positive template(s). Optimal Mg²⁺, primer concentrations and requirements for the different cycling temperatures are determined with these templates. The master mix recommended by the manufacturer is used. To detect possible contamination of the master mix components, reactions without template are routinely tested.

[0317] Southern blotting and hybridization are performed as described by Southern, E. M., (J. Mol. Biol. 98:503-517, 1975), using the cloned sequences labeled by the random primer procedure (Feinberg, A. P., et al., 1983, Anal. Biochem. 132:6-13). Prehybridization and hybridization are performed in a solution containing 6×SSPE, 5% Denhardt's, 0.5% SDS, 50% formamide, 100 μg/ml denaturated salmon testis DNA, incubated for 18 hrs at 42° C., followed by washings with 2×SSC and 0.5% SDS at room temperature and at 37° C. and finally in 0.1×SSC with 0.5% SDS at 68° C. for 30 min (Sambrook et al., 1989, in “Molecular Cloning: A Laboratory Manual”, Cold Spring Harbor Lab. Press). For paraffin-embedded tissue sections the conditions described by Wright and Manos (1990, in “PCR Protocols”, Innis et al., eds., Academic Press, pp. 153-158) are followed using primers designed to detect a 250 bp sequence.

### Example 5

### Detection of CA Sequences in Human Cancer Cells and Tissues

[0318] DNA from human cancer tissues, normal human tissues and from other human cell lines is extracted following the procedure of Delli Bovi et al. (1986, Cancer Res. 46:6333-6338). The DNA is resuspended in a solution containing 0.05 M Tris HCl buffer, pH 7.8, and 0.1 mM EDTA, and the amount of DNA recovered is determined by microfluorometry using Hoechst 33258 dye. Cesarone, C. et al., Anal Biochem 100:188-197 (1979).

[0319] Polymerase chain reaction (PCR) is performed using Taq polymerase following the conditions recommended by the manufacturer (Perkin Elmer Cetus) with regard to buffer, Mg²⁺, and nucleotide concentrations. Thermocycling is performed in a DNA cycler by denaturation at 94° C. for 3 min. followed by either 35 or 50 cycles of 94° C. for 1.5 min., 50° C. for 2 min. and 72° C. for 3 min. The ability of the PCR to amplify the selected regions of CA genes is tested by using a cloned CA polynucleotide(s) as a positive template(s). Optimal Mg²⁺, primer concentrations and requirements for the different cycling temperatures are determined with these templates. The master mix recommended by the manufacturer is used. To detect possible contamination of the master mix components, reactions without template are routinely tested.

[0320] Southern blotting and hybridization are performed as described by Southern, E. M., (J. Mol. Biol. 98:503-517, 1975), using the cloned sequences labeled by the random primer procedure (Feinberg, A. P., et al., 1983, Anal. Biochem. 132:6-13). Prehybridization and hybridization are performed in a solution containing 6×SSPE, 5% Denhardt's, 0.5% SDS, 50% formamide, 100 μg/ml denaturated salmon testis DNA, incubated for 18 hrs at 42° C., followed by washings with 2×SSC and 0.5% SDS at room temperature and at 37° C. and finally in 0.1×SSC with 0.5% SDS at 68° C. for 30 min (Sambrook et al., 1989, in “Molecular Cloning: A Laboratory Manual”, Cold Spring Harbor Lab. Press). For paraffin-embedded tissue sections the conditions described by Wright and Manos (1990, in “PCR Protocols”, Innis et al., eds., Academic Press, pp. 153-158) are followed using primers designed to detect a 250 bp sequence.

### Example 6

### Expression of Cloned Polynucleotides in Host Cells

[0321] To study the protein products of CA genes, restriction fragments from CA DNA are cloned into the expression vector pMT2 (Sambrook, et al., Molecular Cloning: A Laboratory Manual, Cold Spring Harbor Laboratory Press pp 16.17-16.22 (1989)) and transfected into COS cells grown in DMEM supplemented with 10% FCS. Transfections are performed employing calcium phosphate techniques (Sambrook, et al (1989) pp. 16.32-16.40, supra) and cell lysates are prepared forty-eight hours after transfection from both transfected and untransfected COS cells. Lysates are subjected to analysis by immunoblotting using anti-peptide antibody.

[0322] In immunoblotting experiments, preparation of cell lysates and electrophoresis are performed according to standard procedures. Protein concentration is determined using BioRad protein assay solutions. After semi-dry electrophoretic transfer to nitrocellulose, the membranes are blocked in 500 mM NaCl, 20 mM Tris, pH 7.5, 0.05% Tween-20 (TTBS) with 5% dry milk. After washing in TTBS and incubation with secondary antibodies (Amersham), enhanced chemiluminescence (ECL) protocols (Amersham) are performed as described by the manufacturer to facilitate detection.

### Example 7

### Generation of Antibodies Against Polypeptides

[0323] Polypeptides, unique to CA genes are synthesized or isolated from bacterial or other (e.g., yeast, baculovirus) expression systems and conjugated to rabbit serum albumin (RSA) with m-maleimido benzoic acid N-hydroxysuccinimide ester (MBS) (Pierce, Rockford, Ill.). Immunization protocols with these peptides are performed according to standard methods. Initially, a pre-bleed of the rabbits is performed prior to immunization. The first immunization includes Freund's complete adjuvant and 500 μg conjugated peptide or 100 μg purified peptide. All subsequent immunizations, performed four weeks after the previous injection, include Freund's incomplete adjuvant with the same amount of protein. Bleeds are conducted seven to ten days after the immunizations.

[0324] For affinity purification of the antibodies, the corresponding CA polypeptide is conjugated to RSA with MBS, and coupled to CNBr-activated Sepharose (Pharmacia, Uppsala, Sweden). Antiserum is diluted 10-fold in 10 mM Tris-HCl, pH 7.5, and incubated overnight with the affinity matrix. After washing, bound antibodies are eluted from the resin with 100 mM glycine, pH 2.5.

### Example 8

### Generation of Monoclonal Antibodies Against a CA Polypeptide

[0325] A non-denaturing adjuvant (Ribi, R730, Corixa, Hamilton Mont.) is rehydrated to 4 ml in phosphate buffered saline. 100 μl of this rehydrated adjuvant is then diluted with 400 μl of Hank's Balanced Salt Solution and this is then gently mixed with the cell pellet used for immunization. Approximately 500 μg conjugated peptide or 100 μg purified peptide and Freund's complete are injected into Balb/c mice via foot-pad, once a week. After 6 weeks of weekly injection, a drop of blood is drawn from the tail of each immunized animal to test the titer of antibodies against CA polypeptides using FACS analysis. When the titer reaches at least 1:2000, the mice are sacrificed in a CO₂ chamber followed by cervical dislocation. Lymph nodes are harvested for hybridoma preparation. Lymphocytes from mice with the highest titer are fused with the mouse myeloma line X63-Ag8.653 using 35% polyethylene glycol 4000. On day 10 following the fusion, the hybridoma supernatants are screened for the presence of CAP-specific monoclonal antibodies by fluorescence activated cell sorting (FACS). Conditioned medium from each hybridoma is incubated for 30 minutes with a combined aliquot of PC3, Colo-205, LnCap, or Panc-1 cells. After incubation, the cell samples are washed, resuspended in 0.1 ml diluent and incubated with 1 μg/ml of FITC conjugated F(ab′)2 fragment of goat anti-mouse IgG for 30 min at 4° C. The cells are washed, resuspended in 0.5 ml FACS diluent and analyzed using a FACScan cell analyzer (Becton Dickinson; San Jose, Calif.). Hybridoma clones are selected for further expansion, cloning, and characterization based on their binding to the surface of one or more of cell lines which express the CA polypeptide as assessed by FACS. A hybridoma making a monoclonal antibody designated mAbCA which binds an antigen designated Ag-CA.x and an epitope on that antigen designated Ag-CA.x.1 is selected.

### Example 9

### ELISA Assay for Detecting CA Related Antigens

[0326] To test blood samples for antibodies that bind specifically to recombinantly produced CA antigens, the following procedure is employed. After a recombinant CA related protein is purified, the recombinant protein is diluted in PBS to a concentration of 5 μg/ml (500 ng/100 μl). 100 microliters of the diluted antigen solution is added to each well of a 96-well Immulon 1 plate (Dynatech Laboratories, Chantilly, Va.), and the plate is then incubated for 1 hour at room temperature, or overnight at 4° C., and washed 3 times with 0.05% Tween 20 in PBS. Blocking to reduce nonspecific binding of antibodies is accomplished by adding to each well 200 μl of a 1% solution of bovine serum albumin in PBS/Tween 20 and incubation for 1 hour. After aspiration of the blocking solution, 100 μl of the primary antibody solution (anticoagulated whole blood, plasma, or serum), diluted in the range of 1/16 to 1/2048 in blocking solution, is added and incubated for 1 hour at room temperature or overnight at 4° C. The wells are then washed 3 times, and 100 μl of goat anti-human IgG antibody conjugated to horseradish peroxidase (Organon Teknika, Durham, N.C.), diluted 1/500 or 1/1000 in PBS/Tween 20, 100 μl of o-phenylenediamine dihydrochloride (OPD, Sigma) solution is added to each well and incubated for 5-15 minutes. The OPD solution is prepared by dissolving a 5 mg OPD tablet in 50 ml 1% methanol in H₂O and adding 50 μl 30% H₂O₂ immediately before use. The reaction is stopped by adding 25 l of 4M H₂SO₄. Absorbances are read at 490 nm in a microplate reader (Bio-Rad).

### Example 10

### Identification and Characterization of CA Antigen on Cancer Cell Surface

[0327] A cell pellet of proximately 25 ul packed cell volume of a cancer cell preparation is lysed by first diluting the cells to 0.5 ml in water followed by freezing and thawing three times. The solution is centrifuged at 14,000 rpm. The resulting pellet, containing the cell membrane fragments, is resuspended in 50 μl of SDS sample buffer (Invitrogen, Carlsbad, Calif.). The sample is heated at 80° C. for 5 minutes and then centrifuged for 2 minutes at 14,000 rpm to remove any insoluble materials.

[0328] The samples are analyzed by Western blot using a 4 to 20% polyacrylamide gradient gel in Tris-Glycine SDS (Invitrogen; Carlsbad Calif.) following the manufacturer's directions. Ten microliters of membrane sample are applied to one lane on the polyacrylamide gel. A separate 10 μL sample is reduced first by the addition of 2 μL of dithiothreitol (100 mM) with heating at 80° C. for 2 minutes and then loaded into another lane. Pre-stained molecular weight markers See Blue Plus2 (Invitrogen; Carlsbad, Calif.) are used to assess molecular weight on the gel. The gel proteins are transferred to a nitrocellulose membrane using a transfer buffer of 14.4 g/l glycine, 3 g/l of Tris Base, 10% methanol, and 0.05% SDS. The membranes are blocked, probed with a CAP-specific monoclonal antibody (at a concentration of 0.5 ug/ml), and developed using the Invitrogen WesternBreeze Chromogenic Kit-AntiMouse according to the manufacturer's directions. In the reduced sample of the tumor cell membrane samples, a prominent band is observed migrating at a molecular weight within about 10% of the predicted molecular weight of the corresponding CA protein.

### Example 11

### Preparation of Vaccines

[0329] The present invention also relates to a method of stimulating an immune response against cells that express CA polypeptides in a patient using CA polypeptides of the invention that act as an antigen produced by or associated with a malignant cell. This aspect of the invention provides a method of stimulating an immune response in a human against cancer cells or cells that express CA polynucleotides and polypeptides. The method comprises the step of administering to a human an immunogenic amount of a polypeptide comprising: (a) the amino acid sequence of a huma CA protein or (b) a mutein or variant of a polypeptide comprising the amino acid sequence of a human endogenous retrovirus CA protein.

### Example 12

### Generation of Transgenic Animals Expressing Polypeptides as a Means for Testing Therapeutics

[0330] CA nucleic acids are used to generate genetically modified non-human animals, or site specific gene modifications thereof, in cell lines, for the study of function or regulation of prostate tumor-related genes, or to create animal models of diseases, including prostate cancer. The term “transgenic” is intended to encompass genetically modified animals having an exogenous CA gene(s) that is stably transmitted in the host cells where the gene(s) may be altered in sequence to produce a modified protein, or having an exogenous CA LTR promoter operably linked to a reporter gene. Transgenic animals may be made through a nucleic acid construct randomly integrated into the genome. Vectors for stable integration include plasmids, retroviruses and other animal viruses, YACs, and the like. Of interest are transgenic mammals, e.g. cows, pigs, goats, horses, etc., and particularly rodents, e.g. rats, mice, etc.

[0331] The modified cells or animals are useful in the study of CA gene function and regulation. For example, a series of small deletions and/or substitutions may be made in the CA genes to determine the role of different genes in tumorigenesis. Specific constructs of interest include, but are not limited to, antisense constructs to block CA gene expression, expression of dominant negative CA gene mutations, and over-expression of a CA gene. Expression of a CA gene or variants thereof in cells or tissues where it is not normally expressed or at abnormal times of development is provided. In addition, by providing expression of proteins derived from CA in cells in which it is otherwise not normally produced, changes in cellular behavior can be induced.

[0332] DNA constructs for random integration need not include regions of homology to mediate recombination. Conveniently, markers for positive and negative selection are included. For various techniques for transfecting mammalian cells, see Keown et al., Methods in Enzymology 185:527-537 (1990).

[0333] For embryonic stem (ES) cells, an ES cell line is employed, or embryonic cells are obtained freshly from a host, e.g. mouse, rat, guinea pig, etc. Such cells are grown on an appropriate fibroblast-feeder layer or grown in the presence of appropriate growth factors, such as leukemia inhibiting factor (LIF). When ES cells are transformed, they may be used to produce transgenic animals. After transformation, the cells are plated onto a feeder layer in an appropriate medium. Cells containing the construct may be detected by employing a selective medium. After sufficient time for colonies to grow, they are picked and analyzed for the occurrence of integration of the construct. Those colonies that are positive may then be used for embryo manipulation and blastocyst injection. Blastocysts are obtained from 4 to 6 week old superovulated females. The ES cells are trypsinized, and the modified cells are injected into the blastocoel of the blastocyst. After injection, the blastocysts are returned to each uterine horn of pseudopregnant females. Females are then allowed to go to term and the resulting chimeric animals screened for cells bearing the construct. By providing for a different phenotype of the blastocyst and the ES cells, chimeric progeny can be readily detected.

[0334] The chimeric animals are screened for the presence of the modified gene and males and females having the modification are mated to produce homozygous progeny. If the gene alterations cause lethality at some point in development, tissues or organs are maintained as allogeneic or congenic grafts or transplants, or in in vitro culture. The transgenic animals may be any non-human mammal, such as laboratory animals, domestic animals, etc. The transgenic animals are used in functional studies, drug screening, etc., e.g. to determine the effect of a candidate drug on prostate cancer, to test potential therapeutics or treatment regimens, etc.

### Example 13

### Diagnostic Imaging Using CA Specific Antibodies

[0335] The present invention encompasses the use of antibodies to CA polypeptides to accurately stage cancer patients at initial presentation and for early detection of metastatic spread of cancer. Radioimmunoscintigraphy using monoclonal antibodies specific for CA polypeptides can provide an additional cancer-specific diagnostic test. The monoclonal antibodies of the instant invention are used for histopathological diagnosis of carcinomas.

[0336] Subcutaneous human xenografts of cancer cells in nude mice is used to test whether a technetium-99m (^{99m}Tc)-labeled monoclonal antibody of the invention can successfully image the xenografted cancer by external gamma scintography as described for seminoma cells by Marks, et al., Brit. J. Urol. 75:225 (1995). Each monoclonal antibody specific for a CA polypeptide is purified from ascitic fluid of BALB/c mice bearing hybridoma tumors by affinity chromatography on protein A-Sepharose. Purified antibodies, including control monoclonal antibodies such as an avidin-specific monoclonal antibody (Skea, et al., J. Immunol. 151:3557 (1993)) are labeled with ^{99m}Tc following reduction, using the methods of Mather, et al., J. Nucl. Med. 31:692 (1990) and Zhang et al., Nucl. Med. Biol. 19:607 (1992). Nude mice bearing human cancer cells are injected intraperitoneally with 200-500 μCi of ^{99m}Tc-labeled antibody. Twenty-four hours after injection, images of the mice are obtained using a Siemens ZLC3700 gamma camera equipped with a 6 mm pinhole collimator set approximately 8 cm from the animal. To determine monoclonal antibody biodistribution following imaging, the normal organs and tumors are removed, weighed, and the radioactivity of the tissues and a sample of the injectate are measured. Additionally, CA-specific antibodies conjugated to antitumor compounds are used for cancer-specific chemotherapy.

### Example 14

### Immunohistochemical Methods

[0337] Frozen tissue samples from cancer patients are embedded in an optimum cutting temperature (OCT) compound and quick-frozen in isopentane with dry ice. Cryosections are cut with a Leica 3050 CM mictrotome at thickness of 5 μm and thaw-mounted on vectabound-coated slides. The sections are fixed with ethanol at −20° C. and allowed to air dry overnight at room temperature. The fixed sections are stored at −80° C. until use. For immunohistochemistry, the tissue sections are retrieved and first incubated in blocking buffer (PBS, 5% normal goat serum, 0.1% Tween 20) for 30 minutes at room temperature, and then incubated with the CA protein-specific monoclonal antibody and control monoclonal antibodies diluted in blocking buffer (1 μg/ml) for 120 minutes. The sections are then washed three times with the blocking buffer. The bound monoclonal antibodies are detected with a goat anti-mouse IgG+IgM (H+ L) F(ab′)²-peroxidase conjugates and the peroxidase substrate diaminobenzidine (1 mg/ml, Sigma Catalog No. D 5637) in 0.1 M sodium acetate buffer pH 5.05 and 0.003% hydrogen peroxide (Sigma cat. No. H1009). The stained slides are counter-stained with hematoxylin and examined under Nikon microscope.

[0338] Monoclonal antibody against a CA protein (antigen) is used to test reactivity with various cell lines from different types of tissues. Cells from different established cell lines are removed from the growth surface without using proteases, packed and embedded in OCT compound. The cells are frozen and sectioned, then stained using a standard IHC protocol. The CellArray™ technology is described in WO 01/43869. Normal tissue (human) obtained by surgical resection are frozen and mounted. Cryosections are cut with a Leica 3050 CM mictrotome at thickness of 5 μm and thaw-mounted on vectabound-coated slides. The sections are fixed with ethanol at −20° C. and allowed to air dry overnight at room temperature. PolyMICA™ Detection kit is used to determine binding of a CA-specific monoclonal antibody to normal tissue. Primary monoclonal antibody is used at a final concentration of 1 μg/ml.

[0339] All publications and patent applications cited in this specification are herein incorporated by reference as if each individual publication or patent application were specifically and individually indicated to be incorporated by reference.

[0340] Although the foregoing invention has been described in some detail by way of illustration and example for purposes of clarity of understanding, it will be readily apparent to those of ordinary skill in the art in light of the teachings of this invention that certain changes and modifications may be made thereto without departing from the spirit or scope of the appended claims.

What is claimed is:

1. An isolated nucleic acid comprising at least 10 contiguous nucleotides of a sequence selected from the group consisting of the human polynucleotide coding sequences hRxx-yyy shown in Tables 1-129, or its complement.

2. A host cell comprising a recombinant nucleic acid of claim 1.

3. An expression vector comprising the isolated nucleic acid according to claim 1.

4. A host cell comprising the expression vector of claim 3.

5. The polynucleotide according to claim 1, wherein said polynucleotide, or its complement or a fragment thereof, further comprises a detectable label.

6. The polynucleotide according to claim 1, wherein said polynucleotide, or its complement or a fragment thereof, is attached to a solid support.

7. The polynucleotide according to claim 1, wherein said polynucleotide, or its complement or a fragment thereof, is prepared at least in part by chemical synthesis.

8. The polynucleotide according to claim 1, wherein said polynucleotide, or its complement or a fragment thereof, is an antisense fragment.

9. The polynucleotide according to claim 1, wherein said polynucleotide, or its complement or a fragment thereof, is single stranded.

10. The polynucleotide according to claim 1, wherein said polynucleotide, or its complement or a fragment thereof, is double stranded.

11. The polynucleotide according to claim 1, comprising at least 15 contiguous nucleotides.

12. The polynucleotide according to claim 1, comprising at least 20 contiguous nucleotides.

13. A microarray for detecting a cancer associated (CA) nucleic acid comprising:
at least one probe comprising at least 10 contiguous nucleotides of a sequence selected from the group consisting of the human polynucleotide coding sequences hRxx-yyy shown in Tables 1-129, or its complement.

14. The microarray according to claim 13, comprising at least 15 contiguous nucleotides.

15. The microarray according to claim 13, comprising at least 20 contiguous nucleotides.

16. An isolated polypeptide, encoded within an open reading frame of a CA sequence selected from the group consisting of the human genomic polynucleotide sequences hDxx-yyy shown in Tables 1-129, or its complement.

17. The polypeptide of claim 16, wherein said polypeptide comprises the amino acid sequence encoded by a polynucleotide selected from the group consisting of hRxx-yyy shown in Tables 1-129.

18. The polypeptide of claim 16, wherein said polypeptide comprises the amino acid sequence encoded by a polypeptide selected from the group consisting of hPxx-yyy shown in Tables 1-129.

19. The polypeptide of claim 16, wherein said polypeptide comprises the amino acid sequence of an epitope of the amino acid sequence of a CA polypeptide selected from the group consisting of hPxx-yyy shown in Tables 1-129.

20. The polypeptide of claim 16, wherein said polypeptide or fragment thereof is attached to a solid support.

21. An isolated antibody or antigen binding fragment thereof, that binds to a polypeptide according to anyone of claims 16-20.

22. The isolated antibody or antigen binding fragment thereof according the claim 21, wherein said antibody or fragment thereof is attached to a solid support.

23. The isolated antibody or antigen binding fragment thereof according the claim 21, wherein said antibody is a monoclonal antibody.

24. The isolated antibody or antigen binding fragment thereof according the claim 21, wherein said antibody is a polyclonal antibody.

25. The isolated antibody or antigen binding fragment thereof according the claim 21, wherein said antibody or fragment thereof further comprises a detectable label.

26. An isolated antibody that binds to a polypeptide, or antigen binding fragment thereof, according to any of claims 16-20, prepared by a method comprising the following steps of: (i) immunizing a host animal with a composition comprising said polypeptide, or antigen binding fragment thereof, and ii) collecting cells from said host expressing antibodies against the antigen or antigen binding fragment thereof.

27. A kit for diagnosing the presence of cancer in a test sample, said kit comprising at least one polynucleotide that selectively hybridizes to a CA polynucleotide sequence selected from the group consisting of the polynucleotide sequences hDxx-yyy shown in Tables 1-129, a fragment thereof, or their complement.

28. A kit for diagnosing the presence of cancer in a test sample, said kit comprising at least one polynucleotide that selectively hybridizes to the sequence of a polynucleotide sequence selected from the group consisting of the polynucleotide sequences hRxx-yyy shown in Tables 1-129, a fragment thereof, or their complement.

29. An electronic library comprising a polynucleotide, or fragment thereof, comprising a CA polynucleotide sequence selected from the group consisting of the polynucleotide sequences hDxx-yyy shown in Tables 1-129.

30. An electronic library comprising a polynucleotide, or fragment thereof, comprising a CA polynucleotide sequence selected from the group consisting of the polynucleotide sequences hRxx-yyy shown in Tables 1-129.

31. An electronic library comprising a polypeptide, or fragment thereof, comprising a CA polypeptide sequence selected from the group consisting of the polynucleotide sequences hPxx-yyy shown in Tables 1-129.

32. A method for screening for anticancer activity in a potential drug, the method comprising:
(a) providing a cell that expresses a cancer associated (CA) gene encoded by a nucleic acid sequence selected from the group consisting of the sequences hDxx-yyy shown in Tables 1-129 or fragment thereof;
(b) contacting a tissue sample derived from a cancer cell with an anticancer drug candidate; and
(c) monitoring an effect of the anticancer drug candidate on an expression of the CA gene in the tissue sample.

33. The method of screening for anticancer activity according to claim 32, wherein the CA gene comprises at least one nucleic acid sequence selected from the group consisting of the sequences hRxx-yyy shown in Tables 1-129.

34. The method of screening for anticancer activity according to claim 32, further comprising:
(d) comparing the level of expression of the in the absence of said drug candidate to the level of expression in the presence of the drug candidate.

35. The method of screening for anticancer activity according to claim 33, wherein the drug candidate is an inhibitor of transcription and modulates the activity of a CAP sequence (hPxx-yyy) selected from the group consisting of SEQ ID NOS: 28, 42, 56, 142, 167, 169, 173, 175, 177, 185, 187, 193, 195, 227, 255, 258, 260, 274, 286, 298, 300, 302, 304, 322, 324, 392, 394, 412, 460, 462, 636, 728, 789, 861, 901, 907, 927, and 977.

36. The method of screening for anticancer activity according to claim 33, wherein the drug candidate is a G-protein coupled receptor antagonist and modulates the activity of a CAP sequence (hPxx-yyy) selected from the group consisting of SEQ ID NOS: 46, 913, 915, 921, and 933.

37. The method of screening for anticancer activity according to claim 33, wherein the drug candidate is a calcium binding protein antagonist and modulates the activity of a CAP sequence (hPxx-yyy) selected from the group consisting of SEQ ID NOS: 48, 50, 201, 336, 338, 346, 404, and 406.

38. The method of screening for anticancer activity according to claim 33, wherein the drug candidate is a ubiquitin cycle antagonist and modulates the activity of a CAP sequence (hPxx-yyy) selected from the group consisting of SEQ ID NOS: 34, 36, 62, 104, 106, 108, 110, 151, and 153.

39. A method for detecting cancer associated with expression of a polypeptide in a test cell sample, comprising the steps of:
(i) detecting a level of expression of at least one polypeptide selected from the group consisting of hPxx-yyy shown in Tables 1-129, or a fragment thereof, and
(ii) comparing the level of expression of the polypeptide in the test sample with a level of expression of polypeptide in a normal cell sample, wherein an altered level of expression of the polypeptide in the test cell sample relative to the level of polypeptide expression in the normal cell sample is indicative of the presence of cancer in the test cell sample.

40. A method for detecting cancer associated with expression of a polypeptide in a test cell sample, comprising the steps of:
(i) detecting a level of activity of at least one polypeptide selected from the group consisting of hPxx-yyy shown in Tables 1-129, or a fragment thereof, wherein said activity corresponds to at least one activity for the polypeptide listed in Table 130; and
(ii) comparing the level of activity of the polypeptide in the test sample with a level of activity of polypeptide in a normal cell sample, wherein an altered level of activity of the polypeptide in the test cell sample relative to the level of polypeptide activity in the normal cell sample is indicative of the presence of cancer in the test cell sample.

41. A method for detecting cancer associated with the presence of an antibody in a test serum sample, comprising the steps of:
(i) detecting a level of an antibody against an antigenic polypeptide selected from the group consisting of hPxx-yyy shown in Tables 1-129, or antigenic fragment thereof; and
(ii) comparing said level of said antibody in the test sample with a level of said antibody in the control sample, wherein an altered level of antibody in said test sample relative to the level of antibody in the control sample is indicative of the presence of cancer in the test serum sample.

42. A method for screening for a bioactive agent capable of modulating the activity of a CA protein (CAP), wherein said CAP is encoded by a nucleic acid comprising a nucleic acid sequence selected from the group consisting of the polynucleotide sequences hRxx-yyy shown in Tables 1-129, said method comprising:
a) combining said CAP and a candidate bioactive agent; and
b) determining the effect of the candidate agent on the bioactivity of said CAP.

43. The method of screening for the bioactive agent according to claim 42, wherein the bioactive agent affects the expression of the CA protein (CAP).

44. The method of screening for the bioactive agent according to claim 42, wherein the bioactive agent affects the activity of the CA protein (CAP), wherein such activity is selected from the activities listed in Table 130.

45. The method of screening for the bioactive agent according to claim 42, wherein the bioactive agent is an inhibitor of transcription and modulates the activity of a CAP sequence (hPxx-yyy) selected from the group consisting of SEQ ID NOS: 28, 42, 56, 142, 167, 169, 173, 175, 177, 185, 187, 193, 195, 227, 255, 258, 260, 274, 286, 298, 300, 302, 304, 322, 324, 392, 394, 412, 460, 462, 636, 728, 789, 861, 901, 907, 927, and 977.

46. The method of screening for the bioactive agent according to claim 42, wherein the bioactive agent is a G-protein coupled receptor antagonist and modulates the activity of a CAP sequence (hPxx-yyy) selected from the group consisting of SEQ ID NOS: 46, 913, 915, 921, and 933.

47. The method of screening for the bioactive agent according to claim 42, wherein the bioactive agent is is a calcium binding protein antagonist and modulates the activity of a CAP sequence (hPxx-yyy) selected from the group consisting of SEQ ID NOS: 48, 50, 201, 336, 338, 346, 404, and 406.

48. The method of screening for the bioactive agent according to claim 42, wherein the bioactive agent is a ubiquitin cycle antagonist and modulates the activity of a CAP sequence (hPxx-yyy) selected from the group consisting of SEQ ID NOS: 34, 36, 62, 104, 106, 108, 110, 151, and 153.

49. A method for diagnosing cancer comprising:
a) determining the expression of one or more genes comprising a nucleic acid sequence selected from the group consisting of the human sequences outlined in Tables 1-129, in a first tissue type of a first individual; and
b) comparing said expression of said gene(s) from a second normal tissue type from said first individual or a second unaffected individual;
wherein a difference in said expression indicates that the first individual has cancer.

50. A method for treating cancers comprising administering to a patient an inhibitor of a CA protein (CAP), wherein said CAP is encoded by a nucleic acid comprising a human nucleic acid sequence selected from the group consisting of the sequences outlined in Tables 1-129.

51. The method for treating cancers according to claim 50, wherein the inhibitor of a CA protein (CAP) binds to the CA protein.

52. The method for treating cancers according to claim 50, wherein the inhibitor of a CA protein (CAP) is an inhibitor of transcription and and modulates the activity of a CAP sequence (hPxx-yyy) selected from the group consisting of SEQ ID NOS: 28, 42, 56, 142, 167, 169, 173, 175, 177, 185, 187, 193, 195, 227, 255, 258, 260, 274, 286, 298, 300, 302, 304, 322, 324, 392, 394, 412, 460, 462, 636, 728, 789, 861, 901, 907, 927, and 977.

53. The method for treating cancers according to claim 50, wherein the inhibitor of a CA protein (CAP) is a G-protein coupled receptor antagonist and modulates the activity of a CAP sequence (hPxx-yyy) selected from the group consisting of SEQ ID NOS: 46, 913, 915, 921, and 933.

54. The method for treating cancers according to claim 50, wherein the inhibitor of a CA protein (CAP) is a calcium binding protein antagonist and modulates the activity of a CAP sequence (hPxx-yyy) selected from the group consisting of SEQ ID NOS: 48, 50, 201, 336, 338, 346, 404, and 406.

55. The method for treating cancers according to claim 50, wherein the inhibitor of a CA protein (CAP) is a ubiquitin cycle antagonist and modulates the activity of a CAP sequence (hPxx-yyy) selected from the group consisting of SEQ ID NOS: 34, 36, 62, 104, 106, 108, 110, 151, and 153.

The application's sequence listing, which the Patent Office published only in electronic form, follows.

SEQUENCE LISTING (981 sequences)

SEQ ID NO: 1 - DNA, 57889 bp, Mus musculus
  misc_feature (1)...(57889): n = A,T,C or G
gcacaaaatcactcccacccattccttaaagtaagaaaaagcagaggtaagccaagaggtaaaattgccaacaatgatgggttctattcgagttccattgaggcttaaaacctggcattagatgtaaagaattgaggaatcatcatgcatcaacagcatggtttcaggaacacagagctcttcagttctcactagtggaagcacccccagccacaggaacatccatgtcctcatagctctgcttgttttaaattgctctggtcagccgctctgcgacccacagctgttgtcgatgatcctggggaaacaaacgaacagaccctctcgcccacgtcaacaccagtgggcaatgatttccacgcccttatgacaatctgattcacctgctcaaacacctgcactggatatcctgtctgttattgtgcaaagcgaccttgatcaagcagcatatctctatcccatgctggatttcctgcagcagagttagccgctgcctgttcatttgcaaattcaacaaggaaggctttccaatctaaatactgcccaggtgaaaggcatgcctttaccaagcctgcccaatcggacggcgtcatgcagtgtctattcaatgcctctacttgagccacagtataggaggcagttaagccgtatatctgcacagactcagccaaattcctgattactttgaaatctagaggctcatgatatctctgccctgcttggtcagtggaaataggacatcccagcaaggagaaactaacctctctccaaacctccagacagaaggtccgcctataggtggctgccgaggaggcatagggagggggcgcagaagctaattcaccttcctcctctgcctcggctcttttgttttgtcctttctgtccacctgataacactgtgtctcctttctttttcctttttctttttaagcccttctcctcttccgacgtactttcttgttgctctgtaagaattttctgacctgtcttgactgcctctacacacagtttcaaacagtaacagagtccatatatcagaacaaacaagaccaaaactatcagacctacccacaaagggtcaatgggagaaaaaagcataactcatgaaccttaagttgtcccaaagccgggaaccttatcgtctcaatcccttctttccttctctctttcccttctctccttcctttctgtcctttcttttctttctttcccttcctttcctttcctttcctttcctttcccttttcctttcctttccttcactatttccttttctttatcactgattcctttcattttcctcccttttcttttccttttttaaaaaaacatatccccctttaacccagggatcaatttgtgagacttaccggtaccaccgttcctcagctgaagagttctgaatccacgcagtcagatccttctcagcagtctgtttgcaagaacacttcattaccaccattccccagctgaacagttctgaatccatgccggatccttctcagcagtctggtttatgggaacactttattaagcgctccttcccctcgatgtagttctgaatcctccctgtagcagggggtcttcgctcttgcctgaagatgtttctttacccgggtttcggcaccacttcttgtgcgccccctgactcgccagcaagaaccacactgcaacaggatccttctgcacacgtttattgggagagcttgattgccgaggcaaagagacaccaagcccagaactagtgctgcttatataggcctaggagaggcatgtctcacacccggattggttatgcatgggttatgcttaccacctcatttgcatttctcacatctgattggttaacatgtctctcatctgattggttaacttgtctctcatctgattggttaattctcaaaacctcatcttggcaaaaaaaaaaaaaaaaacctttactgcctatgtatgcgtggtagccagcgccatcctgcaacagcacatgtggcttcccacaggaaggttgtccacaccagcaatcatcacaagcctgatcagaaatggtagcattaactagatagctatgacaaattccacaagccagcataaagtcagatctgtctgggatggcacgagtttaaaaatcagttcctaaaatgtctttcaacttgtgtagacaacttttctctgcctgccacaaatgttcattatctttactctgagggccttttccatgtggtcagtcagctccaacaaggcagcattcagtggcacaggagcatgcctgggtcttcttctgttttcatagatacctcatcccctaatgcaattgtttctcactattgccctttaagctgcactttgaatacccagatctcatccatttattccatagcatccaaaaatgctttcagtgattctcatgctgccaaaacctcactctgaatgcttactggaagtccatggtatctaggaaacaggtaagggagctgtttcttagggtcattaatgatgaaacatcatgatcaaaggcaacgtgcaggggaaagggtttgtttggcttacaaatcctgaatcaccatccactgagggaagccaagacaggaagtcaaactgggtgagaacctggaggcagaagctgaagcagaggccatgaagagatgctgctcactggcttgctcagcctgctttcctatagcattcaggaccctctgcctgagggatggcaccatcctcaatgggtgaggcctcctctaacaattattaattaagaaaatgccctacaggcttgcctaaagccccattatatggagctgatttctcagctgaagctcccttctttcagatgactatagcttgtctcaagttgacctataacttgtactgtaagatcgagaatcgacaaatgggacctaatgaaactccaaagtttctgcaaggcaaaagacaccgtcaataagacaaaaagaccaccaacagattgggaaaggatctttacctatcctaaatcagataggggactaatatccaacatatataaagaactcaagaaggtggacttcagaaaatcaaataaccccattaaaaaatggggctcagaactgaacaaagaattctcacctgaggaataccgaatgcagatctcagatctcatccatttattccatagcatccaaaaatgctttcagtgattctcatgctgccaaaacctcactctgaatgcttactggaagtccatggtatctaggaaacaggtaagggagctgtttcttagggtcattaatgatgaaacatcatgatcaaaggcaacgtgcaggggaaagggtttgttagcatgcaccagctaactgtaaaagccaagaaacaatgtgttggttcggagggcatttaaacttggagtaagatgttgtccactagaagcatcctctggttttaacttaacatcactgaggtaggtatccacccatagaagtttatcccaaccacagctcctgtctctagaataagccagtgaggtgaagagagagtgcctgaggttccaaaagccatcttaaactccataaagctcattagaccagagcctgctgcattttctgttagactgtttgatgggttccatttaatattgctcacaggtgccaagcacataggaaccctttgttcttcagttgtaaatctctgggcaacagtattacgaaatggaggcttcttccctgagccaaggaatctttcataggctattttcttggagcacttgatgtcctgggagcctcaagaggctttcattggggtctgaacttgaaaatggggcaatttggcatatgccttcactcaaatgcattaatattgatttatctgttcatactttttaatgggtgaaaatctgtatcaatcaatacttgttttgatattcaacttacccttatttggcccagagaaaacctttcaaactgacttcattctcctttggttctctgagcacttccttggtagctgctctaaatgttccatgtgcaacctgctgttcccatgctccagtgctggagccaggtgtttcttcaggggtcttgatgtcctttagtgaagcattcagtatgtagaagccaagattcagatgctgagtgtgctcattgttataggcaggtaagttaactgctctaaggcccctcagaggacagtgtcaagcagtgtctctctctctctctctctctctctctctctctttctctctctctctctcgtgtgtgtgtgtgtgtgtgtgtgtgtgtgtgtgtgtgtgtgtgcatgtctctgtgtgtttcggtatgtgtaagtcttccttatctcttacttctatacatgtctgtgtttcttgaaaactacaggttccaacaagccattctcattcaaatgcagaagctcagactttacaatatttctcttttgcacttctccaattcccctttccagtgaaatttcaattaaactgagtaagcctgtgtacagtcagtctcctaatgccactgctgtgtctcctgcttgactatcttctcagcctcctgggcactggaactccccaccacacagcccctctgcctcatgtccccattgttccttaatgactttaggattgtcttgttatgaatggaaaggatgtaggggataaacttctaaactttgtgaatggaggctgggactatagcttactgttggagcacttgctaggatgtatgagcaccccagcactattaaaaatgaaactaaataatatgcatgcatgatgaagatgaggggatagaaaggacagtatggtaacaaaaatatggttagataagaggaatcagctttgatattccatggcatggtaggaaggctacaattaccaataatttactatctatttcgaatagccaaatgtgccagatagtttttgtcaacttggcacaagccaggaacatctgggaaggaggaacttcaagtgataaaatgtctccatcaggctggcctgtaggcaaatctgtgggatatttccttaattaacgatgggtgtggaagggtcagctcactgtgggcggtgctccccatggggaagtagcccaagtgctcagaaagcaggctgaacaagccatagggagcaaaccaacaaacagcatcactctgtttctttacctgtgggttctgtttatctcattccttccctgacttcctgtcctgtcttccccatggtggactgtgacctgggagttgtaagaggaagtaaagactatcttccctcaagttacttctggccacgttccttatcactgcgacagaaacccagataggccaccaaaagatagaattttttttatattcttaaaagttttaaaggtatccaggtgtggtggctcacacctttgatcccagcactcaggttgcagatctctgtaagttgaggccagcctggcctacaaagtgagtccagggcagccagagatattacacagattaaccttgtcttgaaacaccaaaaatgtagttaatattaattgatttttattaattatcattcatgggtattaattatcagttgatgaaattataaatgatgtgttgttttattatcaatcagttcattgattaattgactaatagtaattaacacctttgttcattcagttcccagagaaaagacaaaaaacctttttgtttataataagccttaacagcactagagctgggcagatatcaaccctctgtgctattttgtctacttccctgtcaataaccccgagttataacttgccatgttctgtctgggactctcttaactccaactagtcagccctcgtggccatgttttcacacagtgccttctctgctctccttatctccctcccttctcgggtgtggtctctgccttaggcccaaagcctggcaaacaaagtcccccttccatgtcttctgcccagctacagtctataggcatctttattcaccagtcagggagaacttggagtcaaggttacatagcatcacttggtatatgcaaggatctattcacccctgggggcaaggagaccatggaggccagtatttagcattataacacatagtaacagatcaaactggacctaaattctacacaaaaatgaataaataattaaatgtaatggtaaaattttaagatgatgaattttctaactactctgaattgatcattacacactatgagcatgtgtttcataattgtgtataattaatagcatattaattaattatatattagggattaaagccatgtgtcaccgtgcctggttgattgactgatgttgattcctgggaccctccctatcttctggatttttctttccaatttctctttgtttgccttttaaatgctggttctgtccattctcctttgtcaagcagattttttattctttttttttctttctttttaaaatatacttgatttagaaccttgttttatttaaatgtgctcttcatgttacaggacaacctttcagggtcaatcaaatatgtgacatcagggagtttcctccaaacttctaaaggctcacaggcagggctctaaacttctctaaggcagcttcaggatccaaaggagcacggcacagtaattgtggcctaagaagtaagggttcctgccaggacacgggctgagaaagaaggtcagctgggtgctttctctgcctctctgagcttgcaggctctcaccccagcatctggcttctgagtcttcattggcaaaattggacaattgaaattttgtttaaaaaacaacaaagtatgaaactatattttgtgtgtgtgtctgcgcaggagtgtatgttttttgagacagggttcctggcctgactggcttgaaacttgctttgtagattatattggccttgaactctcagagatccacctactcctgcctcgtgagggctggaaataaaggcatgcacctccatgctgggctaaaactctactttttgacataagatgttggtaacagtctcactatctttgtgttttctttaacaattaagtatgagtcaacattccatgcatccaaaaacccagaaagattggaggctttgggcgtcgacttggcttctgtcttcactgtattaagtttgacatctgcaagcatctttgcattgtattgttttctcattgttttatatgaaggaccgaatgccacaacagtttcaaatttaaaaaactctctaaacaggctggcaagtggtgtcaacagcattagctaaaaaattttttttcagcacgcaaagtgtgccaaagaatgtggtgttagtgcaaaatacataaactcaaatattatttcacaaaacttaattttttttacttcactgaaatcactaaattattaaggaacaaaatagtcacatcacgtgcagacattattgataataggccataaattttagcaagtacaattagaaattaaagcattaaaagaagaaagagcagaaagagaaaagtcgtgggacacttgcatctgcacagctccccttcctctgcactgccagtccctcctgcgtgccctagtggtctctgtcactgacctgcctgctgccaacacaaagcacaaaccctctaagcatacaaactctgtcagccttcctcttaagaagggaagtgccagttgtggtgatgcctgtgagcccaacatttgggagaccgatgtgggactgtctgtccaaaacctccctgtgctgtgtcgggagtgaggtggagaagatggaggagtgaaactccaactgtggtccctctgggtgtgatcacaggagcacgagctttcacatttctgcagctccttggttggaactttcgggtgcagctgagagtccaagagggttagcacagcatcctaaagtcagaactcaaaagtcaaaaagcaaagccgggcgttgtggcacacacctttaatcccagcactcgggaggcaggcagatttctgagttcgaggcctgcctggtctacaaagtgagttccaggacagccagggttacacagagaaaccctgtctcgaaaaacaaaacaaaacaaaaaaacaaacaaaaaaagcagccagtggcagctgagtgccctggagatctttgcacacctctgaagagaacactcttcctcttgggtccattcacacagtcagcaaatacagtcacactttaaatgcaaagctcctggctgctcaaggctcatagcatttgctacctcaggagggcagcaacatcacacaaaccaagactgatagcaagggccaacctactaaaatgctagcccttgttccctccatgccttgaggaaagacaccatgaataccacttccctttgaaagccttcacttcatgccccatctgctgttttggcgctgacaaaagtgtaactgtattgaggctggagtatattggggtgtgggtgtttggggtagaaggtaccgatatctcaatatggcattagtgctgggcatgtagctcagtgggtgacagagcctgcctctatctgaccaccacagggaaacaactgaactgacgctaacaggttgatgtatgcctgaggtgagcaagcatctggagtttccttcaccatctattgtcctcgtgttaatggcataagagaagccagttagcaggcctgtggctgagtcctctcacttactgaccacactgcctccaggttgtcttacacgtcacagtcgcctacatgttcacccactccctcaatcaatcactaaatccgtttttagagtcgtctttgaacgtatgggacttctgataaattctccagtagacatcaccagtcaggtgtccccttggggcctccgaatgtccaaaacagaatggacagtctcttctcaaatctgttcatccccaacatagtccaaccagtgagctgcactaacagcagttcagccactggagttggagactcaggagttgaatgcctctccttccctccctctcacgtcccagcctgtgttgtcttctggtcatcgccactgctggcccacatctaaggctcatcaggcctctaagatatttctacatggtttctctgtctcatactacggctcttcctcctgtttctttgctttggttgacatggtctatcttacatgtaaatctagtcagataannnnnnnnnnnnnnnnnnnnnnnnnnnnnnnnnnnnnnnnnnnnnnnnnnnnnnnnnnnnnnnnnnnagaaatctgcctgcaattgagtctcttaaggtaacatttttcagctcttctctgtccattagcctttctttctgctccactgagcacaggactgaggtcgcaccccgtgcctagctgcactggcattcagaggatacaggaggcttgtgaacttccagcttttgtaaactatgaagtgtgaaccatcacaggaccaggaagccaatctaatggattacaatcagtcttgatttataaaagaaaaacagaatagtaaacaatagagtattgtttgtgaaccttcagtataaaatgtgtgtcttttagtgagttgtattaaaattaaatgaataagccagcacttttttggtttggttgttttgtcttttttgttttgctttatttagcaagatcaacttcgcctaggggaaaactaaaaccgcacaggtagctaaaaatttcatcgtttctgtggattgccacaggtctcaaaggctgagcttcaaagaaggaagtgcccactgtagttagttctaggtttctgaaaaacggaggaagttaaaatcaactacaaaaatccaggaactgtggccatgtgtccataaagcctagtggtcccgcagtaagtctactgttgtggaaattaagcttctagggcctcacatgtgatactggaactcttatatgtattccctgctgttgaggatctgacttgagtgtgaagatttaacagtttaactggctgcttccccaacattctgttgggaagaacagagagctttgggccaatgaggtgccgccattgggtttccatagtgataaaagaaacaaaccatcctggggcacaagtcaggctcagtcaaaggactagctagagggtgaattcctcctcaagggactttcaggtaataactggggacaactgaactgtcttctaagggaagctcctggggtggatggccgcggaacccttctaaacaccactggctgggtttgcaagtcttcaaggcagtctggagatttctgccttggcatctcaaccacttgggaataaacacagcaaccatgagttctgaaacaccttgattgggtgagaaatgacccctgagtttccctaaaacattatggtttctttaagactcacaacctgggaagggaccacaaggccaatgaatctttgaaagaattaaagtaagatcttgggaagagtttccagccgcttgttgaaaacccaccctttctaaagctctgctcactcagcgacaacttccggctgtgagtgaaacaccagggagataagacaggggaagaaaagaagggaacacacacacgtgcccacacgcacatacatccacacacatatcctcacatgtctaaacatacacacacacacacactcacacacgcacacacacacacacacacacacacacacgcacacacacacgcccgaatgcacatacatctgcacacgtgcccgcacgcacatatatcagcacacacatccacacatgtatgcgcgcacacacacacacgcacacgcaaactcaccaaccagtaaacgatcattatcaaaaggccctaaaagtggtccttaccagcttccttgcctcagtttcaaccctgacaccctcagacctacctcgggatttgctaagagcccaagtctgttctaagggctcaatagctttgcattactgattttaaatgctttgaatatggttcccatagatgcaaagggaacttttctttttaagaaaaagtaataaataataaggcgtttttttgtttagaatgggaaaaaaggaaacaaacatttatcaatacaaaactggttaaaatataagtaagtgaactgatataaatgtagagttgtgaggcaagagaaatggcccagggattagggtgcgtgctgagcttcaagagaacctcaggttcgttgccataaaccccatctaatggctcccgacagcctgtagctccagctcccgagtggctaatgctggcttctggcttccatggctcctgaacacttatgatctacacgcacacagtcaaacacacacacacaaatacgaataaagcttttttttttttttaatttagaattgcagccgggcggtggtggcgcatgcctttgatcccagcacttgggaggcagagacaggcagatttctgagttcaaggccagcctggtctacaaagtgagttccaggacagccagggctgtacagagaaaccctgtctcaaaaagacaaaaaaaaaaaaaaaatttagaattgcaatgatacagaaacatatcccagacttacttgaaaggttgtttaaattttgctttaagataatacgatgctggaggagtaaaatgcagtgggggaggggtatagacaagcaagattagtcacactgacattgttgaatctaggggataggtgagcttactttactctttctctacatttggaatacttttatatttctttttttttatttatttttattttatttatttatttatttatttatttatttattatatgtaagtacactgtagctgtcttcagacactccagaagagggagtcagatctcattacggatggttgtgagccaccatgtggttgctgggatttgaactccagaccttcggaagagcagtcgggtgctcttacccactgagccatctcaccagccctcttttatatttcttgattgtaaaaaaaaaaccttacatttaaaaatgatgacatcttttacataataggaactcgtggtattatcttaaaaaatatatccaggatgtaaatatagtttgttcctgtttataggaaattatgtaagtctgtttctttagaatgcagaaaattctggaaggcatacactcaagtattctcactagtcatctctggattttgtatttttgatgtttttcacttccttaatcttttctgtaatgactgtctctgtaacaagctgatttcaagttaatatacacatacatacaaataaacctatgttcttttaaaaagagagagtttttctatatgtaaaagccatgtagttcatgggattcctttccatgcacagggctgagaacatggttcttagtaaatgttcagagcaatgcaacccagcccggagcagctcaagctagacttttaaaggtgctcatttaactttaaattttatttttttctaagatttacttattattattacatctaagtacactgtagctgtcttcagatgcaccagaaaagggcatcagatctcattacagatggttgtgagccaccatgtggttgctgggatttgaactcaggacctgctgaagagcagtcagtgctcttaaccactgagccatctctccagcccaactttaaattttaaataaaacaatgtttaattttataagctcaaaagagcaggcttcctacgttcccatgtctaatgtgtaaagtcaggcctacctgatttcaaagaacccccaaaattttcataacaggtgtcatgaggggaacaggaaacaaagttctagcattctgacctaattttcagtttttagtacctgagctacaaagtctctttctctatgtacaggtgtgtgtgcgcgtgcatgcgtgcgtgtgcgtgtgcacatgtgtgctcacacgcttatatatgtatgtatgtatgtatgtatgtatgtatgtgcatgtatgcatcatcaggctctgggggggtgggaacagggatgggtctggttctgaaaacacagggacactattgattgtaccatagactccatgtactgtcaagtctacctatcagtgtcttcaggattcagatctctccctgtctgggctcacccgagagtaactctcatgcagcaatcataaagagggctgtttttagttcccttctgcaattcagacacatgacccaaattaagaaacagggccatttgtgctccagttggagaaggacaacaaatttcccggaaagttctgtgcagaacccgctgtgaggaatctcttcatgcagagcaagctatgtgaacttgaggaggactgaggtcataggaactgagctaatgctcccaactttgcaacgtgttgcctctgtgacatccatgcgtgtcacctgaaggctagccagcaatagttaggcaaagattgtacacttggattacagtcatgactcaattattcaagatatgtatttgctttcctgtcaagtagcaaccataaggcagtgacagcctgtgtcagctcagcctctgcccttgttcttggtgctgccctgtcttctgttgtccctgtctctgtttgccttggtttctgagtggtttaactctctgtggttgtttttgcatctcaacaggagcccctggcctagcaagactgccttgtaccatggaccccaatcctttcatctactgtacctgctgtgactgctgcaaattgggacaaccaaagctaatcaagaccccttatccacttccaaagcaccccacggggaagtttaagtaaggataagctaggttggactaggaacaggaggtgaaagtttcctctgtggtcctctttgccttacaagacttcccagtagagagcttgccaccaattccccacagaacagggtgccctgcattcctgccttcccctccagcctcctgttgccctgatcttgcaagcctgtttgactcaatggcatttcagtaaagtcccaactttgcaattttgtggtacaatgtgtgtgtgtgtgtgtgtgtgtgtgtgtgtgtgtgtgtgtgtgtgtgtgtaaaacacccagagagctttggtgccagctgcccctccccaggaacctggccttggggttcgtgctgatgaccaggagatagtagataagaacctgcaccttggacctgaggtcttaaaggcctgtactctccacaatcccagtgatcactttccagtttggagtcagcatgggcactcccttatctgggaagattgagttagcttttttgatttccagtgttcatttatttattgtttccaggccagttttacctccaccaatttcaaaagaacacaactcactcctgtcccaaccaggaaaatctactgtttccccaaggtaagtacttttaactccatgaagcaatgaataaaataataacactatacaagagatcagttttctctgagagcaaaaaagagtacacccctgctcccattcattttggacttcttcactgaggccctgtgccaacaaattaccctaggtgcccaggagacaaacacatacacacacacacacacaaacacacacacacacacacacacacacacacaagacctcatggctgacttgaactaatttgctatcaaggatgtcagaaaactgccacaatccattgatttgtcccctcaaccaaatccatggtgatttcagctcagagaaggtaaggaagcagtgcctggctgcagagaggagcccacagccctggagagcagggagatggagcatggcacagactggaggtggtcaggtggctgacctaagatgtaactgtgtggggccaatgcacttatgagaaacaaagtgtcagtcagcaataagatgtgaactctgtgcagacaaacacggggtcatgggaaggctctgaatgttgcaaaggcatggagttaatttgccctgagagctccagactgcacccacatccatttggactgctccctcaatggggccctaggccaaagtgaccccagctccccagggtgctcctccagaagggcagagctggcgacaccagggtgcggctccctgggctccacctgttttctgctcttctgctttctgagcatgtttctctcttgcagggacaaggtccagtcaggaaacacagagagcagcaaagcaccttctgtgagtaaaaatgggaaaagggacagggtgagcatttatctggcacctactgtgtgcaagcatgaggtttttacaccctcactctgccaaatcttaacagagatcctcggagagatccttatattattaatggtatgcatttgaggtggctgctatgtggccaaactttaactaaccccagctactttccttggctatggaggtccctgggggaaaacagatggtagtgtgttacggtacaactcatgccccaatataggaagacctctgtgtactggaagccagagaccttgaggcagctgtcagggcacctatggctgtaaagggcaaggacattggcctcaaatcgtgagtcttcacagttctgacacaattgtgagagcaggtgtgaccgcccacagccacaagaacctgtttctcctgaaaggcaggccagggctaaaagcaaataaacggggagaaaaggaagaggccaagacaaaaaactgatcaaagcccaaagttaactaaaaatctgtgtttatatggggggaaagcccatctcccacagatccacacttgatgcctatcaacagcctataagcaatctgtctgacagcactggtttggctagaagtgtcaatcactgggttgcctgcagtctctggaatctctcaggaatctctcagcctctcagcaggtagcagtatcttggagaagacacttgacagaacaatagaaccatctaggtgggaaggcttcacctcaggtggtctcattctcattggcagcgaggtctgagccagcctactcaaggctgggggaggctacaattcctccctaatatataattaaaattagctggactgagacataaaatttttttatgctccattgtcctgcctgggaattacggtagctggcagccgtgcccagcttgggaacttggattttctatgaattattcttatctgtcaaggagagtatatgcagcttgcttgtgtttattttgcacaaacatggctctatggtgtattattaataaactacggcctcttggcatatacctctgtcttaagattgatatagttcagaaatctggttgcccgtcattggctaaccggccctcatagcacaccttattcccaaatcagactaaagccacaatacatactcaatatgttccttcatattgatgaatttctgtcacctgtgcttgctggagggaggctgcaagcttgctgaagacaggctgtagggaggtgactgacctgcttgaaattcaaagcccagagttgaaaagcaacaggataaaggcttctttggtgaagtccaggtagtctattcagttgcaaattagcaatgatcaagctcaaactctggcatccagtgttggggaggtagcaatagcagttaattctctgaaagtggaggctgtgttcaaatgaactcttctggctaaaaaaagatttttagccatcatcaaggttggaatcatacttactagaagattcggggctctttccaattgacaaaccaatctttcaggcagccattgctctctgtcttctttttgtgaaaaaaacacagacagagcctcttccccaaattaaaacagggtctggaaaattccacgtattagttagggggtccccccatttaaccatggcataagaactggaagcaactggatgccagtagcaatcccctgcaggctgacttttaacatcagtttgcaaaaaatttaaaataaataagacaaaagcaagatgtgcttttggtgaccttggggggtataattgcccctgttttgcttttaaaagccaaatttttagagtgagatgagcatgttcaacaattctttgtcccatggggttgtaaggaatttcagttttatgtttgataccaaattcctaacaaaatgaaataaaattgttgccaggataggatggcccattatctgtcttaatgactttaagcaatcccatagcattaaaggcttctaggcaatgatcaattacatttttagaggcctctcctgtatgtagagaaacaaaaagaaatccagaacaagtgtcaatacaaatgtgtacatattttaattttccagattctacataatgagttacatccatttgccaaatgtgattgggcataaggtcttgtggattaacccctaaatgtggaactggagataatgtaatatatttaggacattgttttacaatcatttttgcctcctccttagtgatcttatgttggagccttaagatatggctagaaagatgaaatttatcatgatcatgtctagccaatgtaacaggatctgaaactaaggcctctcctatcaatgcaatcattgactgtagctaaaggtccaggaagaccagaatgagctcatatattaccaatataaaacgtatttttttttgatataaaatagaggaagaatgatgttttgcaattgtgaaaacagagattctcctggcgtattaaagttaaacattccacaagtctccaataagggaattgattgcacaacatataaactatcagtaaaaatattaaaagcatcattcacagactgaaaaacattcaataccgctgtcagttctgctaactgagctgagaggccaggagtctctatgactatttgttgattattcataagatatccagcttgccctttagaggggctttcagtaaaaatcaaaagagcattacacaaggctgtaaagaagttatattagaaaatatcacctcatatacattgaaaaattttatcaacttatcttgaggataatgatcatctatagttcctataaatcctatttgagaaagcaaccaatccttactgttttacttcagccaactatcttgatctacactataaggctgaacaatgatatctggctctttatcaaaataagttagtgcctgcttccttcaagtataatgaatgatctgggctactgctgcataatatggcaggatattatgtttaggagatatcctcaaatgtatccacattagaggagccctttgccacaacaatcctgtaggcgtatgaatcgtattaaaaattaacagatgtaaaggcaaagagtaatctatataagtaacaaattgttcttcaatagctctttctacttgttgtaaggccagcaatccttcagaggttaaagatataggggaggtaggatcagaactccctttaagaatatcaaataaaggtttcaactcccctgtagtaagctttaaatagggcgaagccaattaatatcacccaacaatatttgaaaatcatatacagtttttaagctgtccctgcgaataactatcttctagggaaaaacagcttggtctgtaagtctaaaacccaaataattataaggatcctgagtctgtaccttctcaggagttatttgcagtcctttatcagctaaggcctgttgtaagtctctataacataaaagcaagtcctgacgatcttttcccactattaagacattatctgtgtaatgaacgatgtatatcataggccattgttgtcttacaggctgaatggcttgtgccacaaacttttgacataaggtaggactattagccatgccttgtggaagaactgtccattgatatcttttcataggttccttaaaattaatagaaggaacactgaaagcaaatctttcacaatcctcagggttcaaaggaatagtacagaagcaacctttcaaatataccacaattttataatatcctttaggaatggctactggagacagaagcccaggttgtaaagctcccataggtaccatcgtttcagtaacctttcttagatcttgtaacaatctccatttaccagattttatctttataacaaatattgaagtattccgaggagactgagattctactaaatgtcctgcctctaattgctcctgcactagcaaagagatggcttctattttctctttaggtaaaatccactgatcaacccacaccggaatattattaagccattgaattttatcagcatgggatgcaggcaagatagtggccattactgaaaataccccaaacctcttgtgttagagtgaggttcaggaccttcaaaagtcttaataccttgtcctttctttcctagcccatgatcaggcaaaaatccttgtcttagcatctgcttagtcactgcctcattaggactgcacattataaggcccatctgtgacaagagatctcttccccatagggtaacaggcaaatttgacataacatacggctgaatttgtcctgaattgccctcctcatctctccaggttagcaatttggagctttgttttgggttattggcataacaattccttggaggtgagtaagtgtatcagtcaaaggccatgttgaaggccaatcttgtcctataatacttgttacatcaactccagtatctattaattctttaaagctttttccttcaattgtcaatttaaggttaggtctctgattagtaatagattgaacccagtacacatcagaggaaccaaagccactctgtcctctctcattcttaacaaatctggaaggtggcacatgcaagggaactaagacaaattgagcaatttttgattagcaggtacagttataataacatgaggggaaacagccatgattttaatttctccctcataatcattatctataatacctgaataaacctgcagaccttctacaatagaactacttcgtcctaaaagaaatccccaagtttcttcaggcagaggtccaaaaactcctgtaggcagagtgtgaattccaatttctggggttaatactacgtgggtggtggaacagagggtccaatcctgcacttcctggggttgccctaataagttcaaaaatggatttccttgactgggcagcagcttcatggctccataagatgcctgctgtgggtatctcgggcctgaggctggcccctcttttcgtttccgaacaccagagagccctgaatatctgtcttggatgtacattctctagcccaatggttgcccttccatcatagaggacaaactcctggagcacggtctgattgcccactctcagcacctctattcctagaacaatcatttttaaaatgacccaaacttccacacttaaaacatgcattacagtggccaaggccaaaccctgattatatgaaggcccaatctctgcacaaaatggatataccctgctaagtctgtctgtcctttgtgcagcatgaccattctcatatgccaattgcataacaaaattcccgtttgagaatctccaagaattccactagctgcttttaatagcctatccactaagtcctggaaaagctcatcaggaccctgccgaatgctggctaaacttccaccaagatcccctttagttggtaactgattccaagcgtggtgggcagccattgcaacctgtgcatacactccaacaggaaacccaacctgattagcattgctttcatattgaccttctcctaaaagtatgttaatatcccagtctgcgttacctgtctgagcattcaaagtggcagttttcttactggcttctcaccattcagaactccaaagtaggaaatctcctcctgacaaaatagacttacacagtgtcttccaatcttgggggtttaaatgtgactccatgacagtatccaataatgcttgtgtaaaagaagctgtagggccatattgtgcaggcgttcttcctgagattctttaagttctgtctgggtactatctgatgcctgcgaggtctcttcatcagtagcatcttttacgagtgcccagaggcagcaaaaatctatctgatctgaaaaatcttctaacaattgttctacaaaccctactcctcttccctgaagcagatattgaaggctgtggacaaatggcagtttagaattttctatttccattttccgctgtcagccccgaaatggaatcagcgccaggtcaacactgtcccaacttagcccgtatcctatcacacctacagcaacatttttaaaaagatgatgtttaaagccaatgttagagtgaatatctattgcttactgtgccagatatgatcttcttgtttttcccttctcctggagctccactttagacagtgttccctcagtcgatcctactgtgttcaggccccacgttgggtgccaaactgtgaccgcccatggccacatgaaccaggtcctcctgaaaagcaggctggagctaaaagagaataaatggcgaaaaaaggacgaggccaagacaaaatgttgttcaaagcccaaagtttactagaaatctgtgtttatatagggggaaagcccatctcccacagatccactcttgatgcctgtcaccagcctttaagcaatctgtctgacagcactggtttggcaagaaggtatcaatcattgggttgcctgatgtctctggaatctctcaggaatctcttagcctctcagcagtagcagtgtcttagagaagaacagcatcagtgacagaacaatagaaccatctaggtgggaaggctctgcctcaggtggtctcattctcagtggcaacgaggtctgagccagcctactcaaggctgggggaggctacaatcaggttatattgacattttagaaaatgaacttttgccaggaagtggtggtacacgcctttaatcccagcacttgggaggcagaagcagccagatttctgagtttgaggccagcctggtctaccgagtgagttccagacagccagggctataaagagaaaccctgtctagaaaaaagaaaaagaaaaataaagaaaatgaactttctggtaggatgttctggctactttgtcttatggttttattcatccttcccttcctaaaacaagaatcatgcagaaagaaaaaggagagagaaagaagggaacacagggttgtgggggcagagaggtcaaacagtccttttatagaaagccaggctcctaactggctgttgcctgataactgttgggaggagcttagaagaaatgctaaccttgagagtctaagcacaggatgctgtgcacttgatccaggactgagcaagatttaaaggaaggtgatgcagagaagccacttaggagacgccacaatggccgggatggctccatactgctaagtgttctgcacgtctctagatgctacacttgtatccaagttagccactgactctgccagggttctgccatgtcatctgattgatacaggaggattaactcactgaatgtttgtgtccttgctaatcatcttcttgagagttaatttgttgtttttctccctttaaaaaaccctttgaagttattttgtgcaggtttttctttcttttctttttcttttcttcttttctgtttttctttcttttttgcatttttattggatactctatttacatttcaaatttcacacacacactattccattctctcccctctgcccccgcttctgtgagggtgttctcccacccacccattccaacataccccttccacttcattccctacactagggcatcgagccttcacaggaccaagggcctcttctcccactgatgcctgacaaagccatcctctgctacatatgcagctggaaccatgggtccctccatgtgtactctttggttggtggtttagtccctgggagctcctcggggtctggttggttgatattgttgttcttcctatggggttgcgaaccccttcagctcctttagtcatttctctaagtcctcaattagggaccccatgctcagtccaatggttgtctacaagcatccccctctgtatttgtcaggctctggcagagcccctcagcagacagctgtatctgggtcctgtcagcatgcacttcttggcatccacaataatgtctgggtttagtgactgtatatgggatggatccccaggtggggcagtctctgagtggcctttccttcagtctctgctccacactttgtctctgtatttgctcccgtcagtattttgttcccctttctaagaaggaccaaagcatccacacctggcacacttggtcttccttcttgagcttcataggtctgtgaattatatcttgggtattcggaacttttagctaatatccacttttcagtgagtgcatagcatgtgtgtttttttgttttttgttttttgtttttgtgattaggttacctcactcaggatgatattttctagttccattcatttgcctaagaatttcatgaattcattctttttttttttttttttttttttgggttttcgagacagcgtttctctgtgtagccctggctgtcctgaaactaactttgtagacctggctggcctcgaactcagaaatccacctgcctctgcctcctgagtgctgggattaaaggcatgcgccaccacgcctggctgaattcatttttaaatagctgaatagtactccattgtgtaaatgtatcacattttctgaatccattcctctgttgaaggacatctgggttgtttccagcttctggctattataaataaggctgctatgaacatagtggagcatgtgtccttgttatatgttggagcatttttgggtatatgcccaggagtagtatagttgggtcctgaggtagtgctatgtccaattatctgaggaatcaacagactgattttcagagtggttgtaccagtttccaatcccaccaacaatggaggagtgttcctctttctccacatcctcgctagtatctgctgtcacctgagttttttatcttagccattctgactggtctgaggtggaatctcagggtcattttgatttgcatttccctgattactaaaaatgtagaacatttctttaggtgcttcttggtcattagagtttcctcagttttgacatagaatatcttgttttctccatctacggtgattgagagttttgctgggtatagtagcctgggttggcatttgtgttctcttagggtatgtatgacatctacccaggatcttctagctttcatagtctctggtgagaagtctggtgtaattctgataggtctgcctttatatgttacttgacatttttcgcttactgcttttagtattctttctttgttttgtgcatttggtgttttaactattatgtgacaggaggaatttcttttctaggtcaatctatttgtaattctataggctttttgtattttcatgggcatctctttctttgggttagggaagttttcgtctagaattttgttgaagatatatactggccctttacgttgggaatcttcactctcttctataccgattatacttaggtttcatcttctcattgtgtcctggatttcctggatgttttgggtcaggagcttttttgctttttgtgttttctttcactgttgtgtcaatgttttctatggtatcctctgtacctgagattctctcttctatctcttgtattctgttagtggtgcttgcatctatgactcttgatctctttcctaggttttgtatctccagggttgcctccctttgtgatttctttattgtttctaattctacttttagatcctggatggtttgttcatttcctttgcctttttgattgtgttttcctgtaattctttaagggatttttgtgtttgctctttaagtgcttctacctgtttaactgtgttctgtatttccttaagggaattatttatgttcttcttaaagtcctctatcatcatcatgagaagtgattttagacccgaatcttgcttttcatgtgtgatggtgtatccaggacttgctatggtggaatatctaggttctgatgatgccaagttaaccttagtttttgttgcatatattcttatgcttacctctcaccacccggttatctctagtgcttccagcccatgccctctctgactggagcctgtccctcctaggagactgtccctcctgtgatcctggttgtataggaactccttagagtcaagctgtctctgtgatcctgtgattctgtgatcctgtgatcctgagatcctgactgtgtcagagctcctgggagtcaggctgcttctggatcctgaaatcctggcgtgaccaagttcctgagatcttgtgatcctgggattgttagaacacctgagagttgagcttcctctgggtgttgtggcactggttgcctccatttttctgatggggacactgagtcacagagatgttaaaaatctccatggctaaatatataaaccttggtctgtccattccaaaagttgagcagtttccacactgcccatctactgcccataatggaggaaggggaggaaaaggagagtggtaaccatggatcagttggcactgctgagtttaatgggcccctgggggccaggtgattgttgagattagatctgagggtagtgcctgggggaaggcacagaagggtcctgtggcctagaatttcagagaatttcagcacagtgtcaatgtgtataagatgtgaggaagctgtcttagagtttccattgctgtgaacaaacaccatgaccaacgttactcttataaaggacaacatttaattggggctggcttacaggtttagaggttcagtcctttatcatcaaggcaggaagcatggcagcatccaggcaggcatggtgcaggaggagctgagagttctacatcctcatgtgaaggccgctaagagaagactgggtctcaggttgttagggggtctcattgcccacccccactgtgatacacttcctccaacaaggccacacctgctccaataaggccacacctcctaatgtgccacttctgggccaagcattttcaaactaccatggaagcacacagtaggtggaggaacctcaactcttctgggttcacagtttccatttgtcttccaccttgtgacccaggaagtgattcaagtgtcacctggctatacactcattcgaaatcgagaacagatatcagtcaccttgggagatgagatgttcaacaggaaaaagcacttggaatcagatgtcttgagcaaagtcaaattttccaggtaaagtctttgggtcagcaccggcttctcagagctggccctgcccagctattcagccgtgcttggcaccagttcagcacctgacatctacacccacgccacaggtccttgacaagaaacagttacaaagatagggggtccagccagcatgactaaagaggcaagtgcttctgccaggaagggacaggtgaaatacccaaaaaatggtctggcttctgaatatgggaataaagagcaaagccagagattttggaagcctggagtgtgtctgtttcaatataagtaacccaaagtgcccatgactctgcgagacactattaggcgggttctactgttaagtaaccaccatctgctttctcagaagccctgcctcttttttctatcctccgacgttacactcatatccatccacacatctcgtttctacttcctaaaaccctcattcatgtcttctagtcaggcctctccttactacatcactggagagctctcccagtgtctcctctttccagcctttgtctgctgtaagaactactgttctgaagccacagtgggcacacactgttaaccctgtactgggggtgagtgtaggggttgatctctgtgagttaaagaccatcctgatctgtatagcaagtttcaggacagccagaactatgtagaaagaccctgtattgaaaacaaaaagcaagcaagaaaagagctattgttccaaagatctggaagatgttcaacagatcaagcttgttcttatctctagcatccttgtaaaaatctggacatggtgacacatgcccataatcctagcactgaaagacagcagagaatctctggggctcattagccagctgaatgagttgaaacattagttctaggttcagtgagaaaacctgtctcataaaatgagtggagagtaacagaggaagacacttaaaattgatccctgtcttccatgtttgtacacacacacacacatttttgttttatttggttgttgttgttgttgttttgaagcactatgttgctgtataacccaagcaggacactactaccctgttcttgagtgttgggagtgcagacatgtttgcacacacatattcatttgcacctcctcttagccgcatcctcaggcagtccttgtctactggtgcctgtcagcatgagtctccccacacttcctcatttcctaatcctctgacctcttgagttcgactattgataaccacactctggtaagtgtccaacacattgttatttctcttctgctcagtgggacaccacacagcccacatcacttccagcttaattaccttcagggctagatgccaggtccaaacactctactatgaaacgccttatcgaccactgcatccccatgccttagtcgtggagaagacacaaacagaccagagtcaggcagtctgggggcctggctggtgtgactaacaacaagctctcttggtgatagagtgtttgtcccacaggactgatatcatttctgaccttcaggagcaaattgctgagttgatggcaataatagaacagatgaacagagaccagcagtctgccctgaaactggtgagtgacccttgtatcagccacaccctcatggctaatacattcagattacccaagtgccaggtaacatggcaggcggatcaccaccgtactgaagcgtggtatccaagcgccagactcggcatagtgtgcagtgagcagtaccttccctcctccatcctcatccatctctgtaaaaactgaaagacattgcattcctggggttccaggtgcctttgggtgtgtgcatggtaacactgtctcttctacactgctaacactgtcatgagatccgcaggcttcagaggttgccaggctattgctaatgaccccggcatggaagatgcctcctgtgtcttggaaaaccttctaggaagccctagggcccaccctctgttactatgaaggtcccagagcccattcttcagaatcaactggagtccatttagtctggatgcatatgtatgtttatgtatatatatatataattatgcctgcatgtacacccacaggccagaagagggcaccagatctcattatagagggttatgaggcatctataatggttctgctgggaattgagctcaggatctctggaagagcagccagtgctcctagcctctgagccatctttccagcccctcttgatgcattcttaacaggtgacatttttagcattttggtcaccagttccagttttgagcctttcttccccagctcaggcatgtgaccagggctggagtaacagaccatagccatgctcagaaagtaccccctggtgttcctgaagggaaccgtgaggctctgccttcccacagcagcctctcatgctgattaaccttaggctgtctgaatcttacagtcacgggctggttcgtgaccaggcttagaccttccccacctcagctgggctgatgtcttctacaaaagaaatctgaagcttgaggaagcttgtggaaggtggtggggcttcaggcaacctcacattttgactcaccaccacaagccctgcaccacacaactttagcgactgtcttttttgcaagtggaagtgggggtgttgaaaatattctaacctttgaaaggtctctgtgcagaatccaggatgacaccgagatggggtataagaagtttttaggaaaagttagtaacaccacggacagacagacagaaagacagacagtctcctagcagagactctgaggagttgatgccccgttgcctccgcatgctgggactctgaggaagaatccaggtccacaatgtggaggaggggcctgcagccaagatggctgattccctggcagagggcaaggagggaagaggagggactgtgtggccacacgtagccctttgatgtgtccacagtctgattgttggttctttttgactcttccagtcaagtctctcgctaaataagtgattcccaaaggtgaaagagcccagaggttacagtattaggatgaaatgacagaaggaaccagacccaatgacaaagtagcaacaaaatggtggccgtgcattacccgcatgatgcactgactagggagaggacagtcagtagtccctctgctatgtgtgtgtcctgtgcactgcagaacatgcccaggagagactgagaggggcatcccctcagaacggaggggcttcgcgtatatagataagagcgggctggggctctgaatgcttggctgttaacgttggcctcatttctagctctccaaagatctggatctccgctgttccaacatgaagcagaagtttgaaaccgagagcaggtatgctttctggcagaggactgcgtgctgagagcccaggatcccgtgccctggcaggattctaggtccccaggcatccccagcagggctaagtgcagcctgtgacactagagagcagggtagcctcattactgccactaagatgaatcagtttgtgtttggtatccctgcctttcatcgttcatccgtctcattgccactgtagtatttcttttgattggttgctgaggaaagttatgttgttctccacgaagcttctgtcaccctggatttgttataagtacattctccttcccggtcctcctcctcctccgcctctcctcctcctcctnnnnnnnnnnnnnnnnnnnnnnnnnnnnnnnnnnnnnnnnnnnnnnnnnnnnnnnnnnnnnnnnntctcctcctcctcctcctcctcctcctcctcctcctccttccctcctacttctgtctcttagctcagggcctgggcaacaaaggaaggagagatgggtggagaggggacaggccatggcaagttggggccagggggagagaataagaaggaagtgtgttgtgtgttgtctgtgtggggaacattattttttttaaagcctggaggccatcttggtgagagacaatcacctctggctgcaccatccacacttgcttgcttataattactttctgatttttaaagaacagttttagcgtcttggcaaaataagggagagtctgaactcccaggcaggcacattgtgtaccatgcacaacagcctccttgtagaaccgacctgtgttctgtcggcagatgagagtttaaaatgctattctgctccaaaagagaagggaattctcccagttgtgagaacatgggtggatcggaaggatggaagtgaaataaaccaggcaaagaaaagtctctgtgttctcactcagagctgaaacctcttaggaaacagaacctagactgatggttggttacttaggctagcctatgagaggtgactgtcaaagtgtacagaatttgggccagcgcttccaccaggcctgatgacctggatttgatccccaggacccatgtggtagaacactgagtctcttaagttacactctggtctccatgcatggatggatggttggtgtacacacacgccatgcacactaaataaattaagtaagtaagtaagtaaataaataaataaataaataaataaaataccaatgttttaaagtatataaaatctcagacagtagaaatattttttaaaatctttgcaggccttaggataataatactaccgtgttcttcatttcttattgcacaagagcacattttaaggctgtagagatgactcagtggtcctaagtttatactgctcttgcagcggatagttaaacatgctgttctagtttatgaatacaatgtggaaataattaaatcaacatagctgacacacagatgtcaactcaatgattacaattttttgtggtaagaatgtttgaaactcgcttttttttttaaaaaaagttgttttggttgttcattttgtttatatgtatgagtctgtgtggggtaagtgtgcatgagtatagtacagaggtcagaaggtgctggaccccctggagctggacaggtagtggcaagccaccataccagtgtatgtttaactccacaagcttgtgtaatgtacatgagtatttatttttatttttatttattttttaaacatatataagaaataaatgtaataaaccaaatacatggacaaaaaaatacaagaatcatatgagcatctcaatggaagaaaaaaaaaaagaaaaaaaaagaaaacagaaaaagtctttgataagattcaatattccttcttagtaaaaaccctagaataagtaggacgtaggaagcatattccaacataataaagattgtgtatgacaaatccatggccaatatcatcctaaatgaataaaaccattaataagccccattaacatcagagatgggagaggactgcccactgtccctacttctcatccataatgtgattgaagcattagctggagcagtaaggcaagagaagggaaacaaatgggaaaatattaggtcaaagtattttcagttgaagaatatattatcttatacccaatattctcaaaatttgactagaaaaattgtagaaattatcaataatttcagcaaagtgttgtgattcataattgacttacaaaatttatcagtcttaatacataagcgtaacaagcctgctgaaaaagaggtcatggacacgttcctctgccaagttctcaaatcaaataaagtatttagaatatacataacaaaagaggttaaaaaaaaaccctctacaatgaaaactttaaatgtgtgaagaaagagattgagaaacatactagaatttgaagacctcccaagcatacaacttggtagaattaacattgtgaaaaaaagactttcctaccaaaacaatttactgattcaataaagtcacaatcaacatccccatctcattcttcacataaatagaaaaaaaaattcgcaatttgatatggaacaacaaaagactcagagtagtcaattagtcctagataagtgtttgtgtctatgcattctgctcattttaggggccaagtgcctctgtctatgaccccaacatttatgtatctgtttctattgagtcaattttgttagatattagaatggctactccagcttgtttcttgggaccatttgcttggaaaattctttttctaccttttactctgaggtagtgtctgtctttgttactgagatgcgtttcctatatgcagcgaaatgctgggtcctgtttatgtatccagtctgttagtctatgtctttttattagggaactgagtccattgatattaggagatattaaggaaaagtgattgttactccctgttacttttgttgttagaggtagaattatgtttgtgtggctatcttattttgggtttcttgaaggaagattacttcttgctttttctagggtgtagtttccctctttgtgttggtgttctccatctattatcctttgtagggctggatttaaggaaagataatgtgtaaatttagtttttgtcatgggatatcttgttttctcagtctatggtaattgaaagatttactgggtataatagcctgggctggcatttgtgttcccttagggtctgtatgacatctgtccaggatcttctggatttcataatacctggtgagaagtctggtataattctaataactctgcctttatgtgttacttgacctttttcccttactgcttttaatatcctttctttgttttgtgcatttggtattttgattattatgtgaaaggaggaatttcttttctggtccaatctatttgtagttctgtaagcttcttgtatgttcctgggcatctttctttaggttagggaagttttcttctataattttgttgaagatatatactggccctttaagatggctctcttctatcgctattatccttaggtttcatcttctcattgtgtcctggatttcctagatgttttgagttaggagcttttagccttttgcattttctttgactgttgtgccaatgttttctatggtatcttctgcacctgagattcgctcttctatctcttgtattctgttggtgatgcttgcatctaggagtcctgatatctttcctatgctttctatctccagggctatctatctctctttgtattttctttattgtttctatttccatttttagatcttggatggttttgttcatttcctttgcctgtttgattgtgttttcctgtaattctttaacggatttttgtgtttgctctttaagtgcttctacctgtttacctgtgttctcctgtatttctttaagggaattatttatgtccttcttaaagtcctctatcaccatcatgagaagagatttttagatctgaatcttgcttttctggtgtgatggtgtattcaggatttgctatgatgggagaattgggttctgatgaagccaagtaaccttggtttctgttgcttatgttcttatgcttgcctcctgccatctgattatctcaagtactacctgccctcactatatctgactggagcctgtcctccctgtgatcctggttgtataagaactcctcatagtccagctgtctctgtgatcctgggattctgggtgtgtcagagctactgagagtcaagctgcttctgggatcctgagattcttgtgtgaccacgcccctaggatcctgggatcctgggtgtgttaaagagccttggagtggagcttcctctgggtgttatgggacttgctacagagctctggcccaaggtctgctcagggctccagcacagatcagaaggaactgtgcctctgctcatgtggggttcctgcttccctggatcccgctagccctagttactcccagtggtgttgggaccagaaatgagcatttatgacaaaacaaatcctggtagagataccacctctatataatccccagcattttaggcattgatgtctttatttatttttcttgtttgtttgttttttttttttttcagacagggtttctttctttgtagaccaggctgtccttgaacgcacagagatccacctgcctctgcctcccaaatgctggaattaaggtgtgtgccagccaccacgtccagcttgctttgttgtttttatattactttaaagttttcaagcaaaattaccaggaaggtacagagcccccacatatcccttgtgttccaccctatagccaccctcgctttcagcatctctgaaaaatgttttatgtgttacaattgatgggcctgcattggcacatcatcatcacctgcttggaagtcactcctggtgcacaatattctatgtgtgtgaaaaataagtgtgtgtggacgtgcattcactgtgagagtgctgtacacagtggtttcactctcttagtatgtatgctccagttcctagtccctccatagtccctcccaaggcaatgccttgaaacaactgtctccataggctttccttgcttgatgttggaataacatcacatacgtagtctttgcagagaggcatttttcctgtagtaacgtgtgtttcgatttctcccatctgatttaagcctttgggctctcactttagcactcaaacactatcagcatataaatcctgggatgggagctagatctggggttctaaactattctgggtgcttctataatagagctgtaagtaaaaactattgactaagaagagagtctgaggtgcttgcctgagcactattcaaagaagggactgtaggaaacacctcactcagaatagaaaccataagaatactctaggacatgagggctccaccttggtaaggagtgggagggggagggcaggtcagtgcaacagctcaactctacactgtgtgtgtgtgtgtgtgtgtgtgtgtgtgtgtgtgtgtgtgtgtgagtgtgtgtgtgtgtgtcgtgtgtgtgtgtgtgtgtgtgtgtgtgagtgtgcatgagactgtgtgtgcatatgtgcataagtatatgtatgcatgtgtgtacaaatgtgtgtctggatgtgtgtgtaaatgtgtttgagaaagtgtatgtatatgtgtatatgagtgtgagtatacatgtgtgagtatgtgtatgtatgagtgtatgtgagtaggtgtgcatatgaacatgtgtgtgtatatatgaacatgtgaatgtgtatatgtgagtatgtgtgtgtatttgatcatgtgtatgtaggtgagcatgtgtgtgtatatatgagtatgtaagtgtgtatatgtgtgtgtatatgtgaacatgtgtatgtgagcacatgagtgtgtatatgtatgtatatatggatatgtatgtgcatattccttctcctcctcccctccatgtgcttggcctcactgtgtttctgtggaccatagaagacagcttttggaagcaattcttccctccactatagattccagggatcagattcaggttgttaggctttcatggcaagcacctttacctgctgaaacagcttgttcatgctgaacttcttttcttggatggtcccacagggaactcaaagagactcacagagaggagctcgagaggttagagaacaactacaaggaggccctgaaggcagaaaaggccttggccgaagagaaactaggtactgtcgggccctggggggatgctgggaggaaggtggacagccttccctggcatccctatagccatggcttggcacagccagatgtccaacatttcccttctgaggcttaaggcatgagaatgactgagaacggaactgcttcatcactgaagcaagaacgtgaaatttttttaagtgcattctaaagttctaaaactacaatattactatgatgccttcaggttttcttgcatggagaatggcagtgatctcttgaatgctcactgggctactgtgattgcaaggctctgtagtgcatagtgctatgctgacagaatctcactgtttacactgctcttggggaaagcagagtgtgcacccttcagatttggggtttatagactaatgtccacagagagaacgagacactctacaaccttcttcctctgtttgaagttagtgtcttatttacactttgcttgttttctagtttcctgaagagaatgtgtggttttcataaccactgtaaaggaggaaatgatacaaaaaggagaagcagatgcattgtgggaggttctgttcctccttcccatagatacagatgaccctcgggggtggggggaggttgtcttactaaaacagctgaacagagtgtgggaactctgagatcttggagaagcatgtttagaaagtacctggcctctctcccagaagctcttcatccatcggttcaggtgggatacaataactgataagatttttgataagcttccagagcgacttgggaatcccaagacggtttcatcacctcagggagagcttgggtgtggagctgaagagttcatgtgagttttggaaagtgtgcccaccgaaggaataatgacatccttgttttcttttcctccagataagatgagcaaggaatataagtatctgaagagtatgttccatgtgtttcaggtgagattccaaactgtatggtaggctctgagagcaagagaggtgaggctccttcctggctgagaacttgaggatgactgtagacctggagagattctaatacttccatccacagtgtcactgctgtgcccagcaggaatgagtccagtggcttccatgtttgctaaaccagccattcaactctgaagaggcctgttgagaagatggtgtaacagctgttcactgtcttctaaaaatgaagactgggaggggggttaggggctggagagagggcttgacagttaagagaactggctgctcttccagaggccccaggttgagttcccagcacccaaatgatggctcaaaaccacatgtaactacagtgccagcagaccgaacgccctcttctggcctcctcaggcaccagtcccacaaacagtgcacagacctacacaccgacaaaaatacttacacacataaaacaagacttttttttttaagtggagctaaccaccaacagttacatggaaaagaagaaattgtcactcaccagaggcacccatgcaaactgcagtactttgttgaaccattcactgagcgaatctacacttgtatcctcttttctcttgggcactttaggtctttccctcctttgttgtgactgcctctgtggctttgggatatcactgtccctttcccactgaccacgtgctattagagtcactcccggtgacagaacacagaacttcaaacagtggagtactggtcaaacagtggacatatttaaggcctttcaaagatttgatcaaattgccatccaaaaattttatctcattccacattctacaagctgagacctgaagccatttcctttcatccctgtaccagttgggtttgttgtcaacttgacacaaaatggagtcatctggggggagggagcttcgtttgagaacttgcctccattgcctgtggacaagtcggtggggcattttcttgattaataattgacatgggagtgcgcagcccaccacagatggggccgcctctgggcagagagatacaaaaacaggccaagcaagccacgggagccaaccagtagccaggactcccctggcaccagttcctgcctgagttccagcccaattccctcagtgatgggttgtaatatggaaatataagtgaaataaaccttttcccaccaaagctgcttttaatcagactattttatcacagaagtagaaagtaaaagtggacaattccccaaacttgatgaagacccagagcaggctgccttacagggagatgcagagtcagatgattctcagactcagagagccgatctgtcttccaaagaagtcaagattcacagggtaaatgctgttactagagggcctttgaccttccagcttatcccagctctcctctgagctttgctggaatgggcttttttatgtgtaacccatggaagggtccctcagcaaggcccaagttaggggagagcaacgccccatgtgaccctgtgagtaactcagcagtgttcccctgtcatagcgttcccctgcagtagagttcccctgtcgttgtggatcttctcaccggtgccttcgtgctccacaggatagcatttacgaggaaatggaagacaagtggctgagacgaaaggccgaatgggagaaagatgagaagatggagcgggaaaagatcctgctacaacaaagtgagtcatgcagaagctgctggctttttcaatactagagactaaaaaaacaaacaaaacccgctatagatcttgaccttgacttgagggaaggggccttgggtttgtcaagggtcaaaggccagaacttctgaatgaaaggtgcctcaggttacaggaaacaggacagtgagggcaaggcttgccttttttttccctcctcctcctcttcttctttttttgaacttcagacacattaattaagggatctaaaacttacatgtttgcccatcatgatctggaacaaatatgggtattggcatctataatgaaatatagaacctaaaattctaggaggaattcatgaatttgaatttaaattattcagggctctgctgctgggtcttccaacactgagaacaggtgaatttacctttgccctaaggctaagtatgactttttattatgaacaatctgactaaccaagagctttaaagagaaaaaaatgctagagaaagcacagctattacttcagcagagaagacagaaagacaaacaggagacagaaactaaaccacacaccaaagaaagagcagatgctgccgactgatcccacatggctactgtcacagcacacaggagacccacctcaccccatgcatctccccagcagaggtcagagcgcccagcccaggctgaaaggttctcaggttcagtccagtctggaaccagtactgttttcagttattctaggtttctctttggcctgctttcccagattttacacacaaacctgtcgtttctttctctcctccacagaatgtagaataataaaaaagtttgagttacagtcggaagaaaaaaagaagaaaatgaatgagtccatcagtgctgtttctgataacttcgctcgagagaaagaggtaactggaagtagttgagagtagtctaggtggagcagctgagcccactgggcctatgtacttgggtgacttgttggtcccaatggacctactctcctctttgttcaactttcctggaaatatatgcaaaaagaatgactattatagtttgcacttgattgcttccataaaccatgaccaaaagcaagtggaaggaaaaggatttatttcatcttaaaaggggcagttcatcctcaacttccaatgcaggaaaccaaggcagggacttgaaacagaaaccacagaggaacactgctttctggcttgctcattcttattcagctgccattcttatacaggccaggaccacctgcctagtgatggtaccacccacagtaggctggaccatcccacatcctttggctgtcaagaaaatgcccccataggcatgcctacaagcaatgagatgggtacagtccccaaattgaaaccccctgaagtaactatgggctgagtcaagttgacagctgaagccaagttggaggaggattgtcttggggtcctttttagctaggccgtcttacatcaggatttttggaatgaaagtcgtaattagggaatagcagtacgttaaacgtgcaaaaactataaagtcctgtggtttgtcaacatggcctctctgaatgccacccctaccagcagtcctttctataaaggaaggaaaagacattggcgtcaactagtcaaggtggtttggtcatggaccactcctactaaatcagagtggctatctaaaagctaaagtaaggcaagctccatgcacctcctagccaataagagcatcatagacaaggttttcccaaacagatagacactgactaaacaaaatgtgttagcattccagctccctccagttcacacagccaatctctgagttcttggatgcagctgacatggtcaccttagagaggcagaactctgtaacactctcacaattgggccatcagccacacaccttcctatcataagagagtgtcattctgggatcaggtctttggcatcaccctaagtaaacaagctataagctgtcttagattcctccatccttttcttgcaaatggagaattgtgcaatattgtcaatattttgaatatttcacttatgtgtacatttctaaccatggtgctaattcctcttccattaaacccatctcctctcatctgccccaggccaccattcttctggtttctaccaccacagactcaatttatcagtttttgtctggtttaaaaaaaaaaagttggttctgttgttctgatagcataacttatgaaataaacacaaatacagttcctagttatccttgcaacatgcccaaatcaacctttaaaagtttataaaaaccaaatgtagaaagcatcttcctcagcaaacttctaaaggcaatgcagacatgaagacaaaagttggtgcttgttaatcatcacacggttgagcagggttttttttttttaattctgattttttattagatattttctttctttacatttcaaatgttatccctttaaaacaaaaacaaacaaacaaacaaataaaggccggacatggtggtgcatgcctttaatcccagctctcgggaggcagaggcaggcagatttctgactttgaggcaaatctggtctacaaagtgagttccaggacagccggggctatacagagaaaccctgtctcgaaaaaaaaaaaagaaaaaaaaaaacaaaacaaaacaaaacaaaaaaaaaaaaacaaccaaaaccaaaaccaaaaccaaaaccaaaaccaaaaacaaaaacaaaaacaaacaaaaaaacaaaaacaaaaacaatgttatccccttgtctagtttcccctttgaatatcccctcacccccttccctttgctccccaattcacccactctgattctggtcctggtattcccctatactgggtcctagagccttcacaggactaatcgactctcctcccattgatgaccgtctaggccatcctctgctacatatatagctagagccactgctccaggtaaaacactgcctgccatctctcccccccccccccccccacacacacacacatactctctgaactctgcccaccaaggcaaaggtggctttgtccttcagagccacagagatggtgacttgtttattcatcttcctgacagacccttggcttctttgggaaggaccataaagaggggcttctatggaacagagttgtgacagggtaaagaaactccattttgtgctaggcatccatcttgctacccacaggcatttgtgtgagactccagttccttggggtgactcagtgcctctctccacctagaaatgtgcagctgtgactctaactgcttgtcagcatcagtaacctctttatgcagacattcaaggaccacctactcttagcacagtagaaccacgcttggcttgcttatgcagatactaggtcatctcctggttttcatctttaaaaatccttccctctgtcctctttgtgtagcaatctcaaatttggctcagagagtgttgtcctgccatcaggatcaatacatttaaccaattataatctagatggagtctgtggtctgtttacaggggcctcagactccttaacaacaggctagctggggaccagggttccaccatggatacctgggacccttcgatgggttttccgtgtcagtctctgaggctaggtttagtttttgcattttccagccataccttcagtcccccactttggctttcctcctcaacttggtttgcactattcattttcctctcctttctgctccctcacctcggctgactttctcacacttgatatttccctcttgcccttccatgcagacactctcctccagtctctgctgatttttctattagttaaatttatttttatatttattaacagtaagcctggtatggtatggtggtgcacacctttctttaatcccagcactggagaggcagaggcaggcagatccctctgagtttgaggccagcctcctctacagactgagttctaagatagccagggatatggagagagactttgtctcaaaaccacaaatacgtatatcctttcctgatcactctttctgctggcctgttccttatgctcctcttcagtaatgatcttttacatgtctctgtacttccagccctatcacagttgatgagattctgctcagaactttctcttggcagcagtcttgttccttttctcaacaaccctcccttcctgatgtgtcagggtgctttgtggaactcccctgcatctgtccagatcattttatgactcatcatgtcggctggaactgtaagcgatgttctcttcagattccctgtctggacccagactgaatcacctgcttctttgccccaccccaccccacccccaccccactccattctaccccacactgctgcttcttcatccttctcaatccttccaccatcatctccatccaacagaaagctctggtgaccacaaggagatcatgggagcatggtgggattcctgcatctcagagatggactagtgagtgctcagataacacccccatctccaacctcagaccctgcccaacctgggaagggcatgaggagagccaggatagagcagggcccacatctgctcagaaccagttgagggggaggagaaacaatggacacactccactgccacctctggcccacctaggtcaaactagccaaaaatgttccgattttaaaacttaacgcggacatagaatgcctaatgtctaatgtattgttttcccctaaaaataactgataaaatatatttatttgtttttcacattcatacattctttttataaaagtagcttgaggcagatcttcctctgtagcccaggttgaaaccagctgatgtgcaacccaggatgagcctgcccttctggccttggcctgcgggcactgaccttccaagcccgagcccatacccactgtgttccttctcactgctcagcagaatcgcttagtggaaaggtcatacaatgtgcttcttggtttcctggcttgtaattttttggattgttttcatttgttggattttaaacaaagcttctatgaatatttttgtacaagtgactcatagatatattctcttccttctcttagagtgtatcactgaaactccagggtacacagaggaaatctatggtttccacagtagaaatgttttactttgagatctgaaatatgtgaattctgactgcaccgaatcctgcacacttaggccacccagtcattaactatggccattatagtggggatgaatatgaagtgacagtcactttttataagtctctctgatgactaaacaaggccagtttttctaaagtgttgggggaggacagcattgatagatttctatcttcttttgttcctgttcatcccttctattatttaaaagatatggatattggacttgcaaactttatatgccccagtacaggggaatgccagggccaaaatgtgggagtgggtgggtaggggattgggggaggagggtatgggggacttttggtatagcattggaaatgtaaatgaggaaaatacctaataaataatataaaaaagatatggataatacaaatattttgtatatatagttgcaataagaacttctactgggaggggttgctttctcattttgcaaacattatttttcaatgtacagaaatttctaattttgatgaaaggcagattatcaatcttttctttttagaattaaaagctctttctgccttccccataacactactgtctatcataatgccatgggtattctctttttagaaacgtgttgattttagcatttctgagtctatggtccatattgaataattttttgtgtgtagagtgaagtagaggtcataggaaatttttctgtatgaatagacaattattccatcatcctttctgaaaaaagaaaatgtcctccctcctgagtcgtcttgatgtcctctgagtgaagggcaagattctcttcccattctgcttaaccgtttctttacactcaaggaggcgctgcacagccttggtgccatgtaaagccagtgagatcgggcagacagcctgactgggctactggtccttgctttgattttcctcttgttaatttatttgttagctttggttttgtttcccagcatggtctatacattttccattgccttacacttctatgtaagttctagagctcatcacacccaacagttgataatgctgcagttcagtaagtgttaaactcctgagtcctccggtggcttcttaattctctaacctttccaaattcaattgttttcaggagctcctaagacaacatgatgaagacatcctgcaaatacaggagctgagaaaatccaaagaggtaagggttcccattcagctctatgaaagtagtgtcttccaagccctacacacttggggaaataaatgaattttacccagatcagtatagttactggagcacccaaacctaagtgttgaactctgtaggtcaaaatgaatctcaaactccatgtcaagcaaaagcagcctttctcagagccagctgtgaacaaggagaaagcaaaggctgcatggtcattagtgttgaataacagctatgtctagtgacgcttaaaacacaggactttgaattacagaacatcattatcttagttggcattttattgctgtgaagagacaccataaccaaggcagctcttataaaggacatcacttaattggggctggcttacaggttcagaggtctagtccattatcatggtgggggcatggcagcatccaggcccagattgtgctgaaggagttgagagttttacatcttaatccccaggaggctgtgtatctcagttgtcatatgacctcaaagcctgccctgacagtggcacacttccttctacaaggtcacacctcctaatattgccattccctatggccaagcattcaaacacatgaatctacagggctatactattcaaactacaacaaatcagtaacggcaatttgatcaaaaagaagcctcaaggttcaaccaattggcttgagtccatggaagcagcaagaaacctctggaacatcaccagaagttctttggtgtgtttctctctatgaagtcacagcagtgaagtcacagcagtgaagaaggcaaggcgaaccaatgctgcattgttttgcacaaagaccatcgccagcaaagcccaaatgaagatcagcaaagagtggcaaggcgaactaatacctcacaccgcatcatccactgtctgttgggttatatttataccccttccaaatatcacatgttctctcaagtgtccagtctagcaaaacatcacaggcccttttaccaagcagcttccagaaaaacaccatgtgtctgcctcagcaaaacatcctctcatgagacagttttcagaaaccagaaacttccagtgcagtcatccatcttgaaagttcccatataatctcccatggtacccttcatgttcccctgctagctgcttgcactacatgacatgttagttaccgagcagtcagtatcagcacgctgttgttaactgagatccctattttatatcagggatcactcttatggtatacatgctatgggttttggttaatatataatgtcaggtatccatcatgactgggtcaaacaaaacagtttcttgcactaaaaatactctttcccagcatcctcccttccatcccccagccactgaacccacaaacctatttacagtctctagtgtttcgtctttttcagaatatcacagagttggagtcaatagaaagaggtattgtaataaagaatatgcagaatggggttggagagatgccctagcagctcacagcatttgcttgtcttccagaggaacagagcttaggacctagcatccaaatcaggtgactcacagctgcctattaactccagttccagaagagctgatgcgttcttccggtttctacaaacacctacactcacatgtgtacctgcttgtgtgaacacacacacacacactaaaaattaaatataaaaattttttaaggagaacacaaagtttggaagaattagagggtggatctagctagggaaaagtgggaggtaaatatgatcaaatgcattgtattctcaaaaagtcataaaaatattatatcttaaaaacaaatctttaaaaaaaagaccatgcagtggctgagtggctgatgaccacattgcctgatgaaggctgctttggctgtagtggcagtgaacctgaagagcaggacacaggagggagagaaagagaaggtagaaatggcagtaagtggtacaagagagtgtgcctgaagttggcgtggtgtatgtgttccaaatgccctggagaagggagtattcccgggttccctcttgtcttggggacattaattacatcagcatgatgtcctgaggctgcttcctcttgtgcagatcttggaggctgagttgcgggcacaagctactgttctggagaccctgaacacaaaccttttccaatgccagaaagaactcgagagacaggcaagtcctggttagactgagaaccgggctggagaggaacctggagaactgctgttctgcccaggagctatgtcccaagggctctggggaagacagctattcaaatttatcttctagaaaactattgcggcaaatctagagaaattgttccagacaaagcttgctgaagctgaagaaaagcataagtacaacataaagaccccgacagaagaaaataactgcctcaggtatgggatcttccctcaggggtccttggctgggttgcttttgagagcagaaggttgttcaagtgactgataggtcaggtcaccgtcttgatctctgggaggaggtaaacttctggacctggacacacattgtggaggtagacttttcatatctagccttttctcctgtgtgtctgtttttgtgtaaaacacaggtaaattgtcagtgggttctgagctgctttgtcccacgactgaggattgtttttcagagttcagtgggttttagcactctgattctggcttctgttgagactagttgccagtcaccatcaccattccctgaagggccttcctaaaccaccaacttagaagataagttacctatttcatcaatttccattggaaatatgatctcccaaacaccacgtttcaccaaatgtaagccaattactgtgatgagagaagatgcttcctcaagctggaagaaagccaaattctcttacctacctgccagcaaatacccccatcgcctttacccgtcgaggtttcatgatatagtgaccatcattccttttataggcagatgttaaccacaaccacatatgaggaaacttcagaagtttctgagaagtcctcatctgccagtcccaacatgtatgagtctgacgttcctgaacacaacagcaacaaaaagcaagcatcgtaggtaactaactgctcctggggctgagcgacactgccctgggaggaagctacggactcttctggagagacgcacgggaaggctgagctcttgagttgttctgtacttttgtcatttttcacaatttgctttcttccaatggatagaaatatttgaattcttatcctaattatatcttggctctccattgagaactggtgtcctctgtactggagtcggacttctgtgggctgtgtgctatgctcttttttacttttcacatgagactaatttgaagggtcttctttttgggtgatccttgcattttggggtgtgacttttgtccccctgagggtaaacagcaattcattgatttaattccaaaatctttattccctcccatatcagactttttagcccagtgacttgggaagagtaactgaatatttacactgtctctgaccatcaggagaactcaaatgcccacagagcaggcaacaaatccatggaaccggagtgggcacagagtaaccagtcacagaggcaggatgctagaggaggtcggtaaactcagagccacacccttttctgaccatggcacttcttagactcattggactgcctgccacttgggtgcatggggtcattatgattaaaaaaaaattctggtttttatgtggaagtgcttttaagtgttggcaaggaatgtcaaatgttcaccacgtgtgaacatgccaattgtaaaacaaaacaacaacaacaaaaaaacaaacaaagcaaaaacaaacaaaaggatcccctagaaacagtaaggtaaatctatttttcttaaaacaaaacaaaacaatacagcttttgtctcactgacagtttacttaggagggaacagggaatataaaagtttataggtacagattcaataaaatatatactaaagagtaatgcgtagaacaactcagtttcttttaaaaagctatatgaaaacataaaaataaccctatacattaatatggaatttgaaaaacaaacaaaattcaagatagagatcctgctagatcctgattcaaacagactgtaagaatgcaagaagatcgggagatttttaacactgactggtatttaatgttcaaaattgctttggctatctaaaacgtacctcatccttagagacacttgggtctctaaactattcatatgtaagaatattccacctccatggacccaagtcagagcctccaagtgagggagtaaggcaggcaggtgaggatacagtcagggaggacagagcacagcacagatgttgatgttggaggctgtaagcatgtggcttcaccatgctgccattgcttttagtttttgtatatttatgaaatttttcacaataaaatacttgttttagaaaataagttttgttttaatgttattatcctacaaaacataaataaaaccgtcttttataaatacttctagaaaataaacaaaaacagaatttcctgatggactattagctagaagtacattaagtaaaaacctgtaagttacctaaaaactaacaaaaataatttttactcctttttttaagggaaaaaaccaaacaaaccagggtcaaatgtagctcaggctggcctcaaactggttatatagctgaagatgaccttacactccagaccctcctgcctctacatcccaagtgctcagtgtggtccaccacaactggcctcattttccttaaatttatctacatctacttatccagtcacacgttgcatgtatggagagagtgtgctttggaggtcagaggaaaacttatgggagccaattctttcatcattttggtcccagggatcaaaccttgttaccagtctgtgcagcaagcccccttacccgatgagccacctcaccagccccccattcattgaagatataacagaaatgttaacattggcgagtttaacttttgctcatgtgtaggcatgtaaggagagctgacatgcatgctcacatgtgcataagtacatgtgtgagcacacacatgctttggcaggcacatgcatgcagtcttcctcaatctccaccataatcagggaggcaggggctctcgattgaacctatagctgtcctccgataccactggtctggctacacagcttgcaccaggaatcttatccccaccctcccagtgcagtagcaattataggagggacaacatgcccatcgcccatcgctatttacattggttcctgggagctgaactcaggcccttgagtttgcttggcaagttctttaaccactgagctatctcctcatcctggtccaggctaacccttaaccacacttagcctcagaagtgtttttacagttaatgctctccacaaacaaggggaccctttcctttccattatcccccatgctccctaatagctctcactctgaaggactacatgaaatacccagagactaatgaaaaactaacctggaagaattagatactgcacagaaaaaagtttaatattttttattacctctgagaatttcatgcagcaaaatgctgatgatattcacccctttctcaccccaggtccccgctcccatcattcaccccctttgttaacttgtctcaggtccatgttctttcacccactctgttaacttgccccaggtccctgctcccgtcattcacccattctgttaaacaggtttatgttccagtcttgctttcttactcatgcatcttcaagtttgtttttttcaagacaagctttctctgtgtagtcctggctatctcagaacttgctatgtagagcaggttggctttgaactcagagatcctcctgcctctgcctccagagtgctgggattaaaggtgaacccatggaattcagtttgtgttgcccagctattcttgggagagggacctgccttggagtgtgattagcctaccaaaggttgctccaatttaaaaaagcaaaacaaaacatacatctaagtgacagtatacaaactgggtaggttatatttagaaatgtgtgtgtgtgtgtgtgtgtgtgtgtgtgtgtgtgtgtgtgtacaacagttaatgagaaaggaggtcatgtatttgaaattggaacattacatagaaggatttgaagggaggaaaaggggaaatgatgtaagtgtaacctaaaaaacaaaagaaatcctaaaaaataaattagactcatccacacaaaagtgcacagataagccatgtgaactgtggagagcacacatcattagggagggaagaagagcttcttccgtagtgtgaaggtgggctgtgtcatctgctttcccttgttcctcctgtcgtctttattgctcacgtcatagttcacgccagtcaggatgctaagaatgtcatctcctctgaaaaagaaagcagcataaagcatatggggcaaggaagtgcccaccgtctcactggcagtgcccaccgtctcactggctgtgcccaccgtctcactggctatatccactgtctcactggtagtgcccaccatctcactggctgtgcccaccatctcactggctgtgcccaccatctcactggctgtgcccactgtctcattgactatgcccactgtctcactggctgtgccaccttctcactgctgtgcccactgtcatactggctgtgcccagcatctcactggttgtgccacccactgtctcactggctttgccacccaccatctcactggctttgccacccactgtctcacttgctgtgtccaccctccctctggctgtgcccaccacctcactggctgtgcctgaggtaggttctctagttctgtctctctctctgtctctagttctgacatttgcagttgaaagtcactgaatcaagacttctcaccactgttctggcaactcagttttctcagagcacacagagttacttttgtgtacttggaatctctgctggttacaagaaaccagagttccaatggaggagctagagaaagtacccaaggagctaaagggatctgcaaccctataggtggagcaacattatgaactaaccagtaccccggagctcttgactctagctgcatatgtatcaaaagatggcctagtcggccatcactggaaagagaggccattggacgcgcaaactttatatgccccagtacaggggaacgccagggccaaaaagggggagtgggtgggtaggggagtgggggtgggtggctataggggacttttggtatagcattggaaatgtaaatgagctaaatacctaataaaaaatggaaaaaaaaaaaaaaagaaaccagagttcctatcagatttgctttccttctctgttaacctatgtgttcctccatgtttcccatgttgccatttggacctcacaaatgcctccctttcttcccccagtactctctgcctaaatcagcattgctcctacaggaacatccacagatttctaccaaaatgtaggcaagtaaaggctaaacatttcccatagctacttccccacctctgacaccagctgtctgagcaatcttgtggagcaacctcttcatcaatctgcatagctgacatggatcctgtaggactcagggtctgtgttacaaaatgaaagcactgcaatggtgttcctgtctactctccacatgccatgggaaattctcactcttcagacaccagacgataagacagagatgtaaaaggagcccgtagaagggctcctcattgttcagctatcagccgggtgtaagtgggagggaacctgaagtatggagccctaatttaactggagatgaaccatatgccatagggctatcatcccacacttgtggcttcttaagcaggtcaaattagtagagacatacagatcccctgctcttcagtatggtcacagtttgcaaagaagattcaaggctagatagcaattagaggatttctttcctaatttttaaaaattatatttacttatgcacacaggcacatgacatggttcacatgtggtggtcataggacaatttaaaggagttggtcttctccaccatataggtccctgggtatttaactcatgttataagacttggaaccaagtgcctttacccagtgagccatcttgacagctctaaaacatgccttctgacaaagctggtaatggacagttcaactccaggaaatgagtaattctctagatgttttgtgcttgactaattgtggctcggccagcaaagttaatctttagttttccgacaggaacacaggaatgctcccccttgggggtttatgggtgctccctccagtcctcaatgcagtcacgacagctccggggtgccttagggtcattaagggttacttccccgaagatcccatcgcctgaacacaccaggcccccatgggctggggagttgatgccacctgtggtcgccctgagccctggttcttacccagccagcaaagccagtaaagaaaggagctacagtcctccgcgccctcccgggctccgcccgccatcccctgtgtgccttcgcggcactcacagcgacctccggggccgggcaagtatgcgcacggcacagtggccggggacttagggtcccgggctcgcgcagcgtcgcgagtagcgctccggttacaccccgcaggtcacctacctgtctgcccctaagtggccgcttgagaggctcaggtctcagagacttcgctgcgtgccttaggctccccaaaatggagacgcccagaaaccgaaagcagacgtggcagcaggcgcagcatctctgagccctggctggcatcctgggccaggctttagcaaagacaaaggtcctctgagcagtcagcatggcagcagaaaagcgttctctccagacccttacttgacttcataaagccaaaaaaaaaaaaaaaaaaaaagtctttggctagatatgtatcccacttttaaatacagaaaaacacaagtaaaatagcaaatatctttatttctactgaaaaaatataaaagcaaaattctaggcctttaggccaaggcttgggaatgtgatctctgtgactcaatgctccaaggtatgctaatcataaaacagcgacattcctctacccacccgcttcctgggttcaaagagtgttcattcaaagaatgtgctattgttaggggctcctagaaattgtcttgagagataaccggaacaattaccaggtattccttgtgactcttgtggctttgcacttccttgtgattcttaactggtatctttggtattttccaacaacgccctccccacttccttgagttgtggtttcttcctttaaatgcccccttacccagctactcggggcaccatggtcctctacccctgtgtggtgtatgaccgtgggcctgagagcgctcttgaattaaaagtcctcttgcagtttgcagtaagaccgtttctcgtgagtgatttggggtgtcacctctcctgagtcagaacgtgtgggagtcctcacgttgtgggtctttcactaccactctgaacatgtgggcttcctttcttatccggtggagtcgccccagtgggaggagacaaagtgtcaatacattttctgtgttactctcttgcatgggcctgtcctggagagtggttaatatacatagcgacactcccctggagaaaactgattttcccttacccagcagctatcagttgcacctagcttttcggttaggggcagggctctgtccacttccttgcctcagtgctgggattttgtccggtgtgagcctgtgcgagtcttgtgtgtattagcaaagcctccgtggattcatatgtgcattaacattagttcagttgtgtcaagaagaatttccttggggttatccactctctctgtctcttccaggcttcccaccttctcttgtgcatagatccctgagccttgagtggagggtgtgataaacacattccatctagatctgagtgctccaaagtctcttcctcactacactgtctagttgtgggtctctggtaattcccgtctactacaagaacttctctgaccaggggtgagtgaggcactgaactatggttatgggaatccatcattagaggtctgcttattactttgttcttttagtagaataacaggaggcggttttccccctggtttcaggttcttggccactttaacagtgtcatatatgagatgcatctcctggagtgggccttaaacctgattttttaaaaagtggtcgttccttccataacatttatgtcactattgcacagggtataccttgcaggcaagtcacagttgtatgtcacagggtattaaggtcaaaattatttaggatcttgagttttgtctcattccgtctcattcttaaatctaaataccactcaaaaaattaccatttgatttactttttaacaaagcaagtgaaagaactcagtggggaaacccccactcagttcccaattcggcgtgcacccaagaatcacgaatagaacacaacaccttgatgtaacaacaagaggttttttaatggcggagctccgggtcgaaacgtatctcacacaacaggagacagtggattcgaccacgaggcttggaagctaggggtttttatagaaaaggagtggggctgggggaggaattggcgcggtttcacatgattggcccatttaaacatcagcagcctgtaacatttaacttaggtcaaaggggtgggagctagggaggcgatgggcctgcccgggcatgtcctggtctgttctgctatgttctcagccccaggtttcaaagctcacaaacaactctttgggctatttaacatacattacatgaattacagttttatttcctttcattcccctcttcttctgtttagactaattctaatcatagaattttagagattggtgtcccctaactcttcatctacctgaactataagttgatattgcctttgaagaaccatgagttttactgtatcaattttactctggatgaaagccattcctctatttattatacaagggccgaaaactaaagctaagcatatcataaggattggtccggctacagcggaaattaaagaagttatccaagatggtcgcgattcaaaccacgactcaaaccacccccgttgagcatcccgttcctgtttccttcgctctaatctttctctcagtttctgcatagagtctctaactatttctgtatgatctgcatagaagcagcactcttctttaagggcagcacacagtcctctttcctttaggaacaacaaatcaagacctctcctgttctgtaaaactacctcagacagggaggtcaaagatttttttaaagcgtcaatggacttctctattgtcgctaggtcttcattgacagcatctctcaaagactgaattccctgtcttccttctatcaaagctgacactcccgtccccactcctactgccatacctatttccatgaatgcagccagggttaaagtaattggttctctttttgaccgccgcccagcatagctttcttctaaactggatgcagggtgataatatatgcggggtaacagctggatcatgacacaaaaatcatgagatgaattaaaaaccttagttgatacacagggagtaagtcctgtattgcaagcccaccatccaactggggaaggtacaagatagtaattagcttccgttctggacacagactgaatttgtccgcataggtgtttgtgagtggaaggtggggtacctatacagagacctggattcctcgcggatacttcagtcagggtcagtttttgtcctgtaccccaagagcaggaagtatggctgctggttctgttgaaatctccattgaaggcgattccttcataataaggcggacccgaggacaggcatagccagcagtcctcagtagcgcttggatcagttctgttaagggcataaaaggctcctctcactaggttaaacatcctctgtcttgaaggaatcgcgggggtaatagttagaggtacctgaggagtgggaggttgggtgatagcggccatattaagggggtccgcaatcactggagtaggctgagtaattgtatgggtaaggggtgtgaacttggttggggggcctaaaggattgtagggggtctctatttttaatctgatagtgaacaataatnnnnnnnnnnnnnnnnnnnnaatcctaagaccccaggtatacccttttgtccatcccagagctctcttccctggttcagtgaaggtgacacggagcggatggcaccagtcagtacactcgtctaggtcaaatcctccaggcacataagacactagggaatagttggctgttactctaatatagtcccagctcgaggagggcttccagcgggctgtacctgaagtctcgcaaccccagctcttacaaaagaagtcagccttacctccacacgttggattgagggactgactttggtggggcccggggcagacatagaagggatgggttcgaagcatacttttatccctttggttagagcaaccaccccatgggtctctcgaatgtttttctacgtatggagggggtgttaaaggtgccctctgaatgtcagagtacccctccaagtctcatctaggaggggctcctatagccaacttacagatgtcagggaaaagatcaggccaccaagtccacagagggtgtacctcggcgattgtccatacagccctacccccctcattgagtaccttccacgtttgttgaacaggactgtgggggttgaagtcttttgggatcgctcctacgaagcaggcgcaacttaaaaggattagtagtcttctccaaagtccactcatcatggctgactccagggggtgctctcttgacgtgggatgcgtggacccaagtggggattccttccactttgaccgcggtgggcgttgtcagtagcactaagtagggtcccttccacctcggttctaggtttcccgctcggtgtctcctcaccaggactgcgtctcctacttttttttttttttttaaggaatataaaactatttattgaccactgttcaccattatttacaataaagtaaatatacagttggatgacattctgatactacaaagttacttttctggctcattgaaccataacccaaatactgaaaagactgatcctaccagtaaggaatgagtcagggtaaagaaaaagcatgcaggtcattaattgatattagcaaatt

SEQ ID NO: 2 - DNA, 1679 bp, Mus musculus
acaagtcaggctcagtcaaaggactagctagagggtgaattcctcctcaagggactttcaggtaataactggggacaactgaactgtcttctaagggaagctcctggggtggatggccgcggaacccttctaaacaccactggctgggtttgcaagtcttcaaggcagtctggagatttctgccttggcatctcaaccacttgggaataaacacagcaaccatgagttctgaaacaccttgattgggagcccctggcctagcaagactgccttgtaccatggaccccaatcctttcatctactgtacctgctgtgactgctgcaaattgggacaaccaaagctaatcaagaccccttatccacttccaaagcaccccacggggaagtttaagccagttttacctccaccaatttcaaaagaacacaactcactcctgtcccaaccaggaaaatctactgtttccccaagggacaaggtccagtcaggaaacacagagagcagcaaagcaccttctgtgagtaaaaatgggaaaagggacagggaagtgattcaagtgtcacctggctatacactcattcgaaatcgagaacagatatcagtcaccttgggagatgagatgttcaacaggaaaaagcacttggaatcagatgtcttgagcaaagtcaaattttccaggactgatatcatttctgaccttcaggagcaaattgctgagttgatggcaataatagaacagatgaacagagaccagcagtctgccctgaaactggtgagtgacccttgtatcagccacaccctcatggctaatacattcagattacccaagtgccagctctccaaagatctggatctccgctgttccaacatgaagcagaagtttgaaaccgagagcagggaactcaaagagactcacagagaggagctcgagaggttagagaacaactacaaggaggccctgaaggcagaaaaggccttggccgaagagaaactagataagatgagcaaggaatataagtatctgaagagtatgttccatgtgtttcaggatagcatttacgaggaaatggaagacaagtggctgagacgaaaggccgaatgggagaaagatgagaagatggagcgggaaaagatcctgctacaacaaaaatgtagaataataaaaaagtttgagttacagtcggaagaaaaaaagaagaaaatgaatgagtccatcagtgctgtttctgataacttcgctcgagagaaagagaaaactattgcggcaaatctagagaaattgttccagacaaagcttgctgaagctgaagaaaagcataagtacaacataaagaccccgacagaagaaaataactgcctcaggcagatgttaaccacaaccacatatgaggaaacttcagaagtttctgagaagtcctcatctgccagtcccaacatgtatgagtctgacgttcctgaacacaacagcaacaaaaagcaagcatcgtaggtaactaactgctcctggggctgagcgacactgccctgggaggaagctacggactcttctggagagacgcacgggaaggctgagctcttgagttgttctgtacttttgtcatttttcacaatttgctttcttccaatggatagaaatatttgaattcttatcctaattatatcttggctctccattgagaac

SEQ ID NO: 3 - protein, 408 aa, Mus musculus
LGAPGLARLPCTMDPNPFIYCTCCDCCKLGQPKLIKTPYPLPKHPTGKFKPVLPPPISKEHNSLLSQPGKSTVSPRDKVQSGNTESSKAPSVSKNGKRDREVIQVSPGYTLIRNREQISVTLGDEMFNRKKHLESDVLSKVKFSRTDIISDLQEQIAELMAIIEQMNRDQQSALKLVSDPCISHTLMANTFRLPKCQLSKDLDLRCSNMKQKFETESRELKETEELERLENNYKEALKAEKAEEKLDKMSKEYKYLKSMFHVFQDSIYEEMEDKWLRRKAEWEKDEKMEREKILLQQKCRIIKKFELQSEEKKKKMNESISAVSDNFAREKEKTIAANLEKLFQTKLAEAEEKHKYNIKTPTEENNCLRQMLTTTTYEETSEVSEKSSSDNMYESDVPEHNSNKKQAS

SEQ ID NO: 4 - DNA, 84476 bp, Homo sapiens
tcctcttaccttactgctgctgccccagtctttcctgcactccaaagcagtgtctgtgtctgatctcagcagcagcatcacccacaaacctttacagtatttgggcacagtcatcttttgttttgaaggtaaagggtaaaagatgtggtgaagcattccctgagacctgaatgtggttaatgatgagagtgaatctttagggttatggttcctgctgtttcagagctgagctccagatcaagggcccgtgtgtttttgtttttgtttttgttttcttcctcttctgagatggagtcttgctctatcatccaggcttgaatgcagtggcacgatcttggctcactgcaacctccgcctcctgggtttgtacaattcttccacctcaacctcccgagtagctgggactacaagcatgcaccaccacacccagctaatttttttatttttagtagagacggggtttcaccatgttgaccaggctgttcttaaactcctgacctcagttgatccacccaccttggcctctcaaagtgctggaattacaggcatgagccactgcacccagcccgggcccacgtattcttgaacaaatgtaggtttctgtgtgtgcctgtcctatgcagagccctctaaagcccagggctcagaacagtggcccctctttctaggtgcaagggtagcactacaggctttcacgggattcctgtggctacctggtcgggtctattcaggatgatccatgggagttagcatagcaccactctaaagtcagatgttgaaagccaaagatcaaagagagttgagcaagtgagcaagttggagataattacaagcttcttaagagaacactgtcttttccacactgggagtgttctcatagagccacaaatagcgctccacagatggaaagcctccgaatgctcccagctgaccatgtttgccacttcgtgaatgctgcagcatcacacaagaggatatctatttccccaagccctgtgcagaccaattttgataatattgctgtcagaattaagttgcagtttctctcattcatttttcaacttatactttgttttactattggtggcctcctccacctctgttccaaatagtaagacactttgctttaggcgaagttactgagaatgccagcacttccccaatttcatccaagagaagagcacttaacacttagcccctaaacaccttcatttccttctcctcagctgttttggaactggcgaagctttactcatgtccaaaaagatgaaaggagaatggggatacccaagtagtagtaattagtgctgagcctttgccaagtcgagtggctggggtattccttcagcccttacttcctctgtatctctgtttttagccatgcttcactcaagacccaaatcctgctgcttttttttttttaatcataagaaaggatttaaatataaaattttacacattaaacacactcaaagtaaatattcaatctctggatggagacagattgtctagatgactaatagagtctatcaattcttctctaagttatttccctccttttaatctttgaaagtctctcttcatctagcctgttcatggtgctcagagttgaagcagccatagtgcaaccaagacgcttccctccatcaacacaccgaggctggcataacagagagatggaaagagcccagttctccaaggacattgctgaatctttgcaccaactctgatagcactgcctccagactctatttcatgaggttaataaacctctttgatgtaagccacttgcaatcaagcaacaggtctatgcattttaactacacatggcccacactgagaaatcttgtcgtaaatactggtgtcctcagagctctgttctagaccctcttctctccttacacaatactctctctatatgtgatctcactcgctcccttggcttggaatagtatccactctgaagactcctaaatctgcttctaggccagaatcttcctctgaacttctaaaatatgtaagaaactctaacagacgtcaccacttgtctattagtctccctgcacctcaacatatccaaaactgaactaataatctgctccctagaacctgtttatccctccacactttcctatctcaataaatggcaccacggtcaactcaattgctcgagctggaaagccaggaatcatcaccttctccttttcgctcatcccagcatccagtcaatcaccaagttctatcatgtcttctctccatccccactgctgctcctcagtcagggccatcgtcaggtcccatgacgaccactgccacagacttttacctggttttcctggcccttccaattgcttccctatattgcagtcagaatgatctttctgatatgtagatctagtcagatctcttctctgtttaacactgctgcctgactcactggactagaagagtaactcctgctatgaactcccactgcttctggcaagtctcaatatgagtcattgtggctgcatggtgacttacacctgtaatcccagcactttgggaggccgaagcaggaggatcacttgaattcaggagtacaagaccagcctggacaacatagcaaggcctcatgtatactaaaagtcaaaaaaattagctgggcggccgggcgcagtggctcacgcctgtaatcccagcactttgggaggccgaggcgggcggatcacgaggtcaggagatcgagaccatcccggctaaaacggtgaaaccccgtctctactaaaaatacaaaaaaattagccgggcgtagtggcgggcgcctgtagtcccagctacttgggaggctgaggcaggagaatggcgtgaacccgggaggcggagcttgcagtgagccgagatcccgccactgcactccagcctgggtgacagagcgagactccgtctcaaaaaaaaaaaaaaaaaaaaaaattagctgggcatggtgctgtgcacctgtgtagtcccatctacttgggagtctgaggcagaaggatcgcttgagtccaggaggtcaaggctgcagtgagctatgcatgcagcctgcactgccactgccactgcaccgcagcctgggtaacagagtgagctactgtctcaaaggaaaaaaaaattaattatgcttttattgagcttttttattgtctgttttctcattggtctctaagttgtattgagtataagaactgaggtatatccccacacctagcaatagtgcctggcacacagtagacaacaaatgtgaagttgagtgaatagatgaatttataacaatattttgtaagctaggggttgtgacccaccaggatcatgaaatcaatctagtggattataatcagctttaatttaaagaagaaaaagaaatagaagagaatagcaaataataagagtattatttcatgaaatttttttattacaaaatttgtaaaatgtatttcttataatgagtggcagtaaaactaaaatgaaagccactgggttgtaataagcaagtacttttttctatagtaagaaaaagcagctttatttaaaaaaaaaaatcggaaaaccttgtgactgcaaaagattcctgccttgggggatttttactttcacagatttcaaagccttaaactcgagggaaaaaagtgtctagagttttaggtttctgtgagtagatcacagaggaattaaaaatccatcacagatcctgcctggtaactattgccatagaccaatgaagcctaaaagtgctgttgaattctatttcctctgaagatatatcttaaacttttttgtcccatgactgatgacgaaagtggaaatccagtgttaaaagtatgaattctttgctgttgagggtggtcactgatttgtgtcttggagaatttaattggctgtttctcccaaccttctctcttgaagaaaagagccctgagccaatgaggagctactgttctgtgtccatagcaacaaaataaacaaactttggcctgccatctcccaagggcaaacctcacaactcaggcccaagtcacaggaatctgaatggtggggtgaccttctcctctagtttaatttcattgcaatactgagaaacttcaactgttttgtctttagaagggaaattcatgtttgtgccaggccagcctttgtaaaagcctttgattggattcactagaagtctgtcttcccgcagtacatatactgtgaattttctccttcggcatttcaaccacttggaatggccactaaagtggcttttgatctaaagtaaactctgattctgtgttgatggggaaccatttctctctaacatggtggtttctttaagatgtttgacttgggccacatgagaataacagatctttgggcagtccaaggtaagctctttggaaaagatgttttatattattttttctactgattattaatactaaccagtaacttctctgaagcctctgccggctcactggtgactattgttagggcaagcctcaggtaaaatcatcaggtagaagtgcaggaaagggaaaaaagggggagaaaaaatccttacacacactcacacacccctctataattagagctatatgatgtcaagccactgtaaatgcagatctatctgtgatgacatggaaatatcaactagatatcctgttacacaaaaagaacaagatgcaacattgtgtgcaaagtatgctctcacttatgcaaataatttaaaaaatctattatgcttctctacaggttaagttctatatgcaaaacatttaaggttatatgcactcacaacatttctggaaggatgccccaaaaatctgttagaagtagttcccacttaagaagctatgagaagtcaagggctgattttagctactgaaatattaaaatactgccatataggcagggcacggtagctcacacctgtaatcccagcactttgggaggctgagatgggtggatcacctgaagtcaggagtttgagaccagcctggccaatatggtgaaaccccatcgttataaaaatacaaaaattagccaggcatggtggcgggtgcctgtaattccagctactggggaagctgaggcaggagaatcgcttgaacctcggaggtagaggttgcagtgagccaagaccacaccattgcactccagcctaggcaacaagagcaaaactccgtctcaaaacaataataataataaataaaatactgtcatattgattggtagatgaccattgtccaagccccttgcatgtcctccttgccaccttggttgtcccaactcctcccctggcacccccagaccacctcatgattcagcaactaaggggttaatgcctggcatggaggtgggagtgagatctcccaggaccctgttccaaccctggttgattattcaatagccttgtcttactggttgttaaatattttgagtatcactcccatgggtgttcaaagaaaaaggcctttatttttattttatttatttatttattttttagagacagggtcttgtgctgtcacccaggctgaaatgcagtggtgtggtcctagctcactgcaacttcaaactcctggcctcaagtgatcctcccgcaccacctgccaagtggctgggactacaggcacactccaccatactaggctatttttaaaattttttgtagatacagagtctcgatatgtttcccaggctggtctcaaactcctagcctcaagcgactctcccacctcagtctctcaaagtgttgggattacagacatgtgccaccacacctgtgaggccttcttttttttttttcttaagagcaaaagaatatataccaagacattgtttatcatgggaaagaggaaaaggaaacaactacacattcatcaaagatcattgaaaatctatgtaaaactccactgagtgattgtatcacccatacaatttacctctgctttctggcttttgaatgcaaatgtttaatgttatttataatatggtaatgacgattacaacattttggcagtttcatctgtgaatctcttttctctttgtttttgttttttgttttattcatttatttattgagacagagtcttgttctgtcatccaggctggagtgcagtggtgagatctcggctcactgcaacctccacctcccaggttcaagtgattctcctgccttagcctcccgagtagctgggattacaggcatgtgccaccatgcctggctaatttttgtgtttttagtagagacggggtttcgccctgttggctaggctggtctcgaactcctggcgtcaagtgatcctctcgccttggcctcccaaagtgctggaattacaggcatcagccaccataccatctttttctctttgttgagctagccccaaccaccatgatgagctgattacaaccactaagtttactagtcaggtaagaaatattcatcaaatgcccgttgtggacaagccactttgcaaggcttagtggaggtgttgaggcacagagagcactccatagtggagtcctggccttcaagaagagagaaggcagttgctagaagtgggcctgccttagcctctcacttcttgccccatggactcctgctaaatctcccaagttcagggttggctcctttcgtacaggaagcagatacaaggttctaagcagaagcagtttcttttttgctactgttgtagccttctttcagactctcacctgaattccagccccttgtagcatcatcttcccacctgggcactcgatcccatctgcttctctgacctcatctccttgacttggccctaacaggcccccaaacccagtggagtatggacagttataaatggcggccctgtcacctgctcttcaggcctttgctgtttagccagtctcctggactcctttctagccctggactcctttctagccctgacctctattgcagaagactccctagtcccaggcctctggcccagccaacccctgcacacgctgcctttcttccaaggccaggtctcttgcctttgctccactgctcacttagctctctttctgccgactcctctgctgactgcaagctccctgagggcaaggtccaaccagcatctagcacaggactcacagcacgagcctctaaagatttgtactgttaaagcagcagttacaagtgagtgagttttagtatcctcatatgtaaaacagattcaaccttaaggtcctctgtagctcttaaggtcattagacaccatcagtgggtttctcaagcatcagtcgtgttggagacaaaggttgatttcattttttcagcaggttcttaagcaaatgtattccagtgtaatattgaaaactaatcatagacttagacatttgagttaaatctgctatcactttaatgcttctgttaggccattgattcttataacatttttggcatttgtttttattactaatgaaatatccactgacatggctgggcacagtggctcatgcctgtaatcccagcactttgggaggccgaggcaggagaatcccttgagaccaggagtgcaagatcagcctgatcaacatggcgaaacccagtctctactaaaaatacaaaacttagccaggcatagtggtgggcacttgtaggaggctggaggcctacacctacaggaggctgaggcgggagaatcgcttgaacccaggaagcagacgttgtagtgagccaagattgtgccactgcactccagcctgggtgacagagtgagactctgaaaagaaaaaagaaaagaaaagaagaaaagagaaaagaaatatccactgacatcatttaaaaatcaactaatgttaaaaattcattaaggaaaagtctcaatttctgccccatcccctgacctgtcagttctacttctcaatgtgctcctagaggcaattattttcaactctgctatctatttctttggaattttatttacctcatacttccaagtaatttgtctgtgctccgtatgttaatttttctttctggtacagcagatgaggatttggctcttatacatccccattccactcattcttcccatgtagtcacagttcactttttggctaagtcactattaagtatttacatttgatacatatgagtgtgtgccatactatgattatgtttactttctcattcaatattttttaacctggagtaattgcacattttattttcttaggtttctatgtttctattgccaatctctcacccacactcccaaatgctctggttctggttgctctgtaacaaagttaccacaaatgtagtggctcaagcaacaatcttacaattctgaaagtcaaagtccaaaatgagcctcactgagctaaaatcaagaggtcggcagagctgcattccttccggaggctccagggggaattcgtttccttgccttttccagcttctagatgctgccccgattccttggctcctggaccttttcctcaatcactcctacttcttcctccattatcacatcttctctgactgataattcaggttaatctttctatctcaagatctttcatttaatcacagctgcttttgccatgtaaggtaacatagtcacactttccagggattaggacatgcggtatagggaaagggacagtattcatcctaccatgtgctcctacacatctaccagctgcctgtcaatatcatcaggtaatctaccagttccaagtcctgcaccctctgggacctctgatgtgtgaattggctccatcttgttcataccctgtctttgcaggcacataggctatagtgagctatggagagagccctagttactatgccaaacatgtacggacatcccttgtgcaatcttgtctcctctcccattttcttgctcttgtggaactaaatctcttttaatgctgtactctaattttagttggattctggaaaagaaagaagataagccagtgtggtcaagccaccatgtttatctgatagttttctttcatcaagattctcataataggggttttgttttttgggagccagggaaggagtttccactctgtaattcaagaaggtgaccaggaatgagaaacgaggagattcatttgcactgtagctcaagcagcagaactaattttccaggaagttctgtgcagaacttgctgtgggaatttctctttccttcagtgagaactggtgtggcctgctggaaaggaaggagcttgggagtcaaagagatttgtgtttgtttccagctctgcaacttgctgccgccgtgacttctctgagtctcagtagcttcatctatagtatcagcataacaataattgagcagttttacctggctcacagcaaggactcggctatggcaaattttattttattttaattattttgttttatttttatttgtatcttattttattttttgagaggaagtctcactcttcacccaggctggagtgcagtggcacaatctcagctcactgcaacctctgcctcccaggttcaagcaatcctcccacctcagcctcctgagtagctgggactataggtgtgtgccaccatgcccagctaatttttgtattttcagtagagacggggtttcaccatgttggccaggctggtctcaaactcctgacctcaagtgatccatccacctcggcctcccaaagtgctgggattacaggcgtgagccaccatgcccagccagttatggcaaagtttaaattgctttcaagtcaagtctactgagtagaaagggatgagctgttaacctatagtcaagaccctgcaccagatcaacagcttctggaatctaccattgttctttgggtcctccctgggttcttcccaattcttctgtatttttgctttgattctaaatggtttaaccttctgctgttgtttttcaatttcagcaagagcctcctgatctagcagccaagactccccctgacctttggccatgtaccccaaccctctcatctactgcacctgctgggacccctggaacttgggaccacggaagctaatcaagacccctcaactaccacgcaagaactccacagggagttccaagtaagaattatctgggatggggtaggcacagggaccttgggatccatttgtagcctcatttctctcacaagatttctaaaacagcaagtgtggcaggaaaatcccaggtgggccagaaagcctcgctttccccagcttccctgccagctggttggctgcaccctcatcttgccagccctgcctggggtttgtgccattttaaatgaggaagtctcagtgttggtgcaacggcaaagtgcagcttccaaccaaagggccctgatggcagctgccgccttcatgtgggataaagagctttgggaatcgggggacaaactcttcctgggacagtgaacaagtgccagggccttgggcctgagttttaaaggcctcagattttaaagattccagctatcagatcatgcattccaattttgggtcactatagggatgtacttaatctgggagtgttaaaaagggtttccgaatttccaatgttcttgttttagttatttgtttttcactttcaggctaactcctcttgtaccagctccaaaaaatcacaattacctccaaccaacaaaacctgttgtttccccaaagtaagtattgttttgttttgttttgttgttgtttttgagatggagtctcactctgttgcccaggctagagtgcagtggtgtaaccttggctcactgcaacctctgcctcccagtctcaagcgattctcctgcctcagcctctcgagtagctgggaatacaggtgtgcgcgccaccatgcctggctacttttttgtattttagtagagacggggtttcaccacattgcccagggtggtcttgaactcctgaactcaggcaatccacccgcctcagcctcccaaagtgttgggattacaggtgtgagccactgcaccaagcagtttgtttgtttgagatggagtcttgctctgtcacccaggctggagcgcagtggtgccatcttggctcattccaacctccacctccctggttcaaacgattctcctgccttagcctcctgagtagctgggattacaggcacccattaccatgcccacgtaatttttgtatttgtagtaacgacggggtttcaccatgttggccaggctggtctggaactcctgaccttaagtgaccagccctcctcagccttcaaagtgctgggattacagtcgtgagccactgtgcctggccctaagtatttttatgtccatgaggcagaaatggtttcaggcatgtgaataaaataatctccctctcacctggcctgacttgaactaattgatgccagggatgttagagaattgccagaatcgaccttgatttcttgcaaacctcagatcctacatgtagattttggggtcctctgcatccacagcttccaaagtcattgcattgtttgattcaaagtcactgtatccactgctctccacaggggtgcccccagtaactgtcttctgccctggagcccaaagcttgatgtgtgctattgtcacagagccttggcgaccctcccgtgcatttagggtggtgactcactctttagctgattactgtcctgtgtctaagattttctatgggttgcatcttggttttaatcacaaattaaaatttttactcgcattttacaagcttagaaatgtaccttagttttaggtctttgtatgaatctttgtattccattaatttttttggaaaatatttattgaccacctattatttattaggcactgtttcaggtgctgggaaaagagccagaaacacaataaagtctccactctcctggcacttatattctagtggggaaggaaggggaagaggaccataaactagttattacatccgaggttggcaagtgctacatagaaaaaaaatgcaggcaaagcaggtaggggctgtgacggtggggatactttacgtagagaggtcagggcaagtgcctgtgtaaagggggcaaaaggagcctcaatgatgcctggggcaagcactcttggcagagggaccagcaagtccaaaggccctggggtgggaacttgcttggcatgtctgacctcttccaggaaggcagaagccagtgtggcatgagcggagcgagtgagcagggagtggtgggagatgagctcaaagaaggtaacaaggtgatgggtgtggtgggcaggacagtgaccccctcccaaggacgtctacaccctaatacccagagactgtgaatatgttacttgccaaagaggaattaaggctgcagatggaattaaggttgctaatcagctgaccttcagttggagagattatcctggattatcccagatcccatgtaatcacaaaggtccttctttgtatgtgaaagaggaggtcacagtgtcagagtcagagaaggagctgtgacaacagaagcagaggttggagtgatgcaattgctgctggctttggagctggagggaaaggccactgtgaacatatacacatatgtggtattcattttatatatagcatatataaagatttgaatgaaaaacaagtttaacttcaacatttgtatcttaatgggatacatttcattttctggaacatttgtttatatagaatgtttcattctccaataaagagagttccacacagttccctgaactgagtgtgtgtgtgcccgtttgtgtgtaagggggtggtggggggtgtcacctgactcacagagccttgactcagggagaatatgtaggggtccctctagctggtttatgctcctccaaaacagaagttgccccaacatcataagacaagtcttttgcctccttgggcaggaccttttcatgagcacccctactttggggccctcaggagcccggcttcagtgagttccccaactatcctagggatcccctaagaaggtcaggtcagagagcagaagtcagatggtggcggcctcagggttcagctcctaagctttgaacttctctttgctgtctggttgctttctgagcatgtctttctcttgcagaatgaaaatccattcagcaaggcaagaagagactaataaatcattttatgtgagtaaaggcaggagagggcggtgggactaaaatttattgagtgcctactatgtgcaagcatgggccctttacatttttatacttaccttgtcgaatcttcacaaagatcctgggaggaggtgctgttaatattgcacattatgcacggcaggtaagtggaagaaccacgacttgaactcagctcagctagattccagagtgggcatttaattgccactctctcctgccttgcacaagacaaacagagtgtctcagagaaactggacatgacagctagtccaggccagtgaacagctcatgcctagatgcaggaagtgctctgctgacctagggaactaacgaaagctggggagaggctgccgggacccctcaggggagcaggggcgggagggcactggagaaggtgatgagaaccaaactcgaaggctcttgacgcctgcctgggagtgtgggcccgacccttctggtgtctgggagcctttactggtctgacgcaggcacaggaccaagtaagagttacatttcagaaaaagcaccctttggtgggatgtaatcggtacattttactgttttctgtgtttatctagtttcttttcttttttttttttgttttgttttttagttttaggtctttgtatgaatctttgtattccattaatttttttggaaaatatttattgaccacctattatttattaggcactgtttcaggtgctgggaaaagagccagggaaaagagccatgcagtcctttaatggttagggaaaaaaatatacaagcaaaaatataattgccctctaggtagagaggaggatgaactgtggggggagcaagactgaaggcagagaggccagagcccaagagaaagatgatggtggcctggggccgtcaggcaggggtgtggagagaggagggtgactcacagagacatgaaggaggtgacaacagcagggatcaaggggctgcagcatgtgctgcgcagctctcagagccccagccttgccctggtccaggccagcagaggccctgcccaggtttctgacttggcgtctaatgggaaaaggaggaggaaatgacattttgtttgcaaccgtcctgtcattttctcatatgttgttttgtttttccctcacaaaagccctttgagaaagagttattaaccccactttctgataaggaaactgaggcacagagatgctggatggctactgtctggtggcagagccaagatttactcaggcctctgtgattccaaaacccgagcagttgccgcatgctcacctcctctgggctctggccacgagggtgaacacaagtcgggggcaggggcatcagtggcttggtttggcgcagagcttgagaggcccctagggacacccaggagcctgctaagcatcagatttgagtcggagagatgtgagaatgagctataatgggtgaagggcccagaagggcttgggctgtggagtcccaggtccctgtttttaagatgtgagtgaggcaataagagaagatttggaaaaatctcagcactccaagtctgccattttatcttactttcccttgatgcctaggaagtgatcaacgtgtcacctggctatcaacttgttcggaatcgggaacagatttctgtcaccttaggggatgagatgtttgataggaaaaagcggtgggaatcggagatcccggacaaaggcagattttccaggtaatgctgttgcagcaacatgcagctgcttggggctactcccacccagctcagcccggcctcagggacaagccaaagccgctatgcccacacccaggccactggtccctgctctggaggggccgcaagggcacctccctcctcgcccctgcttcctgatgatgcatctctccacatctgcctctctgctctgatcccatccgtgagcagatccaaggggcaggatgaagattgggagttatgtgattgatcccaaaggatagcaattgttcgtggggtgaggaatagatagaatagccataaattagtctgaatttgaggcatgcaaattaagtaaagtgagggtttctgggtggctggagtgcacttttttttttgagacagagtctctctctgccacccaggctggagtttagtggcacgatctcagctcactgcaacttctgcctcccaggtttaagctattctcacgcctcaacctcttgagtagctaggattacaggcttgcaccatgacgcccggctaatatttatagctttagtagagatgggattttgccatattagccaggctgttctcaaactcctgacctcaggtaatcctctggcctcagcctcccaaagtgctgggattataggcgtgagccactgcgcccagcctctttttcattatgtccaaaaatactactcagctcatgcccccgggagatgcagtgtggaaggttctggcctgactctaacccattagcacagctgtcctgtctgtcttcaggctccacccactctctgtcctccaatgccatatcaagtatatctccatgtctttcttttttcattaacagatgcagattcatctctacatcttttcattctaccctttaatctcttattcatatcttcttctctgatatcctgcccatgttcaggcatcttacttcttaactgcactactgaatggctctccaagtgcctcttccctcaggctgattttgctgtaagaattattttttcaacacacaagtctaaaagaccaacaatagaaaacacacacacacatacacacacacacacacacacacacacacacacacaatcatctacctatctgctagtgtattggcagaattcaaccaaaccgttagcagtggttacatctggggaagggattcaggttgagggtgagtctgaaggcccctcaagtagaatgaggccatgccatggagtctccctgatctgacctggcccagagggccacccaggggccaggggcattcaccctgcttatcttgtcttcccacccaggggcattcagcctctgctttcttttccctgcttatccacagccctctgcaggaagagaatgggtcatgcacctatagtcaagctagcaccgacagccacctcttggcctcacaaggaagttgtcaccagttgtgcacaataaaatatgataacctgtgcttgttgtattccctggtaaagttgtgggtgttgtttgtattgaagattgtgttcaaaagataggggctccctattattcaactttctcaagccttttctttctcttacccttgaactgtctcctcctgtatctcctctcttgttttatcagcccacattctctctgtgctcagttagacatgcaaagtggttggccaaagaggtcaaagcatcttgcattgaggacttcctctcagctccactgcacatggcaccacctgctgccttgtcactctagcccaaccagacagagctaaataatttacagataccatggcagccttagacccagaaacacagaaaaccatgacctgtgctgaaagccactctcttaaataccctcttagtcccatctctggcccaatccttgtctgtggttcacagccagcatcaatcctattgcacatcttctaatttcctaatcctctgaacttcgtcctctgtttcaactatcattaccaaatcaaggtcaaactctaataaatttctgacatattcttattttccttctattcggtagggcaccaaaccatcctgttcaagtctagtgagcttacccacaagagccagatctgagcctcaactgccctatagccaaatgccttctgtaagaccacccctatccctccacccccaccccataatgatagagcaggtgcagaacatggccagctctcaccaggccagctctcaccatgccagagtcagtcatgctcaggggcctgaatggcatggaatggtaagctttgtggatgatagaagaattacttctcctacaggaccaacatcatttctgacctagaagagcaaatctcagagctgacagcaataattgaacaaatgaacagagaccaccagtctgcccagaaattggtgagtgaccttacattagctaacatcttcatggacaaaataaaattaatatttttgaatcacctatgtgccaggcaaaatgccaagcactttactcatatgagccatgttgtccaggtgacaggaccctaaagattggactgtgtcactcagtagtatttctctgacatctttatctgtaattccaagaactcaagttcttccacaaagcttaactcatttatttccaggagctctccaagtacctctgtgtgtgtgcagtgacactgtcctcctcacactagggtgcacttgttgttttctgtctggcctttgtggtgcaattaagtttcagagcttgtgaggctctcactaacgacaccagcgcacttaatgtgcagggcttactctctgactgttaaagctgcccacacatcagaatctgcagatgtcatttgacactctttgtgattcctgaggatttcagtgacacctttttagcttttaccatctgtttcatctggtgacttcttcctcacctcaaacaggtgtgcctgttggcctggcctggagtgacagccagtgctgtgttcagaaatatcctccccagggttgttgaaccccaccccatctgtgaagttttacttcccagaaggcagcctctcaccctctgatatgccccagatgtgtctgaatcctacagtgacccagcttatgactcaggctgggtcctatcctgagaccaccctcctccgcctgccaactattgattcattaccttatttatctgaaaacactgccaggtttatggtctccttctatagaaaggaaaatgagactcagggaagttaaacaatttgcatacaatctctcaactgaacagtggtagatcattggacaaaatgaacattttaagtcataggcacagatcctgctgaagacatatttagagactatttccatgaagggatcctagactgtgttactgaaaatactgccacttgtgaagatgctatttgttgtgtggccctgtggaagggagtagtgttggctgacgctgggctgttctctgtctgtcagagtggctctgctgaccacttgttgtgtgacacagtccctggcttctccccagtagtcagagaggtacaaggacaagccctaaacccttgtcctagctgacagtggtcaccgactgatttgaagtattgatttatcctgagacactggccagaggatctgacatgttagaatgaagtatcacctgaaagtgagcaaatcctgcctgctagaatggaactatactgtcaacaaggattaacactagattttaagttcctcgaaggcaagatctgagtcttagtcctccttggctcttccaagccaagccttttgttcaataaatgattgctcaattggattacatatccaaaaatctgaaggccatgatgtaacagaaatgacgatctagcacaggagaccagacctacccaaaaaaaatagtcagtgaaagagatgcaccaacattatgaactgaataagtacaaaacaacatagagcaaggcacaaattgttctgttcccttattaataatgtgctctctggcactgcagagcacagtggaagaggggtgggaagggggctgtgccccatgaattggaaggcggctgtgccccataaattggaaggcttttcagaaggtgcagatcagaatgggacagggtcctcagtcctgtgttgtagatgctgattttgtttccagctctccagtgaaatggatctccgctgtgctgagatgaaacagaactttgaaaacaagaacaggtacactttctggcatggacccttgtgtgtgttgatggctctaagggtcccgcatcctttgcaggattttagttcactgggacttcaaatagttctaaatggagttgggggatgaagggtgggggagatgaacaagacacgtgtctttgaagagcagaatggcttgattcaaagccactaaaataaaccacaaagaaagttattactgcttttacattttatcatccaatcctttcatttcaattataatctccctttttgttggttactgagaagagtcatttttgttctctatgagatttctgtgataaataactgttgttctcagccaaggctcctcctccaccatctcctcgttcttctcttcctcctcctctttttctttgtctcacctctactctccctggctgctaggtcagggcctcagcaaaataggaagaaagtataagagaatcaggagcaaagtcaaatcaagagaaaattgaaaggagtccaaatacagaaagacagagaatagaacatggttaccatggtccggtaggaggaagaaaatggggagatattgatcaaatcatacaatgttgcaaatatgtagggtgaacaagtttatattgtttacaaagatataatgtaaaaaatgagagctatagttaataataatgtatgatattaagaactgttgctaaatgagtttatagctgttctcaccacagagggaaaatggttaactaagtgaaatgatggatatgttaatttgttccactctagtaaactttttactatatgtatatagtaatctccactattataaccatttgtgtatatatatatatacatacatataaactctacctatatatatatgcttgtgtagtgtgagtgtatatatatagtaaaaattatgtgtaatatatatagtataatggttactatagtagagatgcatatatatatgatttatatatatatatatatgaatcttatgacatcatgttgtatacctcaaatatacacaataaaatttatttttaaaggagttttcttatgtgtatgggtgaagataatcctacatcccctttcaggctacttgctgcacaccagagcagccttagaaatcctggtggagagatagcactcttagttgagtcatagccatttacacatttatttatctatagactttatctgttagagcagttttaggtttacagcaaaaatgaggagaaagtacagagagttcctgtgcacctgctcctaatcaaattcaatcaaattaaactcaaagatgagtacaccaagacacataataatcaaactatcaaaaatcaaagacaaagcaaaaattctgagagcatcagaaggtaagaaacacgtcacatacaaaggagtgccaatacaattgtaatttcttaacagaaaccctgcaggccaggagtcagtgtgatgatgtattaaaagtgctgaaggaaaaaactgcctaccaagaataccttagcaaagctgtcttccccagttgagggagaaatagaaactttcccaaacaaaaattaagggagttcattaccactatgcctgccttacagaaattgcaaaaggaagttttaaaaacggaaacagaaagctgctaataacatgaaacatatgaatgcacaacactcaatggtataagcaaaatagagccatactcagaatactttaggactgtgatgatgggatgtaagacaattttatcccaatatgagagtaaaaacacaaaactattaataacaactatagctaaaataaattttcaatgataaatcatattataaaatgatatcaattctgacatcaaaaacaaaatgttagggagggagtaaaactgttgagttattgcttgcaactaaacttgttgtcagcttgaaatagcttattacaagaacaagatattctaactaagtgtcatggtaaccacaaagataaaaatctttagcagtagcacaacacaaaaatagaaatgattcaaagcatacactacaaaaaacatcaaaccacaaaagaagagaccaagagaggaagaaagaatctacaaaacaacaaaacaaaaattaacaaaatggcagtagtaagttcttacctattaataattaccttgaatgtaaatggattaaattctctgattaaaaaaaatagaatgcgtgaatggattttttaaaaacaagaaccaactatacgctgcctacaagagactcatgtcacctgtaaggcacatgagcactcctcccagggtctgagattaagcccactcaacctgccgctaccaccattgctggcacctatctgcatgcaccacctatgggcctgaggacaagaccacccaacttctcatagccattgccaataccagtgagtaccacttgggtgctagagggttgtcccactattgctactgccatcagccacaacacacccactgccaatgggtccgtgaacctacctacctgcccagcccatagctgccattcctgacacctgaaaaaaacactaaaaggcccaagaattggcctgcctgaacccactaatacttaatgccagcatatgccaccctggggcccaaagataggcacacttataagattagaataaaactagaaatcaataacaagaaaaactttggaaactatacaaacgcatggaaattaaacagcattctcctgaatgaccaatagaacaatgaagaaattaagatggaaataaaaaaaatttcttgaaacaaaaaaaaattgaaatacaatataccaaagcctgtgggatacagcaaaagcagtgctaagagggaagtttatagcaataaacacctacatcaaaaaagtagaaagatttcaaataaacaatctaataatgcacctgaaggaattggaaaaccaagcccaaaattagtagaagaaaagaagtaataaaaatcagaccagaactaaacgaaatagaaactaaaaaaacaatacaaagggtcagcaaaaaaacagattcttcaaaaaaataaaccaaattgataaaccagtagctagactaaccaaaaaaagacaagagaagacccaaataaaatcagaaatgaaaaaagagacattacaactgttgccacagaaatacaagaaatcatcagagactattatgaacaactataactaacactaacaaactaaaaaatctagcaaaaatagataaattcctgaaaagataaaatctaacaagatgaatcaggaagaaattgaaaattattcaagaccaataatgagtagcaaggttgaatcagtaataaaaagtctcccaacaaagaaaagcccaggaccaaatggattcactatcaaattctaccaaacatataaaggagaactaatagtaatcctccttaaactattcaaaaaaatttgaagaggaggaaattctcccttacttattctgtgaggccagcattaccttaataccaaagtcagatgacaatacaacaacaggaaaaagaaaaccacggatcaatatctctgatgaacacagatgcaaaaatcttcaatgaaatactagcaaaccaaatccaacaatacatcaaaaatataatacaccatgaccgagtgggacttatatcagaaatgcaaggatggttcagcttatgaaaatcaataaacatgatatataacatcaacagaatgaaggacaaaaatcatgtgatcatcccaatagatgcagaaaaagcatttcataatagtcaacattgcttcatgattaaaaaataaaacctttcaacaagctagatatagaagaaacatacctcaacataacaaaggctgtatatgacagatctgcagctatcatcatactgaacagggaaaagttgaaaacttttcctctaagaattggaacaagataaggatggctacttttaccgctcctattcaatatagtactggaagtcctagccagagcaatcccgcaaaagaaaaaaataaaaggcatccaaattggaaaagaggaagccaaatgatctctctttgccgaaaaacataatcttatatatgaaaatcacaaaaaaactccatccaaaaactcttagaactaataaattcagtaaagttgcagaatataaaatcaacatacaaatatcagttgcatttctgtacaccaacagtgaaatagccaaaagagaaatcaataaggcaataacatttacactggctacaaagcataaaataaaatatctaggaataaatttaaccaaaaaggtgaaagacctttagaaggaaaactgcaaaacacagatgtaataaattgaagaggacacaaacaaatggaaagacatttcacccatgcttatggactggaagaattaagatcgccaaaatggccatgctgcccaatgcaatccctaaattaccaatgtcacttttcacagaaatagaaaaaataattctaaagttcatatggaacaaaagatgagccagaatagccaaagcaatcctgtggggaaaaaaaatctggagttatcacattacctgacttcaaaatatattacaagaccaggcatggtgactcacacctgtaatcccagcactttgggaggccaaggcgagaggatggcttgtgtccaggagtttcagactagcctgcacaacatagcgagacaccgtctacacaaaagattaaaaattagccaggtattatggagtgtgcctggagtcctagctacttgggaggctgaggtgggaggatcacttgagcccagatggtcaaggctgcagtgagctatgatcatgctactgcactccaactgcactccttgatatagatcaaggctatcataaccaaaatggcaaggtattagtataaaaatagacatataaacataaagcatggaacagaatagagaatccagaaataaattcatgtaattacagccaactgatctttgacaatgctgtcaagaacatacactgggaacagggcaccctcttcaataaatgatgctgggaaaactgaataaccatatgcagaagggtgaaactagacccctatctctcatcatgtacaaaaatgaactcaagatggattaaagtcttaaatgtaagatccaaagctataaaaatactagaagaaaacctagggaaaagtcttcaggacatcggtctaggcaaagattttatgaccaagactttgaaagcacaggcaacaaaaacaaaaaaagacaaatgagactatattaaactaaaaagcttctacacgcaaaagaaaccatcaacagagtgaagagacattctcttaaatgggagaaaatatttgcaaactactcatttgacagaggactcaaacaattcaacagtaaaacaaacacaaattcattaaaaatgggtaaaggacatctttcttaaaagacatttcttaaaagaagacatttcttaaaagaagacatacgaatagccaacaagtatgtgttcaacatcactaatcatcagggaaatatagagcaaaaacacaataagatatcatcttacaccagttagaatggctattataaaaagacaaaaaataacatatattgacaaagatgtggagaaaagggaactcttatatactgttggtggaaatgtaaattagtacagccattatggaaaacactacagagatttctcaaaaaattaaaaatatgaaccagcaattcaactactggatatttcttcaaaggatgtggagaataggaaatgctatacactattggtggggatgttaattagttcagccactgtggaaagcagtttggagatttctcaaagaacttgagacagaactaccatttgacccagcaatcccattattgggtgtattgtactcaaaggaatgtaaatcattctaccaaaaagacacatgcatacgtttgttcatcacatcactattcacaataacaaagatatggatcaacttagatgcccatcagtggtggactggataaagaaaatgtggtatatatacaccatacaatactacacagccataaaaaagaacaaaatcatgtcctttgcagcaacatggatgcagctgaaggccattatcctaagtgaattaacacaggaacagaaaaccaaatactgcatattttcacttataagtgggagctaaacattgtgtacacatagatacaaagaagagagcaatagacggtggggcctacttgaaggtggaggttgggaggagagtgagggttcaagaacaacctatcactacctgagcaatgaaatcatttgtacaccaaaccccagtgatgtacaatttacctatgcaacaaatatatacatgtacatgtacccctaaacctaaaataaaaacggaaaaagaaaaaaattagtagtatttctatatactatctaaaaaagaaattaagaagacaattctatttatgacagcttaaaaaataagatagctaggaataaatttaaccaaggaagtggaagatttctacactgaaaattatggagcatcgataaaagaaattgaagaagcagcaaataaatggaaagatattccatgttcatggattggaagaattaatattgtttaaatgatcatgctacccaaagcattacacagatttaatgcaatccctatcaaaataccaaaaatgttcttcacaaaaatagaacaaataatcttaaaattcatatggacccacaaagtccccaaatagccaaaatgatcctgagcaaaaataacaaagctaaaggcacctgattttaaatgatactacaaagctatagtaacccaaacagcatgatactggcataaaaaaacagacacatagaccaatggaacagaatagaggcctataaataaatttatacacccatagccaactgatttttgacaaaggtgccaagaacacacactgggaaaaaagatagccttttcaataaatggcttttagtcaaattaaaagaagtagataaaacagagatctcaaagaagctaatattacacctcacaaaactaggaaagaagaacgaaataagcccaaagtatgctgaagaaagaaaataataaagatcaaagcagaaataaatgaaatagagtctagaaaaacaatataaaaatcaatgaagctaagagttgttttttgaaaagataaaagcaacaaacctttagctaaactaagaataaaatagagaagactcaaataaataagatcagaaatgaaagaggagacattacaactgatatgacaaatacaaaggatcataagagactactgtgaacatttatatggcaatgaattggataatctagaagaaactgataaatttctagacacataaaacctgccaagacttaatcataaaaacaatagaaaatctgaacagaccaataaagatgatattgaataagtaataaaaagcctaccatccaaaaaaaacccagacctggtgcctttactgcttaattctacctgacatttaaaataagaactaacatcaattcttctcagattcttctaaaaaagtgaagaggtggaaggactttcacatgattttttttttagcttttttttttttttttaggcagagtttcactcttgttgcccaggctggagtgcaatggtgcgatcttggctcaccacaaccaccacctcctgagttcaagcgattctcctgcctcagcctcctgagtagctgggattacaggcatgcaccaccacgcctggctaattttgtatttttagtagagatggggtttctccatgttgctcaggctggtcttgagctcccaacctcaagtgatctgcctgcctcggcctcccaaagtgctgagattacaggcatgagccaacgcacccagcctgttcacactatttttatgaggccaggattactctgataccaagtcagacaagaacattataagaaaataaaattacaggccaaaatccttaaatgaacttagatacaaaaatccttaattaaatattagcaaacagaattcagcaacatattgaaaggatcatccaccatgatccagtgagactgatcccctgggatgcaagaacggttggacacacacaaatcaataaatgtgatacctcacattaatagaatgaaggacaaaaccgtatgaacagacacttctcaaaagaagacatttatgcagccaaaagacacatgaaaaaatgctcatcttcactggccatcagagaaatgcaaatcaaaaccacaatgagataccatctcacaccagttagaatggcgatcattaaaaagtcaggaaacaacaggtgctggagaggctgtggagaaataggaagagttttacactgttggtaggactgtaaattagttcaaccattgtggaagtcagtgagtcagtgtggtgattcctcagggatctagaactagaaataccatttgatccagccatcccattactgggtatatacccaaaggattataaatcatgctgctataaagacacatgcacacgtatgtttattgtggcactattcacaatagcaaagacttggaaccaacccaaatgtccaactatgatagactggattaagaaaatgtggcacatatacaccatggaatactatgcagccataaaaaatgatgagtttgtgtcctttgtagggacatgggtgaagctggaaaccatcattctcagcaaactatcgcaaggacaaaaaaccaaacactgcatgttctcactcataggtgggaattgaacaatgagaacacatggacacaggaaggggaacatcacactctggggactgttatggggtggggggaggggggaggtatagcatttggagatatacctaatgctaaatgacgagttactgggtgcagcacaccaacatggcacatgtatacatatgtaactaacctgcacattatgtacatgtaccctaaaaaagtataataaaaagtaaataaataaataaatccaattaaaaaatgggtaagggacctgaatagacatttctcaaaagaagacatacaaatggccaacagacatatgaaaaaatgctcaatattgctaatcattagggaaatgcaaattaaaaccatagtgagttattatctcacatggatcagaatagctattatcaagaaggcgaaagataacaagtgttgaagatgtggagaaaagggaacacttacaaagtgttagtgggattgtaaattagtatggccattatggaaaactgtatagaggttgctcaaaaaactaaaaatagtaataccatatgatccagcaatcccacttccgagtgcttacccaaaatatttgaaatcagtttgttgagatgtctgtattcccatgttcaattcagtactattaacaacatccaagttatggaatcaacttaagtgtccatcagttgatcaatggataaagaaaatgtggtatatacataaaatggaatactattcagcctttaaaaagaaggaaattctggcatttgtgacaacatggatggaactggagagcattatgctaaataaaataaaccgggcacaggaagacaaataccacatattctcacttatatgtgggatctgaaacaatcaaactcatagaaacagcgagtaaaatggtggttaaagagactagggggtggggggaatagggagatgatggtcaaagggtacaaaatctcaattaggcaggagaaatatgggattttcttagatctattgcacagagtagtaaatatagttaataatagagtattggacatttcaaaattgctaagaataaatttcaaatgttctcactgaaaaaacttttaggctgggcgcagtggctcacgcctgtaatctcagcactttgggaggctgaggtgggtggatcacctgaggtcacgagttcaagaccagcctggccaacatggtgaaaacccatctctgcaaaaatacaaaaattggttggacataatggcaggtgcttgtaatcccagctactcaggaagctgaggtgagagaatcgcttgagcccaggaggcgaaggttgcagtgagccgagattgcgccattgcactccagcctgggggacagagccagagactacgtctgaaaaaaaaaaagaaaaaactttaaagtatttcaggtgatgactatgttaactagtttggtttcattattccacattgtattcataaatcataacatcactttttaccccataaatatatataattataagttatcaatttataattaaaaaaagaaatcctggtggagagacagcactcttagctgaggcataaacttttatgtacttattcatttatttataaactttattttttagagtagttttagagttttaggtttacagcaacattgaggggaaagtataaaagatttcccatatacttactgccccctcacacacatagcttcccccattatcaatatccccaaaagtggtaacatttgttataatcaatgaacctatattgacacatcattatcacccagagttcatagttgacattagagttcactcttggtactgtacattcaatgagtttggacaaatgtgtaatgacatgtatccactattctagtgtcataacaatagtttcactgccctaaaaatctgcttcgctctgcctattcatcctacctcccatccctaaccttgggcaaacactgatctctttactgtctccatagtttgacctttttcagaatgtcatatagttggaatcataccctatgtagcctttttaaattggcttccttcacttagtaatatgctttaaaggttcctccatgtcttttcatgcttgatagctcatatggactcattttaatactcatcataaacactgccaacattgcttcctggaatggaggctggagagaacttgggttctaaaattatcctgggtggcaatgcagcccatagtttcccgagcaagctatagacaagactgtgctgactattagaggggaatctgtggtcatgctggctccattcaaaacaatgattgtagaaaagggtcccctcaccctttctggatagatgccaggataatgcttcaggaagtgaaggccccaggctgagtatggtagctcacgcctgtaatcccagcacttcgggaggtcaacgcaggaggattgcttgagtccaggagtattttgaaaccagcctggacaccatagcaagaccccgtctctacaaaaaattaaaaaattagatgagcatggtggcacatgcctgtgttcccaactacttgggaggttaaggtgggaagatcacttgagcctgggaggttgaggctgcagtgagctgtgaccatgccaccacactcactctgggcaacagagggagactctgactcaaaaaaaaaaaaaaaagatttaaaaattttaaaaataaaaaagtgagaacctcacttcctgtgggagggtggagggtaggatcagatcagggtaacagctcagctctggacttctttttactaatgattgtggccttctcctggggtcccacagggagctcaaagaggcccatgaagcagaactcagtgagttggagaacaactacaaagcagccttgaaggcagagaagttggctgcccaagagaagctaggtactgctgggacctgggagaatgaccctggatgaaggtccaggcaatggcatttctaataagcttctagggtgatttccaaggcacacaaaggttttactaccttggtgatgagtttggggtggggaaggtgtgcagaagaactcacatttgaatttgaaaatgtgcatatcagaagactaatgatgatcctgttgttttccttttatccagaggagatgggaaaagaatacaagtatttgaagaatatgtttcgtacgtatcaggtgagatacacagctccctgttggattacaagagaaggaaggctcattcctggctaacattgggataaatctagagcttttgtccagaaaataatgtcctgagattcccagcatccttagacctaagtggcactagctgcacccagggggaggatgaacccaatggcttccatgcatgacaagtcaggcacccaaatcctgaagagcactactgaaaaatatgtttgtgattacaaaagtaatagcttctcattttttgtaatggagcaaaaagaaatatcaccacccaaagacaacccctgttaatatttgtactttgttagaactgcagttgagatcatactgtatattgtataacatctatatattttttatatgttctttatcaagcatataagaaacttttccctcctttataatgacttgatattatcctaatgaaattgccattgggttctaaaattttactgttcccctattattgggcatttgagttgtttccaattgcttgctgtaacagataataccactttgaatatctttgattctagaagtagagtgcttggtcaaaaggaatgaactttaaaaaaagtcaactttcattttagattcaggggatacatgtacaagttattgtgtgatgctgaggtttgggatatgaatgatctcattacccagctggtgagcatagtacccaatagttattccacccttccccctcttcctctctcccaatagcccccagtgtctacaagaacacgtggcacttggttttctgttcctgtgttaattggctttaggataatagcctctagagccatccatgtttctatgaaggacatgattttgttcttttttatggctgcatagtattccatggtatatgtaccacattttgtttatccagtccactgtcagtgggtacttaggttgattccatgtctttgctattgtgaattgtctgtgattaacatacaagagaaggtgtctttttggtagaaaaatttattttcttttggatatatacccagtaatgggattgctgagtcaaatggtagttctgttttaagttctttgagaatttccaagctgctttccaccggcaatgaactaatttacattcctaccaacggtgtataagcattccctttttcctccaacctcaccagcatctgttgttttttggctttttaataataaccattctaatgtgtgtgggctggtatctcattatggtttttgatttgcatttctctgatgattagtgacatgaagcattttttatgttttctgaccactgtatgtcttcttgttttttacacactattacattctatttatgacaagaaatatttacatgattggaaaaagtaaaaattggaggacaaaaagcagattagtatttaccatgggctggactgggactggggaaggggcttactacaaagggacaggagagaattactggagatgtagtggtggttccgtaactatccgtttgtcaaacacattaaaagtatactgaacaagggcacattttactcaattaaactgacattaaaaaaagaagtgaaaaagaagaaattccatttagaatgttgaaaaactgtagatttagttctagaattctggggctctataacttatttcaaaatataggttttcagcccatttttaacttatcaaatctttattcagaaatccaaagtttatatttaaaaatagctcatttaaatttgaccataggccggtgctgtggctgatgcctgtaatcccagcactttgggaggccgaggcaggcagatcacctgaggtcaggattttgagaccagcctggccaacatggcaaaaccctgtctctactgaaaatacgaaaattagtcggacatggtggcacacacctgtaatcccagctactcaggaaactgaggcgggagaatcgcttgaacctgggaggcagaggttgcagtgagccgagatcgtgccactgcactctagcctgggcaacagagcaagactctgtctcaaaaaatatatataaataaataaaataaaaaagaaataaatttgaccctaaagctaacacatgtaaaaattatataaaagaaaagaaaattgttccaacttttttactttggggtttttaaaaaagttttatttcaatagctttggggatacaaatggtttttttgttacctggatgaattatatagtggtgaattctgagactttagtgcacccatcatctaagtagtgtatattgtacctaatgtgtagttttgttttttttttatcacaagccactctcccacctcccccttctgagtctctaaagttcattaatgaatatgcctttgcatattcatgacttagctcccacttttaagtgacatcatacagtttttggttttccactcctgtgttactttgtttagaataatggcctccagctccatccaagttgctgcaaaagacatttcattccttttaatgactgagtagcagtctatggtgtatatatgccacattttatttatccactcattagtcaacgggcacttaggttggttccacatctttgcaactgtgaattgtgctgctataaacatacgtgtacaagtgtctttttctgtaatgactcattttcctttcggtagagatcaagtagtgggattgctagattgaatggtaaatctacttttagctctttaagaaatctccatactcttttccaaaaggttgtactaatttacattcccaccagcagtatataagcactcccttttccccacatccacaccaaaatatattgtttttttactttttaataatgaccattcttgcaggagtaaggtggtatctcattgtggttttaatttgcatttccctgatgattagtgatattgagcactttttcatgtttgttggccatttgtatatcttcttttgagaaatatctattcatgtcatttgcccactttttaatgggattatttgtttttttcttgctgatttgtttgaattccttgtagattttgattactagtcctttgtcagatgcatagtttgcaaatattttctcccattctgtgggttgtctgtttattatttcttttgctgtacagaagctttttagtttaattaggttctatttatttatttttggttttgttgcatttgcttttggggtcttagtcatgaattatttgcctaagccaatgactggaagagtttttctaatgtcttctagaatttttatagtttcgggtctcatatttaagtctttgatccatcttgagttgatttttgtataaggtgagaaatatggatccagtttcatttttctacatgtggcttgcccattctcccagcaccacttattaaataaagtatcattccccaatttatgtttttgtttgctttgtcaaagataagttggctatacatatttggcttcatttctgggttttctgttctgtttccttggcctatgtgcctacttttataccagtaccatgctgttttggtaactatagccttgtagtataatctgaagtctagtaatgtgatacctccagatttgttctttttgcttagtattgctttggctattctggctcttttttggttccatatgaattttagaactttttttctaattctgtgaaaaataatgttgatattttgatgggaattgcactggatctgtaatgcaagattactttgggcagtatggtcattttcacaacgttgattcttccaatccatgagcatagaatgcatttccatttgtttgtataacctattacttctttcagctgtgttttatagttctccttgtagagatctttcacctccttggttaagtacattcctaagtattttatttttttgtagctgttgtaaaagggtatcagttctttttttgattctcagcttggtcgttgttagcgtatagcagtgctactgatatgtgtacactgattttgtaaactgagacttcactgaattcgtttatcaaatcttagagtctttggaggagtctttaggattttctaggtatacaattatataatcttcaaacagcaatagtttgacttcttcttttccaatttggacgccctttatttctttctcctgtctaattgctctagctaggacttccagaactatgttgaatgagagtggtgaaagtgaaggtggccatcttgtcttgttccggttctcaaggggaatgctttcaacttttttccattcagtatgatgttggctgtgggtttgtcacatatggcttttattattgaggtaggtcccttctatgcctagtttgttaggagttttaattatgaaggatgctggattttattaaatgctttttctgaatctattgagatgatcatgtgttttttgttttcaattctgtttatgtgatgtatcacatttattgacttgtgtgtgttaaaccatccctgcctccctgggacaaaatccacttgaattatctttttgatgtgctattggggtcggttagctagtattttgttgaggatttttgcatctatgttcaacatcagtgaaattggtctgtagttttttttatttgttgtgttctttcctgatttggatatcagggcgatactggctgcatagaatgatttagagaggattccctctttctcaatctttcggaattgtttcagtaggattgtaccaattcttcattgaacatctggtggaattcagctgtgaatccatctagtcctgggctttttttgttgttcttggcaattttgaaattactgattcaatcttgctgcttgttattcacctgttcagggtttctgtttcttcctgatttaatacaggagagttgtacgtttccaggaatttgtctatttcctctaggttttccagtttgtatgcaaaaaggcgttcatagtagcctcaagtgatcttttgtatctctgtggttctgtgggttgtaatgtctccaatttcatttctaattgagcttatttagatcttctcttctttacttgtttaatcttttcttcttttcttggctaatctagtctattttattttttcaaagaaccagctttttgtttcattgatctttttatattttttgtttgaatttcagttagttctgctctgatgttcattatttcttttcttctatctttggacttcgttttttttgtttctccagttccttgcagtgtgacattgtcaatttgtgctctttcagactttttgatgcaggcgtttagcactataaactttcctagcactgcttttgctgtatcccagaggtttttttagtttttagttttttgagacagtctcactctgtcaaccaggctggagtgcggtggcactatcttggctcactgcaagctctgcctcccaagttcaagcaattctcgcacctcagcctcccaagtagctgagactgagactacaggcgcctgttaccacacccagctaatttttgtatttttagtaaagatggggtttcaccatgttggccagcctggtctcaaactcctggcctcaagtgatccacctgtttggcctcccaaagtgctagaattacaggcatgagccaccgaaccccacctatcccagaggttttgataacttgtgtcattatgattcaattcaaaaattttttaaatttccatcttgatttcactgtttaccccagatatcattcaggaatggattattttatttccgtgtatctgtatagttttgaggattccctttgaaattgatttttagttttattctgctatggcctgagaagatacttcataggatttcaatttttaaaaattaattgagacttgttttgtgacctatcatatggcctatcttagagactgttctatgtaccaatgagaagaacatacattctacagttcttgggtagaatgttctgtaaatagctgttatgttcatttgttttagcatgtcatttaagtccattttttctctgttggccttctgtctcaaagacttgtctagtgctgtcagtggtatattaaagtatcccaccattactgtgttgctgtctatctcatttcttaggtctagtagtaattgttttatgaatctgcaagctccagtgttagatgcatgtaaatttaggattgtaatatcttcttgttggattgatccttttatcattatattgaccatctttgtcttgttttactgttgttgctttgaagtttgtttcgtctgatataagaatagctactcctgcttgcttttggtgtccatttgcatggaatatctttttccacccttttcccttgagtttatttgaatcctttcatgttaggtgagtctcttgaagacagcagatatttggattgtgatttttgttatccattctgtcattctgtattttttaagtggagcgtttaggccatttacattcaacattaatattgagatgtgaagtactcttctcttcatcatgttaattgttatgtatatagcttttcttttttcattctgttattgctttatagacttcatgagttttaagctttcaagagattctattttggtgcgtatttggcttttgtttcaatgtttaaaactccttttagcccacctttctttcttttctttccttccttccttccttacttttttttttttttttttttttttttttgatagagtctggctctgttgcccaggctggagtgcaatgttgcaatcttggctcactgcaaactctgtctcctgggttcaagagattctcatgcctcagcctcccaagtagctgagattacaagcatgcacaatcacacctggctaatttttgtattttttagtaaagacagggttttgccatgtggccaggctggtagcatttcttgtagtttggtttgctagtgacaaattccctcagcatttgtttatctgaaaatgacttttatttctccttcaattacaaaacctagctttacaggatacagaattcttggctgacagtttttttctgtttaaggagattgaagataagaccccaataccttctggcttgtaaggtttctgctgagaagtctgctgttattcagataggttttcctttatagcttacctgatgcttttgtcttactgctcttagaattatttccttcatgttgagtttagatagcctgatgactatatgccttggtgaagatctttttgcaattaatttcccaggagttctttgagcttcttggatttggatatctagatctctagccacgccagaaaggttttcctcaattattccctgaaataagttttccagacttgttattttctcttcttcctctggaacaccagttattcttaggtttggctgtttaacataatcccatatttcttgaagactttgttcatttctttttattcttttttctttatttttgtctgattgggttagtttaaaaaccttgtcttcaagctctgaaattctttcttctacttgttctagtctattgttaaagctttctgctgcattttgtattccctaagtgtgtctttcatttctagaaattcttattgttttttcttgataatatctatatctctagaaaatttttcattcatatcctgaaatgctttttaaatttataatagttttcatctttctctgaaatctccttgagtagcttaataattgaccttctgaattccttatctggtattttaaagagttcgtcctactttggatccattgctggagagctagtgttatcttttgagggtgttatagaaccctgttttttcatattaccagagttccttttctggttcctcctcatttgggtagattatttcttctaattatccttgaattgatgtttgatttgactgtgtttctttttgtgtttgttttttaatttcttttttccacttaaggatgtgactttaatgcttatcatattatggcctaatttggtttttggtgctttcaggggtgaagactctgtaatagttccttggttatagagagtttttttatgtggctttcttagatgctggttgtagtagcaatgtgcttggtatattagcaagatcactgtctcctatggggctgtaatgataagaggtctcttaaagcttatctcattcccctgtggcatgcccttttttatttacgcattttcgtccagttttttttttctttttttttttttaggctgaatctcactctgttgcccaggctggagtgcagtgtcatgatctcactgcaatctccgcctcctgggttcaagtgattcttgtgcctcagcctcccaagtagctgggattacaggtgcctgccaccacacccaactaatttttgtatttttagtagagacagggtttcaccatattggccgggctggtctcgaacccctgacctcaagtgatccacccgcctcagcctcccaaagttttgggattacaggcatgagccactgcacccggccttttctccagtgttttatttactagtttgatggttccagcttcaggccagtaggggaggtgtccctgggtaggaatcagctgtggctaaagcaggtgggtaaatgcaatacccagtgatgggcagaggtctcagccttgacagaggtggctggaggagtgagttgcaatgaggtcttacctggggtaagggttggagccacctcagctcccctgccaggttagcaggaaagttatccctctcaaacacactcctgtttcagtgctccagcttttcatctccagacaggcacctcttttcatctgcaggaattttgatgttccaaatagagaaaaattgtgaacgtctctcatacaagcttgaacctagagggtgcccctcctatggggatgcagtcaccctgatgtcttccagaaagactgtctatagttgcactcacaccaagctccaatgggagaagctccaactgtgcctgcagtggtagacaatgggtgggggggttgtctgtctgttgggttagagctgaagacttttcctgctgagcccagcactgcaactgtgcctctgctgaaagaaacttcccactagcagaaagatctggttcttaagtcctgctgtctggattattttctcccacagggtgttctcttgatgtggtgcactccctgttcccctaggatcagggggatcccactcctaagggaacagggtctctgggtctagctgtccagtgaaggtaccacaccccaggctggtgctagggaatatctgcaagggatccagtgatgtgacctctcttcaagtctcccaacagtgggtagcagcaccagttctaatgggcgtggcagggtaatagactctgtgagagtccttggttattgatagccttagtgtgttggctttctcgaacactggttttagtagtaatgaactggtcatgtggacaaactcaggacctcctggttagccagaatggtgcaggcagtggtgatagctgagattacacagccatcttcttcctaggtgcgttgttattctaccaggagatgctgtaatggactgtgttggttggcctccagccaagaggtgatgcttacaaaagggaaacagctgcaatagtagcaataggacttttgcttgctttatgttgtccagaggggttactctggtttctcaggcaatgagtggggctatatagcccccaagagtttctgtcctttgtgttaaactaccagggcaggtgacggggcaaagcagggtgagggttggttcaggtggacttgcgctctgagtctccctgtgcagggcaagcagcagcccctgtggaagccaggggatgggagtggttctcaggccactgggttgatgttccaaaaggcagtgttgctggctttgccacacagaagggtttgtgcagagtggggagaagcaggtggctgtgagccccacacagatcccatgcacttggcaagacagatgcactcccacagtgttccactggcagcagcaagctaagttccagttagcctgcactcagaacttgcaactgtcccgagtcatatacgttccctgcagagatagcaatcacggctttcaggccaagcccctccctgtccactgcaaagccaggcacccagttcctgcactggcagctcctgcactcatggctgcagcccacttttcactctcctccaccctggccctggccaagggagttcatccgcacctaaggttatatcatgaaacccagttggaggcttctttcaacctgcgaccactgcctgaactttttggctgtcctccacagggttccccgtgaggaacagtaagaaatggcttccctctctccatgctgaaatctgggagtgtgtgcaagaatcttcctgccactgctcccacttttatattccacatccctccccaagtcagttcctgtgctgcatagggttagggctttctcccatggtctggactttcagggtccacagtgggggtgtgtattccaggagtaatgtagggtgagtcccccttctcacactctgggaactcacagccctttgcctgattcacagtgtaacctgcagcctcctgcttccttcaaagggtctgtagattcctttggttttcctgttcagtttctgcattgctccttgaaaaaagttcagtgtgaatctctacaactattttgtttttccaagtgggagaagtatgctagcaatgcctctaatctgccattttggaaaaacacaaacaaacttctgtcttcttttgagaagtgtctgttcatgtcttttgcccactttttaatggggttgttttttgcttgttcaattgtttaagttacttatagattctggatattagatatttgtcagatgcatagtttgtgaatattttctctttttttgtaggttgcctgtttactttgttgacgggtttttttgctgtgcagaagctctttagtttaattaggtcccacttgtcaatttttgtttttgttgcagttgcttttgaggacttagtcataaattctttcccaaggccaatgttcagaatggtgtttcctaggttttcttctaggattcttagagtttgagttcttatgtttaaatctttaaggcatcttgggttgatttttgtatatggtgaaaggtaggggcccagttttatttttctgcatatggctagccagctatcccagcatcatttattgaatagggaactccttccccaccacttgtttttgtctactttgttgaagatcagatggatgtaggtgtgcagctttatttctgagtttgctattctgttccattgatctatgtgtctgtttttgtatcagtaccaagctgttttggttactgtagccttatatttttttaaatttttttatttctatgggttattaggaaacaggaggtgtttggttacatgagtaagtactttagtggtgatttgtgagattttggtgtgcccatcacccgagcagtatacactgcactcaatttgtagtcttttatccctcacccccttcccactctttccccgagtccccaaaatccattgtgttattcttatgcctttgcatcctcatagcttagcttccacttatgagtgagaacatacgatgtttggttttccattcctgagttacttcacttagaataagtctccaatctcatccaagttgtgttgatgccattaattcattactttttatgactgagtagtattctatcatatatatatggaatttctgaatcaaatggtagttctacttttagttctttaaagaatctctatgctgttttccatagcagttgtactagtttacattcccaccagcagtgtagaagtgttctctgttcaccacatccatgccaacatgtattttttttttattttttgattatggccattcttgtaggagtaaggtggtatctcattgtggttttgatttgcatttccctgatcattagtgatgttgagcactttttcatatgtttgttggccatttgtatatcttcttttgagaattgtctattcatgtccttagcccactttttgatgggttatttgttttttcttgctaatttgttttagtttgttgtagattctggatattagtcctttgtcagatgtatagattgtgaagattttctcccactctgtgggttgtctgtttgctctgatgactgttctttttgccatgcaaaagctctttagtttaattaagtcccagccatttatctttgtttttattacatttgcttttgtgttcttggtaatgaaatccttgcctaagccaatgtctagaagggtttttctgatgttatcttctagaatttttatattttcaggtcttagatttaagtccttgatccatcttgagtttatttttgtgtaagatgagagatgaggatccagtttcattctcctacatgtggctagccaattatcccagcaccatttgttgaataagatgtgctttccccactttatatttgtgtttgcttagtcaaagatcagttggctgtaagtatttgggtttatttctgagttcactgttctgttccattggtctatgtgcctatatttataccagtaccatggtgttttggtgactatggccatataatatagtttgaaatcaggtaatgtgatgcctccagatttgttaggttttttgctttttgattttttgtttgcttgttttgctttgttttgttttgcttagtcttgctttggctatgtgggttcttttttggttccatatggatttaaggagttttttttctagttctgtgaaaaacgatggtggtattttgatgggaattgcattaaatttgtagattgcttttggcagtatgatctttttcacaatattgattctacccatcagtgagcatgggatgtgtttccatttgtttgtgtcatctatgatttctttagcagtgttttatagttttccttgtacaggtcttacaactccttggttaggtatagtccaaacattttatttttcttttgcagctattgtaaaaggggttgagttcttgatttgattttcaccttagtcgctgtcagtgtatagcagagctactgatttgtgcacattaattttgtatctggaaactttactgaattcttttatcagttctaggagctttttggaggaatctttagggttttgtaggtatacaattatatcatcagcaaacagcaatagtttgacttcctctttactgatttgggtgccctttatttctctctcttgtctgattgctctggctaggacttccagtactatgttgaagaggagtggtgagagtgggcatccttgtcatgttccagtcctcagtgggaatgcttccaacttttccccattcagtatgattttggctgtgggtttgtcatagatggcttttattacattgaggtatggcccttgtatgctagttttgctgagagttttaatcataaagcatgctggattttgtcaaatgctttttccgcatctattgaaatgatcatgtgatttttatttttaattctttttatgttgtgtatcacatttattgacttgagtatgttaagcctatatccctggtatgaaacccacttgattatggtggattatctttttgatatgttgttggattcagttagccagtattttgttaaggatttttgcatctatgttcatcaaggatattggtctgtagttttcttttttggttatgtcttttcctgtttttagtattagggtgatactggcttcatacaatgatttagggaggattccctctttatcttgtggaatagtgttaataggattggtaccaatccttctttgaatgtctggtagagttctgctgtgaatccatctagtcctggacttttttgtgtaggtaattttttaattatcattccaatctcactgcttgttattggtctgttcagggtatctaattcttcctgatttaagctaggagggttgtatctttccaggaatttatctgtctcctctaggttttctagtttatgcacgtaaaggtgttcacagtagccttgaatgatctcttgtatttctgtggtgtcagttgtaatatctcccttttcatttctaattaagcttatttggattttctctcttcttggttaatcttgctaatgatctatcaattttatttatcttttcaaagaaccagctttttgtttcatttatcttttgtattttttgtttgtttgtttgtttgatttcattcagttctgctctgatcttggttatttcctttcttctgctgggtttgtgtttggtttgttcttgtttctctagttccttgaggtgtgaccttatattgtctgtttttgctctttcagacttttttatataagtgtttagggcttttagctttcctctttgcactgcctttgctgtatcccagaggttttgataggttttatgtcactgttgtcattcagtttgaagaatttttttaaatttccatcttgatttcattgttgactcaataatcattcaggaacaggttatttaatttccatgtatttgcatggttttgaacattccttttggagttgatttccagttttattccactgtggtctgagagaatgcttgatataatttcaattttaaatttattgaggcttgttttgtggcctatcatatggtctatctgggagaaagttccatgtgctgttgaataaatgtatattctggggttgttggatagaatgttctgtaaatatctcttaagtccatttgttccagggtatattttaaatctattgtttctttgttaactttctgtcttcttgacctgtctagtgctgtcagtggagtaatgaagtccgccactatcattgtgttgctgtctatctcattttttaggtctaggagtaattgttttataaatttgggagctccagtgttaggtgcatatatatttaggattgtgatattttcctgttggagaaggccttttaccattatataatgtccctctttgtcttttttaactgctgttgctttaaagtttgtcttgtctgatgtaagaatagctactcctgctagcttttggtgtccatttgcatggaatgtctttttccacccctttccttaagtttatgagttcttatgtggtaggtgagtcaactgaaggcagcagatagttgattggtgaattcttacccattcagcaattctgtatcttttaagtagagcatttaggccatttatattcaatgttagtattgagatgtgaggtaccattccattcattgtgctatttgtttcctgtatgccttgggtttttttgtttttgtttttgtttttgcttttttttgtattataggtcctgtgagatttatgctttaaagaggttctgttttgatgtgtttccaggatttgtttcaagatttagagctccttttagcagtttttgtagtgctgccttggtagtggcaagttcttttagcatttgtttgcctgaaaaagactgtatctttccttcatttatgaagcttggttttgcttggtacaaaattcttggctgataattgttttgtttaaggaggctgaagatagggccctaatcctttcttgcttgtaaggtttctgctgagaaatctgctgttagtctgataggttttcctttacaggttacctggtgcttttgcctcacagctcttaagattctttccttcatcttaactttagataacctgatgacaatgtgcctaggctatgatctttttgtgataaatttctcaagtgttctttgagcttcttgtatttggatatctaggtctctagcaagggtggggaagtttccctcaattattgcacaaatgtgtttccaaacttttagatttctcttcttcctcaggaacaccaattatttttacatttggttgtttaacatcccagactccttggaggctttgttcatattttcttattcttttttctttgtctttgttggattgggttaattcaaaaaccttgtcttcaggctctgagttctttcttgtgcttgctcaattctattgctgagacgtaccagagcattttgcatttctataagtgtgtccattgtttcctgaagttttgttttttatttatgttatttcattgaagatttctcccctcatttcttgtatcattttttttttaatttccttaaattgggctttgcctttctctgttgcttccttgatgagttctttgtcaggtagatcaggggtttcttcttggtttagatccacatctggtaagctagtgtgattttgtgggggatgttaaagaaccttgttttttcatattaccagagttggttttcttgttccttctcatttgggtaggttctgtcagagggaagatctagggctcaaggctgttgttcagattcttttgtcctatggcgtattctcttgatgtagtactctcccccttttcctagggatgtgccttcctgagagcccaagctgtagtgattgttatctctttttagaatctagacatccagcagtcctaccaggttccaggctggtattgggggttgtctgcacagagtcctgtgatgtgaaccatctgtgggtctctcagctgtggataccagtacctgctctggtagaggtagcaggggagtgagatggactctgtgagggtccttagttttggtcatttaatgcactatttttgtgctggttggcctcctgccaggagatgatgctttcaagacagcatcagctgtggtagtatggggaggatcaggcggtgggtgggtccctagaactcccaagagtatatgccctttgtcttcagctaccagggtgagtaggaaaggaccatcaggttggggcagggctaggcgtgtctgagctcagactcttcttgggcgagtcttgctgcagctgctgtggggatggaggtgtggttcccaggtaaatggaattatgttcccaggaggattatggctacttctgctgtgtcgtgcaggttgtcagggaagtaggggtaaactggcagtcacagacctcacccagctcccacgaaacccagaagatcaatctcactcccaccatgcccccaactcagtagtaccaagtctgtttccaggcagtgggcaaacaggactgagaacttgccccaggctaccagcctcccagctgcaaaagcaagtagtgcttttgtgcttccctgcctgtggagtctgcacaccagattcatgccttcccccaagttctggccaggagatttcctattcagttggaattgttagaaaattcagctggagttttccttctccctgtgatgttttctgagttcctctggcagtcctccccaggtagccctgtgagacaagtcagaaatggcatccctgggaacccagagagcccacagggcttttcctgctacttcctttacccctatatttcacttggttctctaaattgactcagctccaggtaaggtcagaatcttctcccatgatctagaccttcaggttccccagtgaggttgtgtgtttgaaggtggacaatccccctttcctacttccacagtttgggcactcacagtatttggggcatctcccgggtcctacgggagcaatccacttccttcagagggtctgtggattctcttggctttcctgaattattcctgcagtagttctggagcaaaagttcacgatgcaagactccacatgctgctctgtccatccgagtgggagctgcagtctagtcctgcttcccgtccaccatctctgtagccttatattagtagtatattttgaagtcaggtaatgagatgcctccagctttgttctttttgcttaggattgctttggctatttagactcttttttggttccatatgaattttacaataatttttttctaattctgtgaaaaatgatgttggtagtttgacaggaatagcatttaatctcttaattgctttaagtagtgtggccatcttaatgatattgactcttctaatccatgagcatggaatgtttttccatttgtttgtgttgtctctgatttctttcagcagcaatttatagttctccttttacctccttggttagctatatttttagggattttattctttttgtgtctatagtgaatgggattacgttattgatttggctctcaccttggacattattggtgtatagaaatgctacttattttttgtacattgattttgtatcctgaaactttactgaacttgtttatcagttccaggagccttttggcagattctttaaagttttctaggtatgcaattatgttatcagtgaacagaaaaatttgacttcttcttttcctatttggatgccttttatttctttctcttgcctaatggctctggctagtacttccagtgctatgttgaataagagaggtgagagtgggcatccttgtcttgtgctagttctcaagggtaatgcttccagcttttgcccattcagtaggattttggctgtgggtttgtcatagatggctcttattattttgaagtaagttcctttgataacctaatttgctgagagtttttatcatgaagggatgttggattttatcaaaggctttttccatgtctattgagatgatcatatgggttttctttctaattctgtttatgtggtgaatcacatttatggattcacgtatgttgaaccaaccttgcattgtgagaatgaagcctacttgatcatggtgaattaacttttttttttttttttttgagtcagtgtctcattctgtcacctgggctggagtgcagcagcacaatcacagctcattgaagcctcaacctcctgggctggagtgatcctcacacctcagcctcctaaatagctgggaccactacacccagctaattttttattttttctgtagatgtggggtctcatatcatgttgcttaaactcctgggctcaagcaattctcctgactcaacctcccatagtgctgggataacaggtatgagccaccgtgcctggccatgaattaactttttcatgtgtagctggattcaatttgcaagtattttgttgagcatttttttcagtctatgttcatagggatattggcctgtagtttcttttttgtctttgccaggttttggtataaggataatgccggcttcatagaataagttagggaggagtccctcctcctcatttttttggaatagtttcagtagaattggtaccagttcttctctgtacttttggtagaatttggctgtgaatctttctggtctcaggatttttttttttttttagtgttagattattttattactgaatcaatttcaaaactcaatattgtctatttggggtttcaattgcttcttgattcaatctttggaggttgtgtttccaggaatttatccatttcctctagattttcttgtttgtatgcatacagatgttcataatgatctctgaggttcttttatatttctgtgggattagttgtaatgtcacctttgtcctttctaaatgtgcttatttggatcgtcgtttttttctttgctaatgtagctagcactctatcggtcttgcatttcctttcaaagatccaactttttgtttcattgattctttgtatgggtttttgaattttgattccattcagttctgttctgattttagttatttcttttcttctcctagctttggggttagttcttgttttggaatgaacatttttaaggcctttaatatatatggccaaattgccatccaaaaagaatgtatcactctgcactgccacaagcaaagcatggagtgctcccgtcatctcagaataaaacccatccatttaatcagctcatttgatgaaggcccaggaaaacaaagttagggcatgattcttactaggtagatgaagagagttaagagatggctagtggggcgggaaaggactgaagcctcaagccttcatcctgtttaattgtgaagtatagtgaccaactagttctagttggcctgagactttccaggttttagcactgagagtccagagtcccaggaaacccctaagtgtcaggcagacaaggacacttggtcgctctatcaaaagttaaacaccagtaccacctctaaagttctatttaccacttacaatttcagttttgagcctgtgtctaaaactcatttttttaagatattccttggtatattcagggaaaacatcatagaacagagcctaagacgtgtgagtggtaaatagaataggtcgggtgtgaatccttctgctaacctgaaaaataaggcagtcagcgtccttggaccctactagtgtcatccaggtccagggccttccccctcctaggattccatgttcatgaaatctgagccaagcaacagtattggtattagattaggcttatttaacctcaaccacaaaagaaagttagatttgctgagaaaaagtggacattctctgaaaaacatccccttattttctaagtgttcaaattaactactaggtatttcctttcttcttcttctttttttttttttttttttttttttttttttttttttttgagacagagtctcactctgtcaccaggctggagtgcagtggcgtgatctcggctcactgcaacctctgccttctaggttcaagcgagtctcctgcctcagcctcccaagtagctgggactacaggtgtgtgccaccacgcccagctaatttttgtatttttagtagagatggggtttcaccatgttggccaggatggtcttgacctcttgaccttgtgatctgcctgcctccacctcccaaagtgctgggattacaggtgtgagccactgcgcccggcctcctttcttcttgtgctattgaagagggatttgtgatttagggggagctaacatatgatccttcaacatggagaactctacctttcttcaaaggaagctcagttctagtggggcaaacactgtgcatagtttgcccttgacctttgggttccataagctctctgttgggctgggctggaatttacttctcaccagtcacccatggaggacccactcagtgagggccccaggtaagggaagatgcacagaacatggtgatgggccctggccactgtgcaatgccaagaggagtcctccctgagttgagttttacagcctctccaggtcaccttcattttaggactcttttcttcatggtgcctttgtacctccccaggacagtatttatgatgaaatggaagagaagtggtcaaaacagaaggcgaaatggaagaaggatgagaagttcgagcgagaaaatatcctgctacagcaaagtgagtacagaaactctagcttttttgatgacaagtgcattaaaaaactgccatgaagtttggtcttgacttgaggaaggtggccttgggcttaccaagggtgatgggccacatgctagatacctgaatggaaggtgcccagagttttcatgaaagcaaaatgacaacaagggtagggtcttttttgaagttcaggcatctgatctaagagagtctaagcctgtaccttctgaaactcatttggtccaagtttgcccatgatggctggaacaaatgttagaatccctgtagggagtgcagacttattatctagaaacagatgaacccaaagttccaagagttctttagttagaatgtgaaatgttcacttgcatgtgggcagggggcagataggaacaacacaatccattatactgagagcttctatattcccacgtcttccagaaggaagtcacacttggtaaatatttttaatatttccaacaattaacacagagcttgcaccatacaaagtattctataggtgcacctcccacccccattggacttgttcataaaaggaaaaaagaagagaatttgtagagactactccaggcctagaagactagttgaggtaggagtgggacctctacagacctattccgcattccacgccaaccacatttatttcagatttagttgattttaacaaattactcatttaaatgcagatactccatgggaaaattaattcacattctggtgggcactctggactgccagaaggtaatatgaagaccccggagttaaggctggggaacgggagggggagctgctcctgtctggggctttacctagaattctagtgcaatagaacccaagtcatatcccagattctagctactcatacgactctcatcccatgttgctaaagtctaagtaaagatgtaaccgccagttttggaagaccagaattcagctgctcaccatccagctcagtcagaggcttacgctgtcagaccagagactccctgtccatccccagaattgcaacactgaaatctgtgtttccctccacccctccttcctcttgtttgataatggggctctactggcaggtttcctgcccaggaaaagagctgaagcctacctctaccccagcactaagtacaggatgaattttattgctggcaaagtaatgttagccaagagctttattttaagataaggatatccatgatagcatagtggttacatcagcagagggaatggacaaaataaaaagcaacagattcaaaataaactacacacaaaagaaccagagatgttggtggtaaatcccatatgactaatgtgattgaggacaaccaccgtgctcacctcaccctcaagcaccttcaggtgagtgtcagaggccaaacaccaggctgcaatgaccttgagtctgacacagtctggaattgcttttatctttagatattctgggtttctcattgcacctgcttttcccatctttacacatatatgtgctttcctgtcacttccacagaaaaaaagatgaccaaaaaattcgaaatggagtcaggagaagaagataagaaaataaatgaatcctgcagtgctgtctttgagaacttcattcaagagaaggaggtaactcagcccaaagcaccttggtgattgaatgggtagtccaggtggtacacccaagtccccaggtgtgcctccataattaggtgatctttttgtctttctgggcataatcctcctctcccagctttctggaaatgtatgcaaatagactgacagtcttgctgtcctttagctgggcaatcttcccacaggctagacagtcttatcaaagggttcttagaacaaaaattttaattaactggaaataacagaatgctaaacatgcagaaactgaaattccttattttgccaaaatcccatctctgaatatccttttcattcctcactgtagctgttatagctgtagtgctattactgggcgctagggcaggtacaggtttaactttatgggaacttgccaaaacttattttccaaagtagttgtaccatttttttcttgcatcttagatatattggaattctagttgctgtatatcctccacaacaattagttttgctagtcctttaattttggccattccagtgggcatgaagtggtacttcattatggttttagtttccctgatgactaattatgttgggcattttctcatatgcttattggtccattcatatatgttcttccataaagtgcctgttcaagtcttttcccatttgaaaaagtaggaggtgcttacatttttatttttgatatgtaggagtacttttatattgtggatacaagttttttttgccagatatacatgttgtaaatattgtctgtcagcctgtggtttgcctcttcattttattaatgatatatttcgatatacagaagctttaaattttgatgaaaggcaatgatcatttttttacttttatggttacagatttttgtgtcctctctataaaatcattgcctattccaaggtcatgaagatattctattttttagaagctttaaaattttagcttctatgattctctgatctattttgaataatttttgtgtatgaagtgaagtgtaagagtcatgggtcatttttgtcttatggatattcagttgtcccagcatcattctttaaaaatactttcctttccccattgagttgccttagtgtttgatacagtttagatttgtgtccctgcccaaatctcatgtcaaattgtaatctccaatgttggagaagggggtctggtgggaggtgattggatgatggggacagattctccccctttctgttctcgtgatagtgagtgagctctcaaaagatcaggttgtagcacctcccccttctctctctttcttttgttccagctatgtaagacaggcctccttcctctttaccttctgccatgattgtaagtttcctgaggcctccccagccatgcttgcagaaatgtgagccaattaaacctcttttctttcttttttttttattctttttttaatttattatactttaagttccagggtacatgtgcacaacgtgccagtgtgttaaatatgtatacatgtgccatgttggtgtgctgcacccattaactcatcatttacattaagtatatctcctaatgctatccttcccccctccccccaccccacgactggccctggtgtgtggtgttccccaacctgtgtccaagtgttctcattgttcatttcctacctacgaatgagaacacacggtgtttggttttctgtccttgcaatagtttgctcagaatgttggtttccaacttcatccatgtccctacaaaggacatgagctcatccattattatggctgcatagtattccatggtgtatatgtgccacattttcttaatccagtctatcattgatggacattttggttggttccaagtctttgctattgtgaatagtgccacaataaacatacgtgtgcatgtgtctttatagcagcatgatttataatcctttgggtatatacccagtaatgggatggctgtgtcaaatgggatttctagttctagacccttgaggaatcgccacactgtcttccacaatggttgaactagtttacagtcccaccaacagtgtaaaagtgttcctatttctccacatcctctccagcacctgttgtttcctgactttttaatgatcgccattctaactggtgtgagatggcatctcattgtcgttttgatttgcatttctctgatggccagtgatgatgaacattttttcgtgtgtctgttggctgcataaatgtcttcttttgagaagtgtctgttcatatccttcgcccacttgttgatggggttgtttgattttttcttgtaaatttgtttaagttcttagtagattgtggatattagccctttgtcagatgggtagattgcaaaaattttctcccattctgtaggttgcatgttcactctgatggtagtttctttcgctgtgcagaagctctttagattatttagatcccatttgtcaattttggcttttgttgccattgcttttggtgttttagacatgaagtccttgcccatgcctatgtcctgaatggtattgcctaggtttccctctagggtttttatggttttaggtctgacatttaagtctttaatccatcttgaattaatttttgtataagatgtaaggaagggatccagtttcagctttctacatatggctagccagttttccaagcaccatttattaaatagggagtactttccccatttcttgtttttgtcaggtttgtcaaagatcagattgttgtagatgcgtggtattatttttgagggctctgttctgttccattggtctatatctatgttttggtaccagtaccatgctgttttggttactgtagccttgtagtatagtttgaagtcaggtagtgtgatgcctccagctttgttcttttggcttaggattgtcttggcaatacaggctcttttatggttccaaatgaaccataaaagtagttttttccaattctatgaagaaagtcattggtagcttaatggggatggcattgaatctgtaaattaccttgggcagtatggccattttcacgatattgattcttcctatccatgagcatggaatgttcttccatttgtttgcatcctcttttatttcgttgagcagtgatttgtagttctccttgaagaggtccttcacatcccttgtaagttggattcctaggtattttattctctttgaagcaattgtgaatgggagttcactcatgatttggctctctgtttgtctgttattggtgtataggaatgcttgtgatttttgcacattgattttgtatcctgagactttgctgaagttgcttatcagcttaaggagattttgggcagagatgatggggttttctagatatacaattcatgtcatctgcaaacagggacaatttgacttcctcttttcctaattgaataccctttatttccttctcctgcctcattgccctggccagaacttccaacactatgttgaataggagtggtgagagaaggcatccatgtcttttgccagttttcaaagggaatgcttccagtttttgcccattcagtatgatattggctgtgggtttgtcataggtagctcttattattttgagatacgtcccatcaatacctaatttattgagagtttttagcatgaatggttttcgaattttgttgaaggccttttctgcatctattgagataatcatgtggtttttgtctttggtactgttgatatgatggattacgtttattgatttgcgtatgttgaaccagccttgcatcccagggatgaagcccacttgatcatggtggataagctctttgatgtgatcctggattcagtttgccagtattttattgaggatttttgcatcgatgttcatcagggatattggtctaaaattctctttttttgttgtgtctctgccaggctttggtatcaggatgatgctggcctcataaaatgagttagggaagattccctctttttctattgattgcaatagtttcaaaggaatggtaccagctcctccttgtacctctggtagaattcggctgtgaatccgtctggtgctggactttttttggttggtaggcttttaattattgcctcaatttcagagcctgttattggtctattcacggattcaacttcttcctggttaagtcttgggagggtgtatgtgtccaggaatttatccatttcttctagattttctagtttatttgcatagagttgtttatagtattctctgatggtagtttgtatctctgtgggatcggtggtgatatcccctttatcattttttattgcgtctatttgattcttctctcttttcttctttattagtcttgctagcggtctatcaattttgttgatcttttcaaaaaaccagctcctggattcattgattttttgaagggtttttgtgtctctatctccttcagttctgctctgatcttagttatttcttgccttctgctagcttttgaatgtgtttgcccttgcttgtctagttcttttaattgtgatgttagggtgtcaattttagatctttcctgctttcccttgtgggcatttagtgctataaatttccctctacacactgctttaaatgtgtcccagagagtctggtatgttgtgtctttgttctcattggtttcgaagaacatctttatttctgccttcattttgttatgtacccagtagtcattcaggagcaggtttttcagtttccatgtagttgtgctgttttgagtgagttcttaatcctgagttctagtttgattgcactgtggtctgagagacggtttgttgtgatttctgttcttttacatttgctgaggagtgctttacttccaactatgtggtcaattttggaatacgtgtgatgtggtgctgagaagaatgtatattctgttgatttggggtggagagttctgtagatgtctattaggtccacttggtgcagagctgagttcaattcctggatatccttgttaactttctgtctcgtggaactgtctaatgttgacagtggggtattaaagtctcccattattattgtgtgggaatctaagtttctttgtaggtctctaaggacttactttatgaatctggctgctcctgtattgggtgcatatgtatttaggatagttagctcttcttgttgaattgatccctttaccattatataatggccttctttgtctcttttgatctttgctggtttaaagtctgttttatcagagactaggattgcaacccctgcctttttttgttttccatttttttgttagatcttactccatccttttattttgagcctctgtgtgtctctgcacgtgagatgggtctcctgcatacagcacactggtgggtcttgactatccaatttgccagtctgtgtcttttaattggagcatttagcccatttacatttaaggttaatattgttatgtgtgaatttgatcctctcgatatgatgttacctggttatctgttcattagttgatgcagtttcttcctggcattgatggactttacaatttggcatgtttttgcagtggctggtaccggttgttcctttccatgtttagtgcttccttcaggagctcttgaaagacaggcctggtggtgacaaaatctctcagaatttgcttctctgtaaaggattttatgtctccttcacttatgaagcttagtttagctggatatgaaatcctgggttgaaaattcttttctttaagaatgttgaatattggcccccactctcttctggcttgtagatagagtttctgccgagagatccactgttagtctgatgggcttccctttgtgggtaacccaacctttctctctggctgcccttaacattttttccttcatttcaactttggtgaatctgacaattatgtgtcttggagttgctcttctcgaggagtatctttgtggcattctctgtatttcctgaatttgaatgttggcctgccttgctaggttggggaagttctcctggataatatcctgcagagtgttttccaacttggttccattctccctgtcactttcaggtacaccaatcagacgtagatttggtcttttcacatagtcccatatttcttggaggctttgttcatttctttttactcttttttctctaaacttctcttcttgcttcatttcattcatttgatcttcaatcactgataccctttcttccacttgatcgaatcagctactgaagcttgtgcgtgcatcacatagttcttgtgccatgattttcagctccatcaggtcatttaaggacttctctacactgttttttctagttagtcattcatccaatcttttttcaaggtttttagcttgtttgtgatgggttcgaacatcctcctttaacttggagaagcttgttattactgatcatctgaagccttcttctctcaactcgtcaattcattctctgtccagctttgttccattgctggtgaggagctgcattcctttggaggagaagagtcgctctgatttttaaaattttcagctattctgctctggtttccccccatctttgtggttttatctacctttggtgtttgatgatggtgatgtacagatgaggttttggtgtggatgtcctttctgtttgttagttttccttctaacagtcaggaccctcagctgcaggtctgttggagtttgctggaggtccactccagaccctgtttgcctgggtatcaccaggagaggctgtagaactgcagatactgcagaacagcaaatgttgctgcctgatcgtttctctgaaagcttcatctcagaggggcacccagctgtatgagttgtcagttggcccctactgggcggtgcctcccagttaggcttctcgggggtcagggacccacttgaggaggcagtctgtccattctcagatctcagactccatgctggcagaaccactactctcttcaaagctgtcagacagggatgtttaagtctgcagaagtttctgctgccttttgttgagctatgccctgcccccagaagtggaatctacagaggcaggcaggcctccttgagctgtggtgggctccacccaattcgagctttccagccgctttgtttacctactcaagcttcagcaatagcaggcgcccatcccccagcctcactgctaccttgccattcaatctcagactgctgtgctagcagtgagcaaagctccgtgggcgtgggaccctcccagccatgcatgggatataatctcctggtgtgccatttgctaagactgttggaaaagcacagtattagggtgggagtgacccgattttccaggtgccgtctgtcacggcttcccttggctaggaaagggaattatctgacccctcgcgcttcccaggtgaggcggtgccccaccctggttcggctcccggtccgtggcctgcacccactgtcctgcacccactgtctgacaagccccagtgagatgaacctggtacctcagttggaaatgcagaaatcacctgtcttctgcatcactcatgctgggagctatagactggaggtgttcctatttggccatcttggaaactccccctaaacctcttttctttataaattacccagtctctcaggtagttcttcatagaaatgtgagatcagactaatatagtgtctttgctgtatttggggtgttaggactctccgttctgtttgactatttttccatacttaggtcaacaacacattgtcttgactactgaagtttgaaatcgggtagcaaaggttatctagctttgctattgtttttcaagattattttgcctttccacatgctttgtatttttacataaatgttagaactagcttgtcaatttagaattagcttatcaaggaagtttgctgatattttgactgggatttcattgaatataaagatcaatctgtggcgagattaattcttaagagtattgaatctatccactgacttaagaaaagcttttgatgaaaatataatttcttttaatatttgtcagtgagataaggttgaacataattaagattttcattaacttcaacaagtcatgtcactagtttataatgtgtgcttcattatagcagtgtctaagctttggtgaatattatattcctgaatcctagtctggctttcttaactccctagaagatgtgccagaaccacagtgctaaccttttcccaataaaattgtttttaggagctcttgaaacaacatcaaagtgacaccttgcaattagaagagctgagaaaaaccaaagaggtaagctttttcatcctttcctgtggacttggtatattacaaatacaccaataaaataacaagctgtcagtataatggaatcaatgataatttccccaaagccaataagaaatggaagacctaaagctgagtttactggattcaataagttaaaaagaatttttgaaattatctgtaaaataaagccagtgggtctttttaaagtctgatttgaacaaatagatcagcaatatactatgtgatcttcaatgttgaatgactttcatttctagcaaggttcaaaccacaaatgatctttcagttataaaacaccaagttcttccctttgagctctgaaaagtataaaactgtctcctttgaaactctgtcaccaagcccctccttaagctctgaatgtacctcacacatgataacttcctcagggactctattctggggcaaattatggcagtctgtgggagacaactgaagaggagccgttcaaatccacaaggtgatgtgtgattcttccatcactgaaaatttgacttggatccagaatggacacgtttgagaaaacattagtcattataaaggcattgtaaatgaattctatcttagagcccaggcagggcttcagcattatggaaaggcaaacagactgtggtgtcctacaagttcaagaaatgggctttggaggaagatatacccagtgtattataataactattttcatgagcttgtctacgaattctgtcatttgtgtcatgtctgggcctgtttctcttcattgatttttctcctcatttatggtcatatttccttgtttgcatgcctggtaagtttggcttggatgtcagtcattttggtgtttaccttgttgggtgctgaatatttttatattcctttagatattcttaagctttgccctgggatgcagttaagttgcctggaaacagtttgatcctttcaagccttgctttttaagcttcgttgggcagaactaaagcagtctttagtgtggaactaattttccccactattgaggtaataccctctgagtacttgacaccacaccctctgtatgagaaggattttctactctgcctggtgggaccatgaactattcccagccttgtgttggccctggggattgttccacctgctcctcgctgatgtttccttcctctaaccttgtctctttctatttcttccctacatcactccaccccagaggcacttgcctccttgctgttcccttaacaggccaggatgttcctacctgggggtctttgatgttctctcttcctgaaaagctctttcccggatatccacatgactaacttcctttcctcctcctgttctttattcaaatgccaccttctcagaaggtgcccgatttaagggctccgctccctgcccaacacttgcttttctccaaatgggatgccactggaggtttttgaggagagagtatcatttgggaaaataactgtggcagcaatgtgaaggagaatctgaagaggcaaaatgatgggaggcagaacctattagaagggtcacctcccctttacacctcaacctgacttctgctccaatcccagccatggaaactgttcttgttaaaatcacaagtaaattccaagttgccaaatccaaggaatgcttcacctcactggacatgagcagtatcaggtgcgattgatcattctctccttgcaacattcacctgtcttagctttcatgggcttctggtgtttccttcacctcattggtcacaccttctcaatctcctttactagaactagaactctgcttaaaacccttcaatggcaccccactgttctcccacctactttctaagtcctggagtattttgaggcttgttcccaggccccacttatcttctttatctcccgtttctcctttggtgagctcatctgttcacacagatgtaaaagccatctctgtactgataacttggtttgatacctccagccttgcctctctcctgagctccaggcttgtacatccaactgcccatttgacatttcaacataggtgacatacagacacctcaaaattaacatgcccagttccacactctcaattttccaccagagatttagcccccaaattgtcaactccctcagctgttctaagcctagacctgaagtcatccttgatttcttctttcctttcactctcccaaattcaacccagcagcctcagccaatcctctataacataatccaaattcatccacgtccctccaactctgttgtcaccttaccctagtccattatttctcacctacacgactgtagtattctcctccttagttccgttgctttccctcttgcccttccaatccatccccatggagcataatgtaaacagtaagatacgtgcattcacttctctgcttaaaacccttcagtaggtccccattgttcttaggttaccttgtcctctcaggtgccaccagacttccctgtatttcctcaccatggccctctatccttactatctctattccagccatattggtgttcctttgggtcctcaaacagaatgagaattttgcattttttttattatactgtaagttttagggtacatgtgcataatgtacaggtttgttacatatgtatacatgtgccatgttggtgtgctgcacccagtaactcgtcatttaacattaggtatatctcctaatgctatccctcccccctccccccaccccacaacaggccccggtgtgtgatgttccccttcctgtgtccatgtgttctcattgttcaattcccacctctgagcaagaacatgtggtgtttggttttttgtccttgccatagtttgctcagaatgatggtttccagcttcatccatgtccctaccaaggacatgagctcatcattttttatggctgcatagtattccatggtatatatgtgccacattttcttaatccagtctatcattgttcgacatttgggttggttccaagtctttgctattgtgagtagtgccgcaataaacatacgtgtgcatgtgtctttatagcagcatgatttataatcctttgggtatatacccagtaatgggatggctgggccaaatgggatttctagttctagatccctgaggaatcgccacactgacttccacaatggttgaactagtttacagtcccaccaacagtgtaaaagtgttcctgtttctccacatcctctccagcacctgttgtttcctgactttttaatgatcgccattctaactggtgtgagatggtatctcattgtggtttgatttgcatttctctgatggccagtgatgatgaacattttttcatgtgtcttttggctgcataaatgtcttcttttgagaagtgtctgttcatatcctttgcccacttgttcatggggttgtttgtttttttcttgtaaatttgtttgagttcattgtagattctggaatattaaccctttgtcagatgagtaggttgcaaaaattttctctcattctgtaggttgcttgttcactctgatggtagtttcttttgctgtgcaaaagctctttagtttaattagatcccatttgccaatttaggcttttgttgccattgcttttggtgttttagacatgaagtccttgcccatgcctatgtcctgaatggtattgcctagattttcttctagggtttttatggttttaggtctaacatttaagtctttaatccatcttgaattaatttttgtataaggtgtaaggaagggatccagtttcagctttctacatatgactagccagttttccaagcaccatttattaaataaggaatcctttccccatttcttgtttttgtcagatttgtcaaagatcagatagtgtagatatatggcattatttctgagggctctgttctgttccattggtctatatctctgttttggtaccagtaccatgctgttttggttactgtagacttgtagtatagtttgaagtcaggtagcgagatgcctccagctttgttctttggcttaggattgacttggcaatgcgggctcttttttggttccagatgaactttaaagtagttttttccaattctgtgaagaaaatcattggtagcttgatggggatggcattgaatctataaattaccttgagcattatggccattttcacgatgttgattcttcctatccatgagcatggaatgttcttccatttgtttgtatcctcttttatttcgttgagcagtggtcaacgaagaggtccttcacatcccttgtgagttggattcctaggtattttattctctttgaagcaattgtgaatgggagttcactcatgatttggctctctgtttgtctgttattggtgtataggaatgcttgtgatttttgcacattgattttgtatcctgagactttgctgaagttgcttatcagcttaaggagattttgggcagagatgatggggttttctagatatacaatcatgtcatctgcaaacagggacaatttgacttcctcttttcctaattgaataccctttatttccttctcctgcctcattgccctggccagaacttccaacactatgttgaatgggagtggtgagagagggcatccctgtcttttgccagttttcaaagggaatgcttccagtttttgcccattcagtatgatattggctgtgggtttgtcatagatagctcttattattttgagattcgtcccaccaatacctaatttattgagagtttttagcatgaacggttttcgaattttgttgaaggccttttctgcatctattgagataatcatgtggtttttgtcattggttcggtttatatgctggattacatttattgatttgcgtatgttgaaccagccttgcatcccagggatgaagcccacttgatcatggtggataagctttttgatgtgctgctatatttggtttgccagtattttattgaggatttttgcatcgatgttcatcagggatattggtctaaaattctctttttttgttgtgtctctgccaggctttggtatcaggatgatgctggcctcataaaatgagttagggaggattccctctttttctattgattgcaatagtttcaaaggaatggtaccagctcctccttgtacctctggtagaattcggctgtgaatccatctggtcctggactttttttggttagtaagctattaattattgcctcaatttcagagcctgttattggtctattcagggattcaacttcttcctggtttagtcttgggagtgtgtatgtgtccaggaatttatccatttcttctagattttctagtttatttgcatagaggtgtttatagtactctctgatggtagtttgtagttctgtgggatcggtggtgatatcccctttatcgtttttttttgcgtctatttgattcttctctcttttcttctttattagtcttgctagcattctattaattttgttgatcttttcaaaaaaccagctcctggattcattgattttttgaagggttttttgtgtctctatctccttcagttctgctctgatcttagttatttcttgccttctgctagcttttgaatgtgtttgctcttgcttctctagttcttttaattgtgatgttagggtgtcaattttagatctttcctgctttctcttgtgggcatttagtgccataaatttcccctacacactgctttaaatgtgtcccagagattctggtatgttgtgtctttgttctcattggttttgaagaacatctttatttctgccttcatttcattatgtacccagtagtcattcaggagcaggttgttcagtttccatgtagttgtgtggttttgagtgagtttcttaatcttgagttctagtttgattgcactgtggtctgagagacggtttgttgtgatttctgttcttttacatttgctgaggagtgctttacttccaactatgtggtcaattttggaatatgtgcgatgtggtgctgagaagaatgtatattctgttcatttggggtggagagttctgtagatgtctattaggtctgcttggtgcagagctgagttcaattcctggatatccttgttaactttctgtctcgtggagctgtctaatgttgacagtggggtgttaaagtctcccattattattgtgtgggagtctaagtctttttgtaggtctctaaggacttactttatgaatctggctgctcctgtattgggtgcatatatatttaggatagttagctcttcttgttgaattaatccctttaccattatataatggccttctttgtctcttttgatctttgttaattgaaagtctgttttatcagagactagtattgcaacccctgcctttttttgttttccatttgcttggtagatcttcctccatccctttattttgagcctctgtgtgtctctgcatgtaaggtgggtttcctgaatacagcacactgatgggtcttgactatccaatttgccagtctgtgtcttttaattggagcatttagcccatttacatttaaggttaatattgttatgtgtgaatttgatcctgtcattctgatgttagctggttattttgctcgttagttgatgcagtttcttcctagcctcgatggtctttacaatttgacatgtttttgcagtggctggtaccggttgttcctttccatgtttagtgtttccttcaggagctcttttaaggcaggcctggtgtgaccaaatctctcagcatttgcttgtctgtaaagtattttatttctccttcaatcatgaagcttagtttgactggatatgaaattctgggttgaaaattcttttctttaagaatgttgaatattggccctcactctcttctggcttgtagagtttctgctgacagatctgctgttagtctgatgggcttccctttgtgggtaacccgagctttctctctggctgcccttaacattttttccttcatttcaattttggtgaatctgacagttatgtgtcttggagttgctcttctcgaggagtatctttatgctgttctctgtatttcctgaatctgattgttggcctgccttgctcggttggggaagttctcctggataatatcctgcagagtgttttccaacttggttccattctccctgtcactttcaggtacaccaatcagacgtagatttggtcttttcacatagtcccatatttcttggaggctttgttcatttcttcttattcttttttttctaaacttctcttcttgcttcatttcattcatttgatcttccatcactgataccctttcttccagttgatcgaatcggctactgaggcttgtgcatttgtcacatacttcttgtgccatggttttcagctccatcaggtcctttaaggacttctctgcattggttattctagttagccattcgtctaatcttttttcaaggtttttaacttcttggccatgagttcgaactttctcctttagctcggagtagtttgatcatctgaagccttcttctctcaactcgtcaaagtcattctccatccagctttgttctgttgctggcgaggagctgcattcctttggaggaggagaggcactctgatttttagaattttcagtttttctgctctgttttttccccatctttgtggttttatctacctttggtctttgatgacagtgacgtacagatggggttttggtgtggatatcctttctgtttgttagttttccttctaacagtcaggaccctcagctgcaggtctgttggagtttgctggaggtccactctagaccctgtttgcctgggtatcagcagcggaggctgcagaacagcagatattggtgaacagcaaatgttgctgtctgattgttcctctgaaagttttgtctcagaggagtacccagccgtgtgatgtgtcagtctgcccctactggggggtgcctcccagttaggctactcaggggtcagggacccacttgaggaggcagtctgtccattctcagatctcaagctgcgtgctgggagaaccattactctcttcaagctgtcagacagggacatttaagtctgcagaggtttctgctgccttttgtttggttatgcctgcccccagaggtggagtctacagaggcaggcaggcctccttgagctgcggtgggctccacccagttcgagcttcctggccactttgtttacctactcaatcctcagcaatggtgggcgcccctccaccagcctcactgccacctcgcagtttgatctcagactgctgtgctagcaatgagcaaggctccgtgggcgtaggaccttatgagccaggcatgggatacaatcttctggtgtgccgtttgctaagactgttggaaaatgcagtattagggtgggagtgacctgattttccaggtgccatctgtcacccctttccttggctaggaaagggaattccctgaccccttgcacttcccggatgatgtgatgcctcgccctgcttcggctcatgctcagtgcactgcacccactgtactgcacccactgtctgacaatccccagtgagatgaacacgatacctcagttggaaatgcagaaatcatacgtcttctgcatcactcacgctgggagctgtagactggagctgttcctattcggctgtcttggctccacccctgagcattttgcattctaaggacctttgcacaggcttctattcattctttagtggaagtttgtgtgtttgtttcaagaagctactttttagagcagttttaggtttacagaaaaattgagcagaaagtacagagagttcccatatactaccccaccccaccctaccccaccactagtttcctttattattagtatcttgcattgggatggcacattagttgcaattgatgagccaatgtggatgcattcttattaactaaagtccatagtttacatgagggttctctctttgtgttgtacattctgtgggttttgcctaatatgtcatgtcatgtatccaccattatagtgtcatacagaatagtttcactgctctaaaagtgccctctatcccacctattcatccctcccttcccctccaaatccctagaaaccactaatcttttttctctctctatagttttgccttttccagagtgtcatataattggaatcggtagtaggtatttaataaagacttgcttagtgaatgaataactgattgccattagaaccattcatatgagctctggtgaggctgaagagaaggatatagatgggtgagacagagaggaggcaggactgacagggtgtgagtggccatgagtgatgcaaaagtagctcaggttgctccctttcatcatagtccaggtgccctggagaagagaccaaataaatagacattggcatgatgtcctgcaacagcttcttcttatgcaggtcatgcaggaagaattgcatgcacaagcccttatcctagagtcactgaacacaaacctctactatacccagttggaactccagaaagaggtgagtccctactggagtggggatgggggttgggggaagaacccaggtctccatccagctctgccatatagctctgccctggatggctctgggttggggaagatggctattaaaatgtatgtctttcagaaagctatagtgggaaatctggagaaaatgcttcaaaccaagtttgctgaaactgaagaaaagtataagcacaccatacagatcctgacggaagagaacattcatctgaagtgcggctgctgctgaaaaagacatagctgagttctctttaggagtgggaaggagtttgagtgaggaatgggttaggaagatagaccaactgctccctagttatgtcaaggcacaggtgttttcgggagggaggtatgtcactctaggccagtgacacaaagccagatagttcacttgaggtggagtggagatgtgtctatacttctcccattcacctgtgtccttgtttctatgcaaaacaacacaggacatttgtctcccagtttctgagtttgctcagttctatgactgagggtgggtttttaaatccatctcccctgggagtctgatggttttgccattacatgcagctgcttctggttcctatggaaatcacctttggatcagaaggtgtactgttacctgaagctgcatcttaaatcattaaaataaattttggtcaatactttaatagaagaaagttatttattgcattgatttagtagaaaattcctcatataggactttagtcacctgaacaccatacctcactaaattcaaaaccactgcaagtaatgagtgagagactgctgtggtgaaggaacgaaggcacatttctctccctgcactccaaatatcctataccctttctagcttttgagttgacattgatacatctttcctttctttttacaggcaaaagataatttctaagaatgaagaaatttgtgaaggatgttctgggagattggcctctattactgtttctaaggatgattctgacactgtgcaagatggtagcaagaaaggacaagaatcataaacaaaaagttgctctgcattgttgaagatggttggcacaccatttctgtaggcccaggaaactcctgggagggttttcttgagaaaatgcatataatgagtttagttcttgggttgctctgactcgctgaatgtctgaaaatgtttgaattctcatctgaatttcacagcttatcacggactcttcactgaaaaatgatgctctccatactgggagctgagctttctctgagttttgtactatttttcttctaccttgacgtatttcgttagaaagaaactgatttgaaggccttcttcatattgaacttttactatatttgggaggtgtacctttgtcccctggggcatttaggtagcaaaaaaagatgatgtgttgattttactctaaaatatttttctctcacacccatgccccctacttccctacctctcaatcatgttccctaacctatgacttaggaagggtttctgatgattcttaccacctcctctggaccatcaccagaattcagacacccacagtgcaggcaacataaataagtgaagtgggctagacataaggaaaacaattgcccaagcacagtgataagtggcaaccaacagcagcctcagtagaggggcttgggcagggctggggcacagcggatggggaagagtgacccacagagcactgtcccatctgaagaaggtgcttctcagacctttgccatgcaaaagcatgaggtcaatattgtcagatagtatgattttttaaaagaagttattctggtttttatgtgatatctcctaatttttaaacattgacaacaaattttaaaaatacaactgtgtgtgccgatcatgggagactcaagtagaacatgtctgtagtccagatgttttcctcctgtgagatgtcattggcagaaaccaaaaccaaacacaaaaaatctccaaggagcaataagatcaaattatattttattctattaaaaaatgtttttgaaaaaagatacttaaattttaaagataacttaattcctaatgatttaaaataatccaagcagagatgaaagagcaaatgcaaatgcataaaaagaccccagagcattgttagcaaaaagcaaatatagttagccaagcatatatatatcataaaagcaataagaaggcataaagcaagtttggggagagcttatttaaaacttgtaaaaatcatttgaatttttaaaagttttcaaacaaattttgttttattaaaaaaaaaattttttttgagacggggtcttgttctgtcacccaagcttgagtgcagcggtgtgaacatggctcactgcagccttgacctcttgggttcaagcaatcctcccacctcaacctcccaaagtgctgggattatagacatgagccaccatacgtggctactttctaatttttttaatgtggtagtgtggaatttagctttgaaagagaattaaagttaatagaatattaacagtgggcttatagttgatagataacaatctgaatcataagccctctatattcatagctggattttgtacgtgtctggtatttattgccaccagctaaaaacattcccaaagccttaagcataagagaaaggagacagtgttattgttgttaatatcctatttaactttagctcttataaaaaagtgcaaaacaattaataaagtagaaaatctagaaaattagtaaataaacatagtgttatatctaaatagtaccatcggccaggcgcggtggctcacgcctgtaatcccagcactttgggaggccgaggtgggtggatcacgaggtcaggagatcaagaccaccctggctaacacagtgaaaccctgtctctactaaaaatatttttaaaaaattagccaggtgtggtggcgggcccctgtagtcccagctactcgggaggctgaggcaggagaatggcctgaacccgggaggcggagcttgcggtgagccgagatcacgccactgcactccagcctgggcgacagagcgagattctgtctcaaaaaaacaaaacaaaacaaaacaaacaaaatagcaccatcaatcagaagggaagacaagtttttttcttagtgtgaaagtaggctgaggcatctgtttccccatgtttttcttgtcatccttgttgcttacttcatagttcacttcagtcaggatggtgagaatatcatcgcctctgaaatacatcacataacattgtgactgtctgtgggggaaagcaactgatgaactgtctcctctgctgtgctcagagatagttctgtagttctttctctcaaaatatcagtcatttgaaacaataaggtgcgaaaccaagacctaccccagctttcctggtaaatgggttgtctcagagcttaataacttacttttggtttattcaggaactcttttgaccatcagaaacctcggtgtcagtattagagttggtttctttctctcctgacctgtgtgtctctcactcttctccacgttacttggctccccattgcttcaatgccccccaatactctctgcctcgaattgacatcgcatctgcggattcatctttgatgcaattaaacttaaggcaagtgaaagtataacgtctcctgcagctactcccaccttcttctcaccaggatctcttagcatttttgttaggcaacctcttcttctaccttggtagctagccgcggaaaccttgcaggattcatgatctaagttacgaaatctaagttagattcatgatctaagttacgggaaattctcactcttcatatactcaaaacatgaaatacagggctagaaggaacctgctatttatctcccataatgcaccaagaggttttgaggatggtttgctattatagaacttttgacagagttggaggatgtttaaacattgaattgggttactgccttcttggaagatttccaaaactagttgaattggctcagtcatgttttggcctaaagacagagagctggagtatatgactttcctatcctttcctgctctgtgataccctgattgtcctttgaggtgctgaataaaggaataaagcatctcagcttttccatctataaactaaggatgttaacacttgccactctcccactttgtaactgacctgggaaatgcagctatgtgatctacagctagacatttagagttgaacggaaaccactccccttggacagttctctgacctgttaatgtgatctaaatcacatagcactttctaataggctctgaatatgagtagatagtagtgtgatggagtagggggggaaggtagtgtaacagtgaggagggctgagtaggcaaaacttaccgaggacatcgctctctcaggctctggcaaagtgactggatgtaccaggttccctctgcagggtttcggtaggaaacacagttattcacagtggccatccccagcagaaagtcagcctcatccgggatatatctcgtttgaggtgatgataaatccatttctaaatagggttgctcctctgaatcagtctcaacaggtatacctttctggtagttatccccctgacaagcctgaataaaaaacactttgggttttccagcaagggaagggcacttcaaaccagtgaactgagatgtcagctcatagatgggggcctcctgtccatcagtgccatagatgatgcccttgtctccatgggagaggatacagcagatgaagcagtccatgttactgtggtccatgagttggtagattttcaaaatctcatagatttgctctactgtgcagtcatcgtggggcttgatctcaaaatgaagctcttcaaaggtcgtggtcaaagcccctgaaaagtgaaatttgaacagtcacgttataccacagtaattcacagaccacagctggagagcacagtgggcataacattgatagataagaatttgaaccagaaattcaagagcaaaaccctctatattcgtagctggattctgcaggcttctaatatttattgccaccagctaaaaacattctcaaaccctgaagcaaatgagaaaggagagagtgttattgttggtctgttttctctagtaaactagtttacaagatgggtaagctatcatttaggcttactactgaaccaattttaaaaatgattatattatttacataatcagaaaaaaacaaaacaatttttgaataaaagatccaacttattttatcctaaaccttctcaaaattatttatgtatagcaaaataaaagatatgaattaataagatagaactagaagaccttatacaaaaggttatcccctctctatccctccccattacctagtcacattccatgaaggcaaccactttcagtttttaaccacttttttccacattgagctccattttgtaatgaatttgggtacactgctaattactcatttataaattttagactttcgcattgagttcttattatggagaataagcatttgggctcttactcaattatttacaagttttggttgaatccatagtaatatttttatttttttaattttttttagaaaaggtctcactctgtcacccaggctacagtgcagtgtcacaatctcagctcactgcaacttctgccccccaagttcaagcaattctcctgcctcagcctcccaagcaggtgggactacaggcacgcaccaccacacccagctaatttttgtatttttagtagagacagggtttcgccatgttagccaggttggtcacaaactcccagcctcaagtgacccacccaccttggcctcccaaagtgctgggattgtaggcatgagccaccacctccggcccatagtaatatttctattattaagactatgtaaacataatgttctttcattatgtttcctttcttattaacctttttgcctttcctggaacttgtaattgtattattttttcatctgctttgtttcctatatgcttaacactattttttctccaagtgctcaatggatctggccaaaatctttcaacattttcaggctacttgtctgactcatttttatttcttcctggaaaactttccatccagagcactgcatccttctgctgtaataccaactggctgttccataggccagatgaatttctcttctcctgggacatctctctgtctcttccatagtaggttccctgtttcctccatctatgacttcctctttcttatcagtttcctttgctggagcataaccatgagaagtacattttttgagcccctgtatgagtctttagtttatagagttctatttccaaagcatttttcctcagaattctgaaggcctttcttcacagtcttttagctttcagtgttgctagagagaagactttccatttctgatactttacatatttggcttacttttttctctttccagaagcttctagggtatgatatgtttggaagtgaatcttaatccattataccctttcaatctggagattgcgtcatttcgttcttggaaagttccatttcccctttctctgtcctttctttctggaactcttattgtcaaaaattggacatccttgatttagcttcaaattttcttatctttcactcctattttctatttttgtctttttatcctacttccttagactttatcttctactttattgaatttttcattttggtgctcaaatttttaattttcaaggagacttgcttgttctgtccctttttcataacatcttgttctttcatggacctttaactaactctctaagaatactaaataccaatattaagcattaaaaaaggttgcttttttctcaacattatctttttttcattcatattctgtttcatgtttttcttgttgtttgcattgcctctcatttatctagtaatttatttatttatttgagatggagtcttgctctgtcacccaggctggagtgcagtggtacgatctcagctcactgcaacttccacctcccaggttcaagtgattcttctgcctcagcctctgtagtagctggggttacaggcacctgccaccatgcctggctaatttttgtatttttagtagagatggggtttcaccatgttggtcaggctgggcttgaactcctgacctcaggcgattcgcctgcctcggcctcccaaagtgctggattttcacgccaccgtaccaagctacctctctttcgtattagagcctttcttcaaatgcctgctgacctttggttgtccattcataaattgactaattagtccattaaaaagtcgactgaaagctctgtgtttgtggatgtggcttgttctctgagggatttcatagcaagatgattggttggggacctgatcatttcattaggaaacctccagatgtcattatctgtatgtattttagctagagctttcagcttctccagaggtaagtctgtatctgctgccagtgtcttggaaccaagttggtttagagatctgactccatgccaccagcaggttttcttcagtctctctgtgttcagtaaaatgcttcattgcttcctttgctgggcctggcacaccgaagtgtagagcctctctggttcaattttatgagaaaacaaacttcctgttccttatgatggtagaataagaatagttgctggctctatgagagggaggtatgaatcagaggattgtataggcttatataggctttcaaagaatcttcctgttttctgctcattgcctcacctacactttgtacttccaattgctgaatttttccaggattctgtgggggtaaataggcttgcctcctttccgtgttcccctctgtaatcagtgaggttgtagctttctctgttaagtcaattacctcgactcttttttttcaactcccccaaattgttggaaacctttcattagctattgtctcctttcctgttctcttgatccttgttggattattccttttttattccttctccagcattttgtccctgtcagcacatcagagctaaacataagtcatcagtcaaaaggcagtctcagccaggtgcagtggctcacacctgtaatcccagcactttggtaggccgaggcgagtggatcacctgaggtcaggagttcaagaacagcctgaccaacatggtgaaaccccatctctactaaatacaattaactgggtatggtggcacatgcctgtaatcccagctacttgggaggctgaggcaggagaatcacttgaacctgggaggcagaggttgcggtgagccaagatcatgttattgcactgcagcctgggcaacagagtgagactctgcctcaaaaaaaaaaaaaagaaaaaatacagtctagcattaggaatagaaaaaaataactgaaatgcaataggcccttgttgatttggaagcactttggcaagactaatacagtgtgttggttctgtgaaaaaaattctgatcctttggaaatgtggaatgttgattaaaaaaatgactgtaaagcaagtctgaaggcactgaagcaggacagaagggagtctctcaggagaaatgacttctgcagctgggtctcctacttttactcattcagcataaaacataagaacaggaacagaaaaagcaggacacacagactcgaatgcctaccagagactagtcaatcatgggccagttataagaaaatgagctgccagaaatagaagcaaatgttattttaatagaaatgttttaattttaaaagaatacaaatcaagggtccaaaatatttttttcaataccaagcgcatagtgacgaatgatgtaatcaatggacttaatctctgtgcctttttaaaggcttagatttgcttaaataaacaaatcaaatgttagcagggaccaggtacaggtggctgacacctgtaattccagcactttgggaggccgaggcaggcggatcacttgaggtcaggagttcaagaccagcctggccaatatggcaaaaccccatctctactaaaaatacaaaaattagccatgtgtggtggtgtgtgcctgtagtcccagctacttgggaggctgaggcaggagaatcacttgaaccagggaggtggaggctgcagtgagctgagatcacaccactgcactccagcctgggcaacagagtgagactttgtctcaaaaaaaaaaaaaaaatgttaataggggccattacagactcctgatgattataatcagtctacattaattttctaaacttacctccatttgcaaaacaaatcaataattgatgttatgcctgataaacactatttccaaaagttctttgatcaaatcaaaattattaatctctcaatggtgatggatgatttttattttttgttgttgtagtcactttttatattcacatactacaaattgttttttcatttaacttgtaagttcttgatcttagcttaatttggctgagcaaaagaattgctaaccagtttaatatttaatacttgaaaatgctatttctgttaagaacccacaatttctgctgcacttaacagcccaacctgtaaaaatgcagcctctataagaactttgataccacagcaatttcatcgcctaatacattccacagaagcgctatgcatttagctgaattcaaaacaaagcttattactgcttttcattatgtcttttagtaagatttgatattttatatttatacatacattacttttatttaaaaaattaatttttaaaaaaagcaggaaactgataaatgtataagaatgttctttacctccacagggaaatatgtttaaatccattttcttgaaacatggcccttttggtatagcttttgttctctcccttttgatttaaaaaaaaataggcataagaaatattttacttttctcttttgggttctactgtacctgcatccaagtgtgttccattcctgtccctaatgctgtgaagtttgggcactttctcccgtgcttttgcaaaattgtgattgttgatgatcagacagtatccccgaggtttgcttttcatttggtaaactttgtccaaagtctggaaaacaaaaacccaacccaggagctgactctgtgggtcaaacactagagatgtaaacaaacaactccctagtaagaggacttgctttccattgcaccaccccaactcggggtcgtttcctcgaagaactagtttctacctatttccttcacacaggacctctcagacttctgccccatcgttgtaaagtcagtgtcccaatacctgggcctcctgagcactttgcacatatattaatattgttgtcatcacattgtattattgtttgttctcatttctgcttcccatactatacagaagactccttgaggttcataacatctgtgccagggactacggtgtattaacttgtgagagctcaatcaagagtcactgaatgaatgaatgtctttggctgcccccacgccatgacttgtgattctcttggctgtctactgaactcatctgtgcttcgtggctaacagctgagggtctcccattcatgcattgcacagtgtggtcccaggattttaaaggtgatggcttaacccagctctcaggaccacggtggctgctgggaagagatgggctggtcagggaggtcctggctacactgtaggttatggtatccaaactgtagtacctgatagtactggccagggatggcgctgtgtcctattcattctcctagggctgtttcagtaccgagaaactcagcatttagttggaggtctgcgtagccccttgaggtggagaaaaggactccaggctaggaagcccaattcctgcctctacttcaccttatgactttgggcaaataacctgttatcttaatatgttaactctaagatattaaatatttgattaagtttgtaccaagtatgttaagtttttattatttacagttgtgttctaagtatttattaagcatattaagtgtatttactgagatactaagacactaagatttggccaggcacggtggctagtacctataatcccagactttgggaggccaaggcaggaggattgcttgaggccaggagttcgagacctggcttggcaacgtagcaagacccctgtctcaataaaacattaaaaaaggaaaaagatactaagatttactaagatattaagacagtgtttttagctcttcagtggggacaatgcttgtagcatgctatactgtttagaaagtaccacattacttgggttaatccttgactttcagatgaaagaggtctggtaattttctcaggagcccacactagtgaataatctctctcaagcctacttcagatattcaggatttcctcttcttcctaccatgaggaggagcagatcgtctaataagtcaggatgtatttggtggattgttgattacataaagagaagttattatgcctaaaaattacatgtttctgctggttcactgagacaaaaacacagagatggctagattgtgagagtttgctgcttacacctcatcaccaaggagaagcatttttgaaacattaagctaaaggaaaaggcttggctttttccattcctgctagactctttctccaaaccactcccccatccaggctggcacggctgctagaagatttggtaggaggcttattaccccctccaccctccaactattccagtatcttcatctcgggtcttaaaataaaattcaaatgtatagaaaactgaaggagtcacattttaaaaattaagtcacatttttaactttttttgtgtgaattttttctacagttctcaaaattttcagtaagtttctgccccttgtcagtttatctggcagcaaaaaaaaaaaaaagctaacaaattaaataactagaatctgtaatgtaaaaaaaaggatttggaggtttccgtctacctgtgattcactatcctgttctcttggagagtccgagattgtcattaccccacacaactcctcccctgcaaacaacgaagagacacatctagaatgagacatggcaggaaaggtacactggtaatgaaatatgtagcacataggacaacataaggtcttttttaagatgaaaattcaagctgggaacaggggctcacgccggtaatcccagcactttgggaggccaagatgggcagatcacttgaggtcaggagttcaagaccagcctggccaacatggtgaaaccctgtctctactaaaagtacaaaaaaattagccgggcgtggtggtagccacctgtagtcccagctactcaggaggctgaggcaggagaatcacttgaacttgggaggtagtggttgcagtgagctgagatcgcactactgcactccagcctgggcaacagagtgagactctgtctcaaataaataaatgaaataaaatgaaaattcacagactgccatgaatataatctcctttcaagccagagagattctgcaagcagggcaattaacatgcttctggaaacacaagatcaagttgtctcctcgccaaagagaaaaacataccaagaaatgccataattttatattgctccacatggccaggttgaatttttgtggtatttgtgagatactcattaataaagccactagctcaggatgaattaatgatttagtactttactccttaaagtattcttaaggccttaggctcagcaggcagaggggaaagggaaggacagcctgcatagacattaatctttaaaatacatttgagtgatccaaaatgtattttacac

SEQ ID NO: 5 - DNA, 2994 bp, Homo sapiens
ctggaacttgggaccacggaagctaatcaagacccctcaactaccacgcaagaactccacagggagttccaagctaactcctcttgtaccagctccaaaaaatcacaattacctccaaccaacaaaacctgttgtttccccaaagaagtgatcaacgtgtcacctggctatcaacttgttcggaatcgggaacagatttctgtcaccttaggggatgagatgtttgataggaaaaagcggtgggaatcggagatcccggacaaaggcagattttccaggaccaacatcatttctgacctagaagagcaaatctcagagctgacagcaataattgaacaaatgaacagagaccaccagtctgcccagaaattgctctccagtgaaatggatctccgctgtgctgagatgaaacagaactttgaaaacaagaacagggagctcaaagaggcccatgaagcagaactcagtgagttggagaacaactacaaagcagccttgaaggcagagaagttggctgcccaagagaagctagaggagatgggaaaagaatacaagtatttgaagaatatgtttcgtacgtatcaggacagtatttatgatgaaatggaagagaagtggtcaaaacagaaggcgaaatggaagaaggatgagaagttcgagcgagaaaatatcctgctacagcaaaaaaaaaagatgaccaaaaaattcgaaatggagtcaggagaagaagataagaaaataaatgaatcctgcagtgctgtctttgagaacttcattcaagagaaggaggtcatgcaggaagaattgcatgcacaagcccttatcctagagtcactgaacacaaacctctactatacccagttggaactccagaaagaggtgagtccctactggagtggggatgggggttgggggaagaacccaggtctccatccagctctgccatatagctctgccctggatggctctgggttggggaagatggctattaaaatgtatgtctttcagaaagctatagtgggaaatctggagaaaatgcttcaaaccaagtttgctgaaactgaagaaaagtataagcacaccatacagatcctgacggaagagaacattcatctgaagcaaaagataatttctaagaatgaagaaatttgtgaaggatgttctgggagattggcctctattactgtttctaaggatgattctgacactgtgcaagatggtagcaagaaaggacaagaatcataaacaaaaagttgctctgcattgttgaagatggttggcacaccatttctgtaggcccaggaaactcctgggagggttttcttgagaaaatgcatataatgagtttagttcttgggttgctctgactcgctgaatgtctgaaaatgtttgaattctcatctgaatttcacagcttatcacggactcttcactgaaaaatgatgctctccatactgggagctgagctttctctgagttttgtactatttttcttctaccttgacgtatttcgttagaaagaaactgatttgaaggccttcttcatattgaacttttactatatttgggaggtgtacctttgtcccctggggcatttaggtagcaaaaaaagatgatgtgttgattttactctaaaatatttttctctcacacccatgccccctacttccctacctctcaatcatgttccctaacctatgacttaggaagggtttctgatgattcttaccacctcctctggaccatcaccagaattcagacacccacagtgcaggcaacataaataagtgaagtgggctagacataaggaaaacaattgcccaagcacagtgataagtggcaaccaacagcagcctcagtagaggggcttgggcagggctggggcacagcggatggggaagagtgacccacagagcactgtcccatctgaagaaggtgcttctcagacctttgccatgcaaaagcatgaggtcaatattgtcagatagtatgattttttaaaagaagttattctggtttttatgtgatatctcctaatttttaaacattgacaacaaattttaaaaatacaactgtgtgtgccgatcatgggagactcaagtagaacatgtctgtagtccagatgttttcctcctgtgagatgtcattggcagaaaccaaaaccaaacacaaaaaatctccaaggagcaataagatcaaattatattttattctattaaaaaatgtttttgaaaaaagatacttaaattttaaagataacttaattcctaatgatttaaaataatccaagcagagatgaaagagcaaatgcaaatgcataaaaagaccccagagcattgttagcaaaaagcaaatatagttagccaagcatatatatatcataaaagcaataagaaggcataaagcaagtttggggagagcttatttaaaacttgtaaaaatcatttgaatttttaaaagttttcaaacaaattttgttttattaaaaaaaaaattttttttgagacggggtcttgttctgtcacccaagcttgagtgcagcggtgtgaacatggctcactgcagccttgacctcttgggttcaagcaatcctcccacctcaacctcccaaagtgctgggattatagacatgagccaccatacgtggctactttctaatttttttaatgtggtagtgtggaatttagctttgaaagagaattaaagttaatagaatattaacagtgggcttatagttgatagataacaatctgaatcataagccctctatattcatagctggattttgtacgtgtctggtatttattgccaccagctaaaaacattcccaaagccttaagcataagagaaaggagacagtgttattgttgttaatatcctatttaactttagctcttataaaaaagtgcaaaacaattaataaagtagaaaatctagaaaattagtaaataaacatagtgttatatctaaatagtaccatcggccaggcgcggt

SEQ ID NO: 6 - protein, 412 aa, Homo sapiens
LELGTTEANQDPSTTTQELHREFQANSSCTSSKKSQLPPTNKTCCFPKEVINVSPGYQLVRNREQISVTLGDEMFDRKKRWESEIPDKGRFSRTNIISDLEEQISELTAIIEQMNRDHQSAQKLLSSEMDLRCAEMKQNFENKNRELKEAHEAELSELENNYKAALKAEKLAAQEKLEEMGKEYKYLKNMFRTYQDSIYDEMEEKWSKQKAKWKKDEKFERENILLQQKKKMTKKFEMESGEEDKKINESCSAVFENFIQEKEVMQEELHAQALISLNTNLYYTQLELQKEVSPYWSGDGGWGKNPGLHPALPYSSALDGSGLGKMAIKMYVFQKAIVGNLEKMLQTKFAETEEKYKHTIQILTEENIHLKQKIISKNEEICEGCSGRLASITVSKDDSDTVQDGSKKGQES

SEQ ID NO: 7 - DNA, 31337 bp, Mus musculus
ttcctttcctggctgtgacccttctgaggacacaattgttgtaacacaaataaggacaggtgggactttcctccaactgtgggtctaatcccagccatcagttctgttgtcttgtacattgcctggaactgctcagtcaagcttcgattgtgacacagggtaatagtaactgtggcaatcattgtggggtccagtctgtcttctcctactagatgacaacctccacatgctcaaaaaacttctcatgcccattagcatctctatcccatttttataggatatgttcaaattgcttgtacaggacaaacattcaaaaacttcatgataaaaactataacccaggggctggagagagggctcagtggttaagcgcactcactactgtttcagaggttctgagttcaattcccagcaaccacatgttggctcacaaccacttgtaatggggatctgataccctcttttggtgtgtctgaaaacagtgacaatgtactcacatacattaaataaataaataaatctttaaaacaaacaaacaacaaaaccaaaaaactataccctaggaaaggtaagagtctaccatggctgaggttcagggatagagtcagggggaaaagtgagggtttgggatctctgtagagcgaaagatggctttgggtcagacatactgaacttggttccctgctctgccattttctggttgtatgatttgatcatctcatcttatgatacatcacaacctcactggcttaaaccggtacatccttgccactttccagttctggtggttgactttaactctgagatgcagtcccttttagaggtggagagagtccatttcttcacctctccaacctctaagacctgaccttcaaaggctccatttgaccttcaaagccaacgttctgactttatttcctctacctctcctttgaggatctttggggttagaacagacccacctggagaaattcagaataacttgttttaaaaccatgtgtaacctttcatccccttccttgccttgggtaacctaacatgttcatcatagttagatgggagcatctgcaagggggccggcaggctgcctaccacaggactagagcaatgacgcaacctctggcaggctggatgtttataaaatggagttccttcagaaagtgtagattaggaatagacaataactgtattatttattactaagaatttacctcagaacttaatgggctaaaccaatgccatctcagcccgcacgtgggggaatccaactagagtgcagctcaggtgtgtggttctagttgatgtctttcccaaagttgcagacaagatatatatgaagccatctaagtttgactaaggctggacacttccaagatggtgcctttaacaggtgctggtagagaaggcttcactcttgcccctccgtgggactgcaagagtgtcctcaccatatgagcaggtgacatccctcgagattactgatcccagcaaacaaaacataaaccacaatgtcttttgtctatatttttgttatttaaaataattcagaaataataaaaattaactgtaacattacccaaaagattcagactactatcaagatgatctttttcggggccagagagatggttcagcagttctgggtggtagctgctcttgcagaggacccaggttcaatttccaactcacactctgtagctcgcaaccacctataaccctagttccaggagatccagtgccctcttctagattccacaggtgctgcacatacacataaatataaatgcttttagttaaagacaattctttctcaagttaaatgtcatatggggtgccaatatgtccaccagataccagacacggtgtctcaaatataatcaaggcctctcactcctctgcttatgaattgtcttaattcaactttttaatcaaagcaggacttcattgactttctctaacctagaaatcattacttttataaaacttaatgcagtaaaagagctccccccacacaacaaagtgtgtttttaaaaaatgaccctttactgtgacctcagaaatgtgaggcccaagaggctttgccacccaaagacccctcctcctgccagtgcccttgactttcatcagtattgacctccagaaaactgtgtaacattgagtcaaccccatttctgtctcaaggagccatggtactgttgcttagaagaaggcattttcagctagtcctgcctgcaccaaaccccagacctaccgctcaccgagtgaatggagactgtttaacctccctgagccttctgttcctgctgctgtaacttgaaaaagtgatgatctctgcagccatgccctgcaaacatggaaaaccttctaacacccagcacacaggaagaccccacattactagggcaacatttagagtcagaagagcttgtcaaatgtctttggatttttgctcacttctcccaggaggtgagaaaacccaccaaggatggaattggtgtctaaccagccaggaggaggctatttcccagcctgggttgcccaggcaaaatgaatggaaataattcatccactttccaagatgtgagccaaaaagactgctttcctctcccttctttctcatcttcctgctagtcaggagctagggagccctggaccagcagcccctggaggcaggaaagaagactccatgttgaagacagcaaagagccccaattaccaacagaggaaacaaagcgctatcttttctaagccaagccatgtatctttgaatctctctgctacatcaacttaaatgcaacaaggagtttaaagggtccagccattcagcccaatattcattatttaacaccagctgaccgtagcaatctccggcccacagagacaagaacgacatgggcaccaaggagggttcacacagcagcttctttacttgcggcttttttctcttacaactctctccccagcagcttcttctttactgtccttcttgcagcaactgacctcacctcgccccacaccacctcatccaatcagaatcacacacactccaggcacaagctcaggtggtcacagataggctgacagatccggatcacaaggaatacacatgcagttttactgcatgtttgggcaaggcagtaaacatgtggggttcacggggcctggcaatgggccagggtgctgtcttggcctatgtggccgcacccgcttcccacatctccccctttttgttttattagtagctctgggatcaacatctgtcttaggttgcccccttctgtgccacatccttacccgtcatgggagtgacaaactcactttcaccatcctgttttaggctggtatgcgcatgtgagggtttacccgtcattgattactaatccagcatgttgagccaacattggggggatgttcctgcttccaaggctgccatagcctgcactaaggctcgtttatcagccctatgccaccttcgcatatgtgccatccaccaaagcattcctccacacacaacagtcagcaggagcgcccaaaaggccatcccttcccaattttttaagaatcccacagttccctggatgatctccagccattgctttgcagttgcaatctccacacgggtgttgttcacagcagcaatcgatgctcacaattccttcatctttgtgtcgagatcatgactccaatttcctagcagcattgcaccaattgcacgcaaaagatttgcagctctggaaaaaattctgatactgaacagaggttacacacattcctgacatatgagtaatgcaggaagcaaatactaactgctccaacaacagcttgtgcagtttgatagggaaatacatgagcttggggttgattttcttcaacataaactattcccatgctgcctttggatccatcagtaaatacattaacagcacctgggattggctcagtctgggtaattctggggtatatcataggatttctcatgacaaactgaagccaattagtggaggcaagtacctcaatctgttttacatcaggttgtttaccaaaagctcctcgccccacctttatactcttaagaattagctgggctatgtgggactcaacctgagttacagtaaaggcagcctggaccccataagtcaaaactgactccttcaatctttgtacaaccttccaatccaggggttcatgatacttttgcccctgttgatcctgaaatactgggaaggcccccgcaatggcgggcacatttttccagacttttgcatgaagactacactttccccttttgtcttcctcatctttataggggggaggagaagacaatggaggggctgatggttcgggtggcctgctgcgcctcaaactccagcgggacatccgactacagacgttcatgctatcagtcctgtcgctgtcactagtagaccctaccgagctagattccttcttctctttcttatctttggtttgttgtctaagctgtttaggttttcagcagctagcctgagaagcaatctccttagcctcctcaagcgccgctgctccttcctctatttcagcattgtgctttccactggcgtccctcaagcacgccctgaccaagttccagatggctaacatttttactttcattttagtcgcagagttgaacccatgttactgaaattccctttgtctctattcctgagaaccttagggctccatccccttttttccggggaacctatcaggcctatgctttcctttttttttttttttttttaagagaaaaatcaaactttattaaaacaattttctgggaggtagaaagaatacaagtcagatgggggtagtgtgaaatgcagtcttttgttcactatatggctattatatccatgactttgtagtatttgtgattacctacattggattaagacagccaaaattctagcattaatggggtagatgatcttgaaccttcaccccttactgaggagttattgacagttgacagcttctgaggaagtagctatgctcatgtacacatgagcagcagtaactggatttaatgggctggagaaaatggaataatatgctcataactcattgtatatacgattgaaattattaagaataaagaaaaataacacacaaaaatttcttttatcaggtagacaacacagcccagaactcaaaactcttgatctttagttttacacttcccaagtactggaattataggtatatgccatcgcacacaggaaaacagaaaactgctgtgtttttcatactcaatcttccgattccatgtgcattgttgcatgtgggccgtctgaagagcctattcttagtgtatcatttttattcaagggttttctctccatactgttatctttttttttttttttttttaagacagggtttctctgtatagtcctggctgtcctggaactcactttgtggaccaggctggcctcgaactcagaaatccgcctgcctctgcctcccaagtgctgggattaaaggcgtgcgccaccacgcccggcttccatactgttatcttgcatttgcaaatggatcgaaaacacttcttcatgctatggattacacattttcatgaattttagacggtcaagtgataatgaagtgtttccacattttatatttaggatttctctccagtgtaagtttttccatgtttgttaaagaagcggaataaatgaacatttttctgtattatatccagaagtttttctccagtgtgaatccttccatggtattaaaaagaactaaggtcaatgaaagcatcccataatggatacaaaccttgggtttctttccagtgtcagctatgtcatgtatttgaaaagaatcagagcaactaagtttccccatatttattacactaacagagtctgttttctctatgagtcttttcatgtttctgaacgctactgtaacaaccaaaggttttcccacaacacttacaaatatagggtttctcttctgaatgaactacatcatgccttcgaagggaactggacaaagtgaaggctttcccacactgcttacatacgtaaggtttctctccagtgtgacttctttgatgtatgtgaaggtaactggattgagcaaaggctttcccacactgcttacatacatagggtttttctcctgtatgacttcttttatgtatttgcaggtggctagaacgagcaaaggctttcccacattgcttacagatgtagggtttctctcctgtgtgagttcttttatgtattcgaaggtagctagattgagtgaatgctttcccacaatgcttacacacatagggtttctctcctgtgtgacttctttcatgtgctcgaagggtactgtaggaagtataggctttcccacaatgcttacacacatagggtttctctcctgtgtgacttctttcatgtgctcgaagggtattgtaggtagtataggctttcccacaatgcttacacacatagggtttctctcctgtgtgacttctttcatgtgctcgaagggtactgtaggaagtataggctttcccacaatgcttacacacatagggtttctctcctgtgtgacttctttcatgtgctcgaagggtactgtaggaagtataggctttcccacagtgcttacacacatagggtttttctccagtgtgatttctctcatgggcttgaacattactctgtctcttaaaagatttcccacattgtttacacgcatggtttctttctctattatggatccttttatgattttgaagagaactgagatacttaaaggctttgtcacactgtttacaggcatagggtttctcttgtgtgtaaatttgttcatgcttcagaaagctctggggagaaccaaaagccactccactgtctttacatttacatggcttctctccgtgttctttatactcatgtgttttgcatctagtctgacctctgagggacacatttagagatgaatgaccagtgatatcttctccatacacatggctttcacagggcttttctccagttttctggctcaccacaggatctggaatctcattgaagatttcttcccattgactatcttcttcatactcacaaagcttctctaccacttggtatctatatcatgcaggttcctgatggtttctctcatcaccgctctgtaaagattttcctgtgaaggattcagcaaagtccactcctccagggtgaagttcacagccacatcctcaaaagtcactgactccatgtctgtgcccaggcctgccgcggctccacagaggctccggaacaggcactcacacggccgcggaggctcagcaacttggacttcctcagctgagagctgtgaggagggaagcgccagcaagaaagatgacgggtgagcaggcctatgctttctttagttgctgaaattcccttcgtctctattcctgagatccttaatgcttcatcccttttttcctggggaacctgtctctacttacctttgcttaccaaaatttccttaccactgcttactaaaatttccttaccgctgcttactaaaattttcaaaggcctgtactttctttacttacccttgccaaccaatgcaatgagttccccatacgggccaccactcaccacagtctccaacccacagagacaagaacaacacggacaccaaggcgggttcgcagcagcttctttacttgcagcttttttctcttacagctctctccccagcagcttcttctttactgtccttcttgcagcaagggctatactctatcctcaaggcaactgacctcatctcgccccacaccacctcaaccaatcagaatcacacacgcaccatgcatgagctcaggcggtcacagataggctgacagatccggatcatgaggaatatgtatgcagttttactgcatgtttgggcaaggcagtaaacatgtggggttcacggggcctggcagtgggccagggcgccgtcttggcccatgtggccgcacccgcttcccgcagctgacacttgcctttcatgttgcttcttgcaagcctccctctcccctaaaaaggataggtagggcctgagaaccctatgggccagtagactgttttctgatgacccatccacctcacaaaggtctcagagagtctgggaggcctgccacctctctgcctctcttgtcacactgtgcttcagtgtgccatgggctgacgaagaagagagtgcccatgactggccttttacaggtcctgtacaagttcctctgacagctccaattggagttgacctgatgagcagctgtggaggtgacagagttcacatctggagcgcctgagacctctgttcctttctcctccccaatttaggacattttcatacaagttggactagaaagcaaaagtaaagacctaagcaaggctttctgctttctgcccatggtaagccctgtctcccttctgcctcaggactgggtggaggtagctgagtttctggacaaaggctgaaaaccaggactgaacagacataatcactgtccaatctggttctgccaagacaggccattctggctttgccggaacttcccttggctttgaacattttagtgggagttcagctcagtgttttctggcttacagcttgccttcatgtttgttatttttatattaaaaaaaaaaaaacagacattttcaaggctcttgtttgtttgtttctgtttgttttgttttttgagtcaggggttctctttgtagccttggctgtcctggaactcattctgtagaccaggctgtcttcaaactgacaaagatctgtctgcctctgccttctgagtgttgagattaaaggtgtgcaccaccaccatccaggctacaaaactcattttaaaaagcaaattagcaaaatgagcaaattatccaactctcagaatcccaggtgtccagatcacatctggtctactgtttttaaaatgccttttttttttcttctaggctttaatataagaggtccatgtatagtctgaaagatgtgccttttaagagggggtgggggggggcggagctgggcagtggtggcacacacctttaatcccagcacttgggagtcagaggcaggaggatttctgagttcgaggccagcctgagttcctggacagccagggctacacagggaaagcctgtctcggaaaaacaatcaatcaatcaatcaatcaatcaacaaacaaacaaataaataaataattttaaaagtcggggaggggaaggagggagaggagagtgagagggaagaaccatatattattccagcattcaacatcaatttcctgtgttggaagattcctgagtaatagtaaagtggaggcccttggctgcttgaggcagaaggctgtaaggccgaggggtattgtgacatgctccagggaaaggcagtctttcctttggctaacaggggtcccaggccattgggacaagagaaccggacagacatggaacagaggcctggggagcagccctcaagagccccaaagaaggaaaagatcaaggagcaaccggagaccccaagtcagtccgtctcaggccgcggtcgggtgctgttaataagagagttcttcaagcaggatgaaagctacacgaccctgcccaacacccaagcaacagactgccaaagtagttgccgcagtgccagacggcgactcaagcgcaccagcgacagcttggcggacaaccccgaagccccggccgccaagcggcgagcaaagatgccgcagctctcgcgtctcaagaaggaggacttgcttggttgcgagaagccttgggctccacaagggaaccccggctctgaagccgctgagatcgccgagctaagctcagagcccggcaagcagctgctcctggtgctgtgccacgcatcggcgctggacacgcagctgccgcgacttcagctgctcctgcagcaggtacgggtccaggagcgtcgcccgccagccgcgctcgtcgggatcctggtgcagccgcggccggatgaggaggacgagtcgcgccgccgtctgggggacctgctatacagcgtcttctcttcagaaaacccgggggtcgaggtgcacacagcagtgttctgtcccagccgcccccagggtgtcctggacgtccagcgcgctgataaccaagcgcacatggtccacctagtggatcgccagacccaaacggatggtgaggggcccgagggtggagactgggactgttgttccccctgagaagtgagcaaatccctgacctcagagcccctgtgttggtgccttccagacgtttggggtacgatctgaatggtaatgaaccagcgtcctttccccaagatgtgtgggctgggacagtctgaaactgttccgagttaacccagagggttacctctcccgactatctgcgccccccgcccccaaacacacacacacacacacacacacacacacacacacacacacacacacacacagtgtaggagagaaatcatgcttttataacgtcctgagggatgttgtaggacctgtaatagcccatcctcctcctctccaaatgcactaacgccattcccaagttccttaggggactctctagtctgttacttctccaggggatagaatgacaataaaagcagcctattgtgagccagtcactgtgcgaggggctcttcacctccagtcttcacagcacctctctaaggttgggacttcaaaagagtcaactagcttttaccactgtgttttttactcaaagcccctagtaaacttgtgaccccggagggttaatttgtagcctagagtcactgagcagtatgttcttaacatggactttgggcactttctgtttccagaagccccttcctgggacagcataggacccagaaaagtgttctgagcacaggcacctcgatgttccattacagaggctctgctgtcctttcagctagttgccacagcaagctatctctctctagttagacccattcccctaccacatgacatgcaaggatgaaggactgcttgatgccagaccagactcagcacgtagaggctaactttgggatggatggtgacacactcactctagtgtgcagaacaccctgaaaggccagaacctaagggactgttgttgatggggcatggtattatcacactcaaagtcttatccttgctacctaacctccaaccttttaaactcactaccacatgacaaggcttctggtttaaaaagtccccactgatgagcccattccaattgagactctcctcggggactacaaaaatcctagcctgtctttggcaacaacctcttagtaagaaaatttctgcctagagtcttctgaagggccccatccttcccctttcactctctatcgattctgaaacttgttggctctccttgcccaaatctagggcaaggggaatgaaagctaagacaaagctagacataagcctaagctaagtgcactgtgactgtgatgtagaagagccagttcttggcaggaaactcttatgaggatttctccctgcttctgaaccatttctccttaatggtacaaacattcctcaacctgtattctgtcctctatctcccagaacacaagcttgtgtgtcccataccctgtggcatccctttaaggagaaatgaactggctatttcatggctatttaaattctacccaaatatgttcctgtcccatcagattcgtttaaaccggttgttttcaaccaggaaaaatgttaacaccttctccaagctctgggcatatttagccacatctggagatgttcttttccttacactgatggggtgctggccagtcaaagccagagaggctgcagagcttcctataacacacagaacagcctcctccaaaagatattatctagcccatagtgtcaatcaggactgagactgagaaactgatttcaatcaggttatgctcatcagtcaaagtctagcagtcactgaaaaggttccagcctgattctgaatgtcatcccttcaaatggcccatagatctttgacctcagaaactgccagcttcttgtagattcacctacccactgaaccgccttgctccaaaccaaccagacacagcctgagccatactgatctaagctgcactcccaacccatatctttctctaatcttctcatgcaagaaacttaatttttttccaattctttaatttcaaagtctgtataatctgattccccattgcctactggggtcataaagaaaaataaccctttagaacttaatcttgagtgtgtcaccaatcaactagaaatggggatttagtttgggaggtacttatataactgaatttctctgaacatcaatatcctttttgggataataataatagtgatgacaataatgtaataataataataatagtcagcaaagtctttgctggctctagaagcctgaaaatagattctctcacttcactgttgacatctggtctagcctttgtgtgtagcttgtctaggacctttctggctcactcgctctccctccaccctccttactgcatcctcaccccttccccagcttctggtgtctgagtagggcaggtgtactttacccacgcagcttacctacttcatggaggaagttctttctgggaacgcacttttctattgtgatgtgtgacaggctatcttttcaaaacacttttcactcttccaccctaaaatggaagttaaattgttaagagattcatagtttgtttgacctaaccagtgttttgggaggtaataccaatgaaatgaatttgagaaatttttcgttttctgagaactggcttaaggtagaattggccaaattcgaggattcttataaaagtttagacatacacacacactcatacaagcaagcactcgtgttcacatatattcagagatgacagaaggcagtgggttgtgggaggtaaaatgctaaaaaaggaagtcaaatcttcaggaaagttccctaaatgttaaccataatgtttgtgtttggggatagacacgtagaaaccagcaacggagctgagaatccttcctattcaggatgtcttcgaataaaaagtagctctcacggaccctggaacgtgcagccgaaaggtgcctgaggctctggtcacataatcatggatccagttctcttaggcccaaagactgtcttaattagaccatggaggaacaaggcagctgctgcctcctgccggttcaagcaggaagccctgggagaggaaaccggtgccagagccctagccacaggggccagcctggcttttgtgacctcacaggaggtatgggtgactcttgtctgtgggaccttgctgtggtcaaagatcagagacatacccacaggggagactgcctacctagggagggagccaggaaattcacagctccatgtagctccacggtgttactctagaaggatcaccatgaagaaggtcaaaaagaaaaagtctgattccaggcgccgcaggaattccatttcaccgcagactagctccgattcctcacagcagcccagctcagaaaccccgccgtcatgtccagagcccgcctcgccaccatctaagccacagccttgccaggagtccaccacaccacaccaagttaaccctgagcctaaaccgcaacagcatacaccacagcctctcccgcctccagagaaacctgcctcatctccgttcctggtacccatggaacctaaaccaattcttccaagcaggaaagcaggtgggcggacttcctgctttaaggcagttctagccttcttgctgatagagtcccagagctaccagaggtgggctccagtctggaggtggtggtgtatagtcagcatgctgcccggggctaagtttataagctgtggaggggatgattttttttcccccttaggtttttcaagacagggtttctctgtgtagccctagctgccctggaaatcactttgtagaccaggctggcctcgaactcagaaatccgcctgcctctgtcttccaagtcctgggattaaaggcatgtgccaccacgcccggccaagaggatgatttttatgagagagtagaatccctaggctatgtccttctgtagcatctcaggtctcgctgcaaacagccatggatacatactaacatttacggctccatggggggagaccctctcattaggagtcagttagtatccattcagaaattaaaagcaaatatagactaaaagaaaggaagcagtgatatgccttctggctaccttttattggttattcgagaggccagaccactccaaagaagatagtacagggtgatggaggtagatgactatggtacagcctttgagagaattgggggtttctgtttgtcagatggaagataggagttttgttttgtctttccatgttaccctaagagatctgaccttggactacagagaggatggctagatcaaaatataggactcctgactaactcctaacttcagataagccacaaataatgttataatccttagtatctgttccaaataggcatcctatatttctgcttgtcatcccttcccacagaagatactagaaaagggtctgcgcaatgtataaagcaaaccaaaaatgtaaaaacagtattttgtagccatcattttaatttagtttagctctgcctaatattaaatggctggccagctgtcaaaaagaagtctccatcttcttggatagccaatgagagacaaaactttggacagtatcaaggggactcaagtggagttggaaagctgggatgctccagaccactgaggataatgaagatagacaagtgaccattgaccgttccttccatgcctagtacttcattcatccatttccgtccatcttatctgacgatactgtagggaggaaatattcctttgtcctctggagcagcccttggtatggttgaaagggaaacttgagtctattctgattccagattccctacccttgaccacaactgaccttccaataccaagaggccagcaggtcctccagagagaaggaggaggaggaagaggggatctttctctgacctttccttgaaccatgaccaaagtactctatgtccttgagcaactcacactctgggccacagcaatcctaaaacagtctgagcagagaacgaacacaaaccatgagagaaccagagctctcaagccaaggaattgccaggacaatggtgactctgtgactggtgtctgtatgcaacatgagcttcaaccatgtagacatttctgggtgatagcctcagagctggtgtcagtagaaagcaaaaccttccagcaccacatctttaaacctttaaaacgatagggtattgaagaggcaaaggagggactgtccatggcctactgaatttgttaactttctcatcaccgtgacccagttatctgagaaattactgaaacgatgacttattcacgttggctcacggttttaagagtatccacgtatcacggcaaggtgtagctcacagtgaatctgctaggaagtggagagagggattatgtgaagggcccaaggcaagatataacccgcaaagatgtcccactgatgccctacaacacctgctagaatccgcctcttagcctttaccaactcccaataacatgacttctagaactgtcctagagactgtgtcccactcccaagaaccaggtgcagtcctcatctctctccttctctgtccagcagtgcctctgacctatgtggccccacgctcctgctcctgtgcagcctgcccgggcagctccgcttgctggcatcgtctggggctttgccatagccgaatctttgatgtcctcctacctcgggactggtcatccatgccagggagaggagtcccaaaccttctcaccttctacaggttcccgcatgaacgggagggctaaaaagccttgggtgtagagttcccagggccaggctcggtcctcagatctggttggcaactgtgtgtaacttcctccaaacatcataggcttttcaaaagcaaagcctttccttctaaataacaatgtctctggtttggtgggccagctctttgtctgttcctttttctatgaaaccgtcttctctgctgacagcaccctcccacccagcccattgtaaactccagagctgtgtgattacacattggttagccattcacttttttttttttttgacccataccatacacagggagtgtctatttattaaacggcatgttaattatctctggaactcaatgataaacctgatcgcgtaactcataggtcccttctgccaataatagcaaaatctgtcccacacagaacatgccatgcttttaccaggagtcctcacaggggccatgttttctagaccagtctattagcatcagctccttcctttatcatgacatcacccagtctcggtcctattgctcctcttccacaatgcctcaagagaaatgtcatatgtcatctacccactggcacccatgaaaagggttctgtccatgttaagaacagactgaaaatgtcctcactctttctgagtcatgtgttggggccaggagaggggcctctacccaaatgagccaccctgcttatactcaggacttcacaaaaccccttggggatctcatatcgctacatcaggagcacagcccaccatgccatcctcctctcttaccctttccagctccttctcttgaataataataataataataaaataataataataatacccacacagatacagagctatttggtgaacagagcatacctagagtcagagataccatctattgagtcccggccaggaagagtctgcccaccactcacccacacagtctgtctgtccattcatctgctgccagatggtgctgtgtgttcccctgggtgaaaaaatcaaatcctactctgggaagatgctaggtggtctgagagacacctaaacaagatcttcaccttccagtgtgttcagcctgtgaagctagctaagacctgtgcatttagaaacctgtgcacaaagcaagtagtgtgtggaacaggagggcttctgggagtttcagagtaagacaatagtaccatatcagggtccacagcattgtgtgcccagtgtgtgagccaactccaaaagtatccttggatccctctctggcttaggatggaaagaagggctattctaggctgtaggaaaagccaaaacacagttcagagttaggaatgcaagcgaaagaggcatagaaccccatagccagggcaagagtttatttttccacgtgagtccctgcttctgcagtctttaccgtctcagaggacttctactaggcatccatggagacaagaatccctcctttagttggctttttatcagactagataccacattttctgaatggcttcctgacttatactggttcactggttcctgacttatactggtttgctgtcccagtctttgtagagactgtaattaatatgttatttcctgatatctgaaaaatctctaaaatgcctcagagggttgctgtgaagcttaaagaggaggtgagtgggaggtgtctggaacaagacctggcacatcgtggtctggaccaacctcgtaccctgttgcccctctgggcatcagtcgcaggctaccgaccctcataccccaggggtctcgtaggaagttttgtggagagaggtgagagcaatgtgtccctttgggagaatgatcaggaggagactctaagttccactgtctcattgcagtacacagcctttctccccaacccccactccctttctgctttgctttgtagaaaaccgtcaaggaagtactgcgctccccgtaactctcgtgcttcaagctctcggaactgttgctgtggctctgggggccttgggagttgcctacttcatggctgaatccttgtgaattggaccccaggcccaccgtccggcaggtaggaggatcaccttgtcccttttctctagctagagaagactatctcaaggtggactaggcctttaggccttcagcctgtcagggaaggttcatgatcattcctacctcaggactctttcaagcctctctggagacctttgattagaaccatcaggacaaaggcccttcatacagccccgtcccctgacctatggcttccctagtcctagatgggaagaagtaggggaggggaagggtagagattatctcggataagccccactgctgaatccccaatttccactcacaccagtgttctcccgcctgtaccaagctcatgctatgcatgcttctttggaatgtgtgtgatctctgccactgctcatttatattacaccatctctgcatatgaagatgtcttcagtcaccactcctgtctcacctgaacccagaagcaaagacccaaacaaggactgggtgcaccagataactggaggaagtactctcaggacaaagcagggctgggtgggaggcaagagcaaaagcaaaaggaagaagggaaggcttcatccctgtggagtcctagaatgttatctgtacaacagatgctcttcctcaagagacacgaagcttccctttcatttccctgtgtcagttggtcaatatgtgactatgtgggtgtagggaggaaatttgagttctttgtgtaaaaagcaattctcctcgagttgagggcaagtccctgaaggaggagggagctgttggtcacctgcagccaaaagtcatcattcaaagagccaatggctcagtcaggaagggaactggaaagaggtggtcaccaagagcactcactcgtaggcatcccaacagctaggtcttcttcaaatggtcttgaatgcttaaaaggtgatggttgaggtagggagtgagagccaatggaaacatttcagtccgccccttccgtcctcccatcccatgcatgggaatggacgggggatggttgtagacaagcccgggtctgggaatcgatgcttgaaatgtataaacatccaaaccctgtgagagtacagcatcgcccctagagcgtctgatgactattcaaggatcatttgaggaataatattaaatattaaaccaccctgacctccaggagacagcacagcacttaagagccttgtcttcccttgccctggacttactgggagtggtgggatatttgttattatgttatcatgctatcatgtcagcatggtgtcagagaagatgctggctctggatttaaactgacaatctctagtctagacagtgccacttggaatctcagtgttaggggcatgattgtcaatgtcatgtctaatggagagtaagctctctcagaagatgacggtcatgaggatccaaagagagatattaagagttgaagtcccagagacggaatggaatgaggagtttattgtgtctactgaaccgatgatgcatataccaaatggtccaatggcaggctggcaggtgctgctgtacccctgtggtagcaggccttcctattataggagcctaatgaaaatgttgcattatttgtggtctggtatatttagtatgttcaaaggcctgttttttcccatctgacatagcatccaaaccagaagaggatcccactggccaggaagaagtgaggtggaactcaagtgatgtagggcagtccaaagttcccactgctatgggcaaaatgtttctagaaggttctatggtagtataagttcatagataccttgtaggtgtaaagcccagagaactaccactctaaaacatatacaatagagaagggctttatgggtacagtgacctttgaggctccttagtccctatgaaaggaaaaaaggtagctaggtatctctctgtccaaaatgaaccttcatcagaaaagcaaagctgcctcctcttagagaaagatgcttccagaattttctttcccaaatcttggagaaccagcctttcccatagcatttttcctcagctgacaatgaatcaacaaaagcaaaagattcctttgggacattgaatatgatcaaactctacaccatagccaatgtctgggggagggaggttccatctcagctgctcaggtctctaaggagtggggagttaacataaaaggtgctgacattggctgagcccaggagatgttctaggacttcacaaatagtgccataagccttgagttgaagcagtctgactgactttgaagaagcaaacaagaaaaaaggaagagataagtgaagaaggaagaggaacaggaggagaaggaaaaagaaaaggaggaggagaaagaaagaaaggaaggaaggaaggaaggaaggaaggaaggaagaaagaaagaaagaaagaaagaaagaaagaaagaagaaagaaagagaaggaagggaggaaggaaggaaggaaggaaggaaggaaggaaggaaggaaggaaggagagagaaagaagccaaatagaaggaaattgaattctaaaataatttacctttttgcaaaaaagtgtttagccattgaaccctcacaggtaagactatagagtggaaaactgatgagataggtcacaggaattgattaatgaagctaatgatgctgtcaattattatttattttttccttacagatccagtttccatcaaaggatcttacttgtcaccaaaatagatagagagaaactatcttgtctcttttcttcttcttttttatttttttatttttttgagacaaggatttgttatgtagcccaggctagtcttaaactcacaatcctcctaccagagccttcagaatgctagggttacaggtgtgtgccatcacacccagctagaaatctgtcttcagtgtgttttactcagaaacataaaagttggatctagcacagaatcgggaaggtgagggtgggctaaggacctactgtttctttacaaatggtcaaggtgggattccagacggaaaaaaatcagttcctgacaagggtcgtttttacttaggggttcatggcatggcaccccaactatgccactctgcgtaaggattattctaagaagaaagtcattgagaaactgaagctcgtctctgccctctctgatctacctgagaacagcataatctctgctattacaatgaggtgacgccatcccgggaagggtgaacagtcttgtccctgaagacagcacacaggaaaaccatcccacacaaagtctgccttgtctccatatcggtgtccttccacagtcagccaccattcacattcaaacctcttatagcttccctacaaaattcttgctgtttatggggatgtctgtacatcttttgtgtcatttgctctgtgcacaggcactgcctcattaataacttgtttttctcttgctaatctgccctttgtccatctaatttggaggacacagccaacaaacctaacacgggtaaatgaaaaagtatttctccctccatattagataggaagtttttcaatcccaccccccaaaatctgtatgttaaaaccttagccagtgcccaatatgtcagtatcagaaggtggagcctttggaacatgattaggtcatgaggtagtaccctcatggaatgattttagttcccatattaagtaaaaaataaaagacctcagagggcctggatgtagctcagtaggtagagtatttgctgaacatgtacaaagccccgggtttaaccatcagcaccacatagaccaaatgttttggcacacacctgtaaacccagtactccctaggtagaggcaggaggattacaaattcaagatcagcctccactacatagcaagtccaagagcagcctgagctccatgaaaccctgtctcaagcccatttgtatctctaaagagagtttctcctctgctctcctacctcacagcactcaagacttctgtgacctcatgaggaggggagacgtctcccccacagaaagtaacagtactgctgtggttgacacctctgggtctctccaatccagttctaacacgacctgcctggagacagatcctattgagagttcaggtggcaagactgcttctattccacaggttctagacccaggtcctgtgcctctgacccactagcataaatcatggtctctcccagccctcctcaaagttgggtttactaagatggctctaggaagccagggaaacatctttattagcttataaagatctacagaggaggtgggataaggaacttccctgtcctctcccagggcactatcctcggtgaactgtcatttggtcagctacctaggaccgccccatccttgtcttggatttttatggagatttcgttgcctatgcatggtggacgcacagacagctgtgcagagatgtgattggacaaaaggggtttgatccagtgctgaatggatcagggctgaggaggatagacacagcagggcctctttggatttttctcagactctgggtagtatatcaccctccaggcagttagatccctctggaatgaggaggctcccgaggcctcatgtagatcacaggcatctttatggccagctgcaaaatgggtaggagagagtttctatagcctaccttagggaaattctaacattatggcctgctctgggagggaagactcaaagtgacgagtataaatttaaaacacagcacaccgctagcagtatttttgagtagcagcgcaaatggactaataccccacactgtttttgtgtattctcaaatctttctatcatggtccactgatgagaaatccccactcttcactgggctgtgaaggtggcaccctcgaaaactggcattatagaaaagtaaggaggctggggagatggctcagcaggtgcagacgtatgcggcatggttttggggagtaaataagataaagcattagaaccaattcccaacatcgctcagcctgctttcttacagaactcaggaccactagctcagggatggcaccacccacaatgggctgggtcctcccccatcaatcactaagaaaatgccctacagctggatcttattgaaggcattttgctcaatcaaggttccctcctttcagataactctagtttgtgtgtcaataagatataagactagccagcacccatgccgatgactttgaaatgcattggggggggggagggtgtcaaagatggcacatcctcagccctgtgacccaaaatgcacacagcgtacctgcagcaaggcctaggacagcagtactggggaaccctcggatgcttggcttagtccttcctaggggtcacttcaacaggctgaccacaaactacagaaggaggacctgtgtcctgaggagtcataaataaggagagacacaagctaaggccctctgctttctcatagtggtctccaaggggtgctgagtgtggtgggtcaaggacctaccatgggttcttgtactggggccaagccactggtgaacacttgaaggtaaggtcttccttcttcaggctgtctcttgagagcaaagattagctggggaatctgttcaaggcagcatttataaattccacaggtaactcttaaggcaaaagggatgtagatgaaagccttatgaagagaaggtgaatcctattcaaacgggagcagtcaggccccacacaccaaggctcttagcctctctacaatgctgcaaactccttgagtaagaggaggctcaacgctgggaaaaagaggccttcttgggccttggctgcgagtttacttttcaaagctctgctccctggaaacctgcagggagaagtgactcacacacacatcccagcatccactgctcttggcaaaggcagcttcttgcctccccagcttggagctgctggggatgcagcatggatgctttccttcctagtccctggacggctcacacagacctcattcacaagccggctattgaatgcttgctggaaatgcaaattgctcagcagtgagtcttcttttcacacactaaagttgcatactcctgagagctgctaagcaggacaggcaagcatcccagagcaggaggctcccgaagaactaatgtttgctgttaaaggaagcagaacttggagctggcagccaagcaggacatgcaccccgctggcggttctgcaggtgtctggcctcttgccccttcgtgaccccgggcttgcctcttttgttccttcatttgagtgccacattaatcatgggtgactaaggaaggactcaacccaacagagttgttgcccatccacagttcaagtccaaaaagctggataagctactgagtgagccacttgctcccctccacccaagaacctgaaggctctgggtacagtctcccacccagactctgaggataactcagtgagcacgaggctggctgactatgctccctaccacgagtgctcctgacccagccctcacccagtaccttggggtcccttccttccccaaggttctctctgaagttgaggtgttctttcttctcaggcaccaggtaggagtcactgggcctgagataactgaagagaacaggctcttctcttctcttcaagcttcccattctccaccaaacaaaatacaataaaaccaaacaaccaccaccagcaacaacaacaaaaaacccacttggttaaaatgggtgtttaccctccgaattctgtagactttcataccaaagatttgtagcctgtttccactttccaagagaatcattccacataatctgtttggtggtgggatgttttgttttgttttgttttttgacaggatctcaccatgtacccttggctagcctgaaacacattgtgcagagcaagaaggactcaaacccatagtgatcatcctgcctctgcctcctgagttttggacatgtattaacatgcccagctttctttaagatagggtcttactatgtagcccaggctggcctagaactcatgatcctctggtctcagcacttccagtagcactggggtaacatgtgtgccaccatacccagacaatttctcatggttgcatgatgttcccgcatttacctggtttataatggatcgagtataaatcatccagacttaattagtatctggctcaccatatcaatcattgaattccgtctatggtgtcagttatagtcacacatgaaggagaggaaaccaggtctatctgccttggacaacaaggggaatatggcggtttatgtaactgtataatccacaagtagcaggctttggggtaggttttattcaaagccttttcttctccactccccattttgccttctgtggaattagtttcacccggtggctatgatagttgtgttaggggcagaaagatgcaattccctcctcacccatcataaggggcctgtcctacaaaggcagattaacaaaagcatactgcctttactgaatctgtttcatttaacactcaagcccttcggtactgaaaagccttggtctgttgaagcatagctttaatcccaccattagggaggcagaggaggctagtctgattcacataaaagagttccaggccagtcaaggctacacagtgagaccctgtctcaaaaacagtaaataaatagccaagccccaggcttaggtttgatgaagcgtagacagccacatcgacatgtcactggacagcataaaactcacagcctgaagacaaaacccagcaggacctgtcttctccgattcttattgatctcagggtagcatttttccctcctggctatggggcagaaccatctggaatgatagccctcgagggagatttacttttagatttttatgacttagggaaaggttcttggggaagacaaattcaggtttctatgactcttcaggagggagggagaggtaaacgggagaccaaaatggcagaaagtcagagctactttgcttctaagaccttccggcctgcttttatttagttcaaaggatcatcatacaatgcatcatactttggagtattgtcttctgagccccagcagctgccaacagtacctaacgctacaatagatctttgtccccatccagatagagtgcccatgagcctgtcatgccaagcagaagtcctgtgcttcaggcttcttggatcggcatgttacaggaacaccaatggctgggagcagggaactggggagactcagttgacttacacctctcagggcctgccgtgagttaggttggaatcatctatccttggagtaagtaggctgcatgagagaagacagaatcagaataaaaacccaggtattttaaagaaaaccatgaaatactgagggttttaacatgtgtcagtcctcagtattaggggtttttttgttgttgttgttttgttttttccaattgaaagattctttttcgagggaactacaggcttcttcagtgcttcccttttgtaaataccacaacgggcatcctccatagaaatgttggcaaaagccccttctcaatgctgttgccctctgagttctaggtcttttccctgtttgtgccaactcttcaaggttgccttaccccttctagatacattctaggtctctctgtctctctctctgtcttcctctctctctctctctctctctctctctctctctctctctctctctcacacacacacacacacacacacacacacacatacacacacacaagcaggctatctcacaccttcacgattattatctacccagactggtccagatggctttctgaggttagaaaattcgaaacttccttctcatcccaggacggtcaactgtgatggagatcactcacattaatcagaaatcctaatcagattgacccacccgccttgtgttttaaatctaattctttaatcactttaagccaagcacattctttttttttaattaggtattttcctcatttacatttccaatgctatcccaaaaagtcccccatacccccccccccactcccctactcacccactcctactttttggccctggtgttcccctgtactggggcatataaagtttgcaagtccaatgggcctctctttccagtgatggccaactaggccatcttttgatacatatgcagctagagtcaagagctctggggtactggttagttcataatgttgttccacctatagggttgcagatccctttagctccttgggtactttctctagctcctccattgggggccctgtgatccatccaatagctgactgtgagcatccacttctgtgtttgctaggccccggcatagtctcacaagagacagttacatctgggtcctttcagcaaaatcttgctagtgtatgcaatggtgtcagagtttggaagctgattatgggatggatccccggatatgacagtctctagatggtccaatctttcgttacagctccaaactttgtctctgtaactccttccatgggtgttttgttcccaattctaagaaggggcaaagtgtccacactttggtcttcgttcttcttgaatttcatgcgtttagcaaattgtatcttatatcttgggtatcctaagtttctgggctaatatccacttatcagtgagtacatattgtgcgagttcctttgtgattgggttacctcactcaggatgatgccctccaggtccatccatttgcctaggaatttcacaaattcattctttttaatagctgagtagtactccattgtgtaaatgtaccacattttctgtatccattcctctgttgaggggcatctgggttctttccagcttctggctattataaataaggctggtcaagcacattcttgatagagatttgtctagcaatcaagtatattgaccttccggtattcatgcaatggaaaagcccagaagtctgttgaaatatgacttggatggatactgtagtatgctgcccatggatgagctggctctccaggatgctggtatagtcactgctagccacttaacatctatacctctgtctgtgcattgtcttaactaaagaaagctgcctcacccaagatcataccacttcccaaaaggcaaggtaggttgaagaacaagaagcacatgtacggctaaaaacaaaacaaaacaaaacaaagcgaagcgaagcgaaacgaaacgaaacgaaacgaaacgaaacgaaacaaaacaaaacaaaacaaaaccctggatcctcagttgagaataatcctggaagaccatcccaaatgaatgaaaaaagatgaggacatgacagcccctaagtatagttgaggaagagtatatttgtagatatgaaggagtgcataagccagagacatctggaagggtccagactgaaccaggccatacgtgatgggtagggggatggatcatgctcaatgtgagggtcccaaataaccaaccaatcaaccaaccaaccaaccaatcaataaaaagtcacccccagcaacctagcaacttaaagcaacaatgtgttatttcccacaagaacccagggttgtctctcagccttgtggcttctctccacagtgaccagcgcctctttacacacagcagctgaattccaagagtgtttcaactgcacacaccacagtatacatccatgtttcaagctggcttgccctttttggctaatgtcctgttagccatgccccgagtcccatagggaactccacaggaatgttcttcctcaggggccaccagctcaataacctatcacaatctaccttctgactctctcttggtgatctataactacttgcaaaatgagtcaccccttagagcaaaactggacttccagggaatcttttaaaacagtcagatgcaggtttgaagtccaaagagtcactattaaaaggtgcttcaggtgaggtattccaagggctattcctggttaaagggctacaaaggcggactgtctccccagcacacagaggaaacacagcaggaggaacagagatggcaaaatacttcaggagtctcatccaaactgctgagtgaggacaagagggttcattataaccactagtccatagccaatttaaaaaacatctaaagaccttttacttagttggtggttcagtcaggggactgacctaggccctctgcacataggttacagttgtgtagcttggtcttcttgtgggactccccacagtgggagcaggggctgtctctgactctgttgcctgcctttttaggcccctttcctcctattggggtgcttcatccaggcttcctaggagaggaggtgcccggtctcactgcaacttaatatgccctcgctggttgatatccatgtcttcttctgaagaaaaacagaggagtggattccgggtcagacaggggtaggaagtgggggagggaggttgtgggaggagacagggaggaggggaaggagaataaacttatttggttgttattgttggtttttttttttcagacagggtttctctatatagtcctggctttcctggaactagctctgtagaccaggctgaccttgaactcacagagatcagcttgtctctgcctctgtctctcaagtactgggatttaagggttgtgccactacctccaggcctccgttagctttttaactaagcctcttggtgatagtcccagtattttttctaggatccaggataggcacctttcatttatccatgcccttgaactccagtttgcctggccagcccacctcccccaacccccatttcctcctatctggaggatatttggtgtgctagtgctccgttcaccaatcacacacacacacacttgagcagctacagaatgtaggaggaagttctgcttgtttgagcaatgttcctctcaaccttagggcagtggcccaggagacctccgtcctgacttctcccctgttcagtaatcacagatcctcataagcccttagcctaacctggcctttcctctgggtagactgagctgtctccacagagaatgggcagcttccagaacttctagcctcagacaacccagtagcatctggaaggaaagaaaattccagagagtagctgagggcaggggctgaagcaaatggagactgtggaaggcaagggtctgtgaggagctgcagttacagcggagctgcaaacaccagtgactgaagagctctagaaagctgctgagtcacccagaggagctaggagccaagggtcaagcaggccaagctcagagctgtgacactcggtgtggacactggcttcctagcactcaatgcctccggaagcctacagtgtacgtcactggcctgtgtctggccaaaccaagtggctttggaatcactatgatactaattaacaagccatctgtacctctttaagaagtcagatcctgacagattcccatgcaggtgctgctgacacactctctgtcattgaatgctgagtgtctctgtataggattgttccctctagctctcacaggtggtgcaggcacccatctgctcttcttcctgatattattcccgggcccagcaagaacacaataggggcttccttgagccagggatctgtcttataacactttatgttttgttttgttttattgattttttttaatgtttcaggatttgtgtgtgtgtgtgtgtattgcctgcatgtatgtctgtatactatatgcatgtctcgtacctgcagagcccagaagggagcatcagatccccctagaactggagttatagatagttacgagctgtcacacgagacctgggaatgaaacccatgtccctggtagaggattgctcttcagagctgtgctatctctccaacctctccccaaggcttctttacacagcttcatcaagaaaggctgagaggattgcttctttctgtatgaatgggagctggcatggaaatatgttttcctggtaccagattgaagccagccaagtagataaagaaacacttccaatactggtgcccagtctggccatgcagcggccggaaccagcccagggctagccactgaatgcttacggtccggtcaggatgttttcagtctgtactttcttcccactcaccttatttttctaggaatgaggtcctgtggcttctctgatttctactcaggaagctcccagtctcccagttctcacctgccactgcatggcccataacacaagagacagctcggagaaagagaggcaggaagcaaaggaagaaagaatggtggaagccattggttagcacatgcctttaatcccagcactcaggaggcaaaggcaagcggatctctgtgaattcgaggccagcctggtctacaaagtgagtccaagtcagccacgagaaatcttgtttctacctccaatccccaaaagtgaaaacaggcagaaagaggtgaagcaatgaagaggaaagaggcaccaaacaaaggggtgagaactgcat

SEQ ID NO: 8 - DNA, 1297 bp, Mus musculus
ccgcggccggatgaggaggacgagtcgcgccgccgtctgggggacctgctatacagcgtcttctcttcagaaaacccgggggtcgaggtgcacacagcagtgttctgtcccagccgcccccagggtgtcctggacgtccagcgcgctgataaccaagcgcacatggtccacctagtggatcgccagacccaaacggatgcagagacatacccacaggggagactgcctacctagggagggagccaggaaattcacagctccatgtagctccacggtgttactctagaaggatcaccatgaagaaggtcaaaaagaaaaagtctgattccaggcgccgcaggaattccatttcaccgcagactagctccgattcctcacagcagcccagctcagaaaccccgccgtcatgtccagagcccgcctcgccaccatctaagccacagccttgccaggagtccaccacaccacaccaagttaaccctgagcctaaaccgcaacagcatacaccacagcctctcccgcctccagagaaacctgcctcatctccgttcctggtacccatggaacctaaaccaattcttccaagcaggaaagcagcagtgcctctgacctatgtggccccacgctcctgctcctgtgcagcctgcccgggcagctccgcttgctggcatcgtctggggctttgccatagccgaatctttgatgtcctcctacctcgggactggtcatccatgccagggagaggagtcccaaaccttctcaccttctacagaaaaccgtcaaggaagtactgcgctccccgtaactctcgtgcttcaagctctcggaactgttgctgtggctctgggggccttgggagttgcctacttcatggctgaatccttgtgaattggaccccaggcccaccgtccggcaggggttcatggcatggcaccccaactatgccactctgcgtaaggattattctaagaagaaagtcattgagaaactgaagctcgtctctgccctctctgatctacctgagaacagcataatctctgctattacaatgaggtgacgccatcccgggaagggtgaacagtcttgtccctgaagacagcacacaggaaaaccatcccacacaaagtctgccttgtctccatatcggtgtccttccacagtcagccaccattcacattcaaacctcttatagcttccctacaaaattcttgctgtttatggggatgtctgtacatcttttgtgtcatttgctctgtgcacaggcactgcctcattaataacttgtttttctcttgct

SEQ ID NO: 9 - protein, 237 aa, Mus musculus
PSAHGPPSGSPDPNGCRDIPTGETAYLGREPGNSQLHVAPRCRRITMKKVKKKKSDSRRRRNSISPQTSSDSSQQPSSETPPSCPEPDPSKPQPCQESTTPHQVNPEPKPQQHTPQPLPPPEKPASSPFLVPMEPKPILPSRKAAVPLTYVAPRSCSCAACPGSSACWHRLGLCHSRIFDVLLPRDWSSMPGRGVPNLLTFYRKPSRKYCAPRNSRASSSRNCCCGSGGLGSCLLHG

SEQ ID NO: 10 - DNA, 48174 bp, Homo sapiens
ggtgaggtaatttgctttactcagcactcatccactgattcagatgttactcttatcaaaaaatactttcccagatacatctagaataatggctgatcaaatatctgggtaccgtggtccagccaaattgatgcataaaattatcctcccacttccccacccctggcccctccaaggccctccggggttctccgggagtctggctctccatctcctcctctttgccctccggcttccaggctgtgcgaccctgaggctcttccctgccctgttctacccaaaggggcctcaggggcttgaattcctccttcttggacctttttctctttccagtcagtggatcccatcactttgagggctcctggaatgacattttccccaagaagcctctcctgtataaaactgggggttgttggctgtgcccagaggatgggggtggcttccttgccctcttcaccccccacacccctgcccccttccccctgcatcactgccgggctggactgggggtgggggttgggggaatataagccctggattgggcgcccttatcttgctttaatttcctctagagctcagcgccatgtgaggttatagtagtggccgaccttgtttactctttcctaccggagtataagctccagggggcagggacttcatccccagagcctagcccaggacctgcacacggaggcactcagggtgtttgttgattgaatgaaaaacgttcactgaacacctctgttgtgccgcacacactgtgccagggcgtggacgaaagctcagctgcccaggccattgactatttctgagcatttccactctcacgttgtacacccctcatttctctcttcctggaggggctccctacctgagcgcgggaatcatcttccttcctctctcctggagtctgcctgacttggtgtcccaagacagggactgggtcccctttgagcccctggaggaatgtgaactgagccgatgaggagatgcctcctgtctacttggaggaaagggaccgggacacacagaggcgcagggggctgaaccctcggttccagccccgataactcatccggagtcacgcggttccgggactttgcagaggaaaggggcgcgggatgtgctttgggaatagaattccacctttgcactcggctctgcacctgtcctgccccccggagattccttgagtccacgtggatccgagaggagaagctgttgatcatttcctgtccgctgaggctgtgatccccggccgaccggaccggtagcccggcagcgccctctggtggccggtgacgctcagccagcgccgggaatcgccgcccaggccccaaggaccagaatcaggagcaggatcagggccagggccagggccagggccagggccagggccagcgcgggaggcagatttatcccggtgcacacctctaacttatccctcctacacaaggcaggactccggcttctttcccttttctgtgtatttcaaaaggaatgcacattgagcataaaaaatatatgtaaacaaaaagaagctcccagtcaaagctgtgatactgtgtcctggcaggaccagccaggcctgggtctcaatcccagacctgccatctaccagctgactgaatctgaacaagacgcttaactctccgagccacagtttctgcatctgcagcctgggaatggtgtgctctccattgctgggttgtgtatagatgacctatgtacccagcacctaggacagccccgactgatgggggcaattcttattagacacaaaggagaatctgttaaatgtccttcagtttctgctcaggtgttcccagggggtgagagatgttcccaaagatataactgcctgcctgatcgcccaagcagagactgtatttcccagattttctggcagccagagttggtcacagggctaattctggtccatggaatgtggctggaaatgatgtgtccaacttccgagtcacgccctgcaaaggaggttgtttcccctccattctgcttttccatcctcctgctggcttggaagtggacggtcctggatcagctgccctggagaaaggaaaggaagccacatattgaggatggcagagccttcctgacaccccagaaccactgacatctgcagaaataaatattcctaacccaacgtatctctggatctctttgttacaccaacttagatataatcgtggtgtttcaagtgcatgcccaggagtcttggtattcattctgaacaccagctgacagagcttctgcctttagtgccacttcttacctttagtgtctccccccaccccaccatgcacaaaaaaaagcccctgcaagggctggacccagggaaccctagggatggcttaactccagcctggtcatcccctccctgaggtcacactgaggctggcagccctgccatctggatcatcccctccctgaggtcgcactgagactggtagtcccaccacctctctctgctcctctccccgttccatggcttcagtgtgccaggggctgattaaaggtagtccaacgtgtcagacagttagtacaagggttcttcaatgactgtccaactgcaggttgaactgacaatgaacaagacagcacactagggctcctttaccccagtcaggagggacagagtagctcaaatccatgttttgggagtctggaacctctattccttcctggtactccccagtttaggatatgttgataaaagctggtttagagaaggcaaaaagcaagccccagccccaggtagggcctcctacctcccctagtaatctcaatcttgagactcccacactagggtaaacctgtggaaaggccaattcctgtatggtgaagttgtcaggtttaatttatcttggatgaaagtttagcaaccatccttccttttttttttttttttttttttttttttttttttttttttagaccaagtctgcccaggctggagtggcaggcatctgtagtcccagctacttgggaggctgaggcaggaggatcacttgaacctggggggtggagctcacagtgtgccaagatcacgccactgcactccagcagacttgtttagtctgtttttgagacttaggcttgctctgtcgcccaggctgtagtgctgtggtgtgatcttggctcactgcaacctctgcctctccaggtcaagcaattctcctgcctccgcctcgggaatggctaggactacaggcacaccaccaggctcgagtaatttttgtatttttagtagagatgggggtctcactatattgcttaagactggtcttgaactcctggcctcaagcaatcctcccacctctgcttcccaaattgctgggcttataggcatgagccaccgcgcccgaggatcctggagtttttagcgggattctagctcagagttttctgtttgacaccctgcttttcagagttttttatgtttatatttttaaaaataatttagcataacttggtaaagctcattttaagaaaaataacaaagggaacaactttccccaccgttgggtttccagtctctgtgaccgtccttgttccctccgtactgcctcatcatgacactctgctcaccccgcgtgctgggcagcaaacgagttctatgctttctgtcttgttttcctgaggacctttcctggcgttttgacaggccgctggtacccacagaagcctggaactgagggggcccaaaatcatctcgggcaacaccacccgtttatatcgtaatagcgcaagactccggcgcccgaatcacccagagagccgactggccgagccggggcccagccacccaggccgccactcttcgctgattctcaagagttgcgggtgcaatgagatctggtccactgctttttaaatgccccgggtgcataaaaattcgccttacttagagccttggggacgaagatttatccatggtataaaaggatgcaccttttgaaaccacaaaagtagaaaatggagaaactgaacacagtcggcgttataccagcgtccaacagcaacttcctatatattagatttccaaggaatagcggggcggaggtgcttggccacgacaggaaaaggtagggctcaggggtattgtgacatgctccggagaagggcagcttttccctcccaacggaagcccgagcccagaggggcgagggtgtcgggccggacatggagcagcggcctggggcccagccctgcagggcaccccaggagaggaaggcggaggcgcagccacaggccccggcccagtctgtcgagggccacggccaggtgctgctgatcagcgggctctggaagcaggatgaggacggcctgagcctgcagagctttccaggagacactgcagccgatcagctccccaggccctcgtccgcccgagccatgagcggccacaccagcgccagcaactgcaccgcacggcggtccaagcgctggggcgacagctccatgaactgcgacgactgcccggccacgaagtccaagcgcttcaccaagaagtcgcggcgctcggagcccaaggccgaggacccgcgcgaggcgccaggggctcctcctgggacccccacctccgcggcagaggacacagcgtctgcacgcggggcaccgcagcacccgcctgagcggggcgcgcagctgctcctggtgttgtgccgcgcgtctgcgctcctcacgcagctgctgcggctgcagctgctcctgcaacagcagcacgcccgggaccgacgtccgcccgccgcgctcgtggggatcgtggtgcagccgcagcaggaggaggaggccgaggcgcgccgccgcatggaggccctgctcagccgagtcctcgcgccgcacagcccagccgtggaggtgcacacggccgtgttctgccccggccgccccgagggcaccctggacttccaagcgcgccgccagcaagtgcacagggtctccctgatggatcgggagacgcagaccgatggtgaggggtcggcgcggggaggggggagccccggggcggagaacgctcaaacacgcagccctggaccccgaccctgccgccccgcggggtagaggacaaagccccggagtcacggcctctctcctggcgcctccaggagttttgggtactgttttgggtggtaaggaactagagttcctcccggtgtgctcactggggcaatctcagcgtcagaggtgttcgaattaattcggagggctacgacccccactcactggccccacatgcaacttggggcatcggttcccatgacttggggtcacgcttttgtaaggtattgatttgggactttgtagaaacggggccccactccctcctctccacatcctcctctcccttgcttgcttctttagtcttctccagggaagaataataacactaaaagcacgccttttgtgagtcaggcgctgttctaagggcttttcacctggatcctcatggcaaccctctcaggtggaactccgctagactagctggccgacttcaggattctccttcgcaactcttgagaccctttctgttatggagaccaggcctgtggcccacgggattaatttgtcagtctaaggtccctgggcagtgagatcttgagggagcgccaagtcccgcaacctacctgccagctccaccctgccaggggcagcaggagggactgaggaagtgctctgtgtggcagagtccaaaggtcaggtacccaaggtctgccactctccagctggtgaccagagcaggcatcctctctatggaccagtgtccctcctgtgtgacgtgaaggtgaagggctggttgatgtccagggtgccatccagctcagagaagtcagcttcaggacaaatggtgacacacttattctaggtgcccaggaaaccagaaccatcagagaccttctgggaggaaattttcaccccatcaagaccttattctgactatctaatttccaattcccttcccctacctagtctactgcattttcacatgactggcatccctagttaggaaactcccttgcccatggactagtccagctgtgatcctcagccaaggccagagaagtcccagtccatttttgaaaacacccccttggtgatgaagccttggaggtgcctgatcccacatgcccacctgcccccatcacagcttcctgctgtcgcagcttcctgctttctctgtcctaactttacctttattcagttccagcagcttgcattaagcccctactctggactgtggccttctgaggtttccaccatctggggttggggaatgagagggaaggcagagacagaaataattctaatgccgttcagaatatgaccagtctcatacaaagaggtgccccggagctcagcagcaagggaaggatggcttccagttggagatctcaagaaaggctttttttttttttttttttttttgagatggagtctcgctctgtggcccaggcttggagtgcagtggcgcgatctccgctcactgcaacctccacttcccgggtttcaagcaattctcctgccttagcctcctgagtagctgggaccacaggcgtgtgccaccatgcccagctgatttttttatatttttagtagagacaggattttgccatgttggccaggctggtctcaaactcctgacctcaggtgatccgcccgcctcagcctctcaaagtgctgggattacaggcatgagccactgtgcccagcttagaaaggctttatgaagagatttatccacttgagatagggcttgaccagaaaatgctttggtagaggtgcagagagggatgatagaggagaagggcttctgaaaatgcaggaatgttcagcctgttcatgagatctctgatgttcacggttagctagagctggacacaggtagtagtagtggctgataagcactgggcagtgggctgtggctgtattatggaagagccaggcttcctgtataggaacaggtgctcaaacagaaagcagtggggccaggcgcagtggctcatgcctgtaatcccaacacttacggaggccaaggcaggcagatcacttgaggtcaggagttcgagaccagcctggccaacagagtgaaaccctgtctccactaaaactataaaaattagtcaggcatggcggcgcatgtctgtaatctactcaggagcctggagcatgcctgtaagctactcgggaggctgaggcaggagaatcagttgaacccgggaggtggaggttgcagtgagccaaaattgggccactgcactcctggagacagagtgagactctgaaaacaaaaacaaaaagaagaagaagaagaaggtgggggctgcagggaagacgttctagcaaggagctattgagggaccattcttcctcattcttctgggacaacctctttccacaggtgccctctctctgcttcttgggaccactcttactaaagaattcacacatatttttgctgctgccacagagaaattccccactcctccctcggcctgccctctgtgcttcctccatctttctacaggaagacagagactcattctctgtgccctgtttggctccttctggtaaaatggaatatttctttcattgctaccaggaagttctacctatatgtgtctgctcctatctgattcatttacaccaacatggcacaatcaggggcaatgtggacacacacactcctaccccatctctaggggacatttagcaatatctggagacattttgggttgtcctggggtaggggggagtaaagactgggtaaagaccagggatctggtaaacttcctacaatacacaggatgacccgccacaacaaagaattactcagcccaaaaatgtcaacagggctgaggttgaaaaacactgatttaaaccaggttgaggccctcggccgaagcccattggtacctgaaaatccaactttgcagagattaatgccttaggagttcctgagctgtctgctagatctcaacagggttcccggcctcggtttccagtctctctgattctaaatggagtcccctcaagggttccattgctcttggcttcaggaaattaccagcttcatacagattcacttgctcccagagcctccttaggccaaggtcaaccaaacacaacccaatactcttgagctgagcttgccttcacttctgatccttcctgcctttgttttcttcaatcttctcgctcagggaccttttttttttttttgagacgagtctcactctgtcgtcaggctggagtgcagtggcacaatctcggctcaccacaacctccgcctcacaggttcaagtgattctcctgcctcagcctcctgagtacctgggactacaggcgtgcaccaccatgcccagctaatttttgtatttttagtagagacaggttttcaccatgttggttggccaggatggtctcaatctcttgacctcatgatctgcccgcctcagcctcccaaagtgctgggattataggcgtgagccaccgcaccaggccactgggggactttttaattcattatttcaaagcctgtataattatctgactccctattgttttctgggatcatgaaaataatgagccccaaactggaatttagtccttccgatgcccccagccagctgtgtgaccctgggaaagtaacttaatttcgctaaacctcagtgttctgaggaaaggtcatcattaaggtatttttaggctctagaagccctaaactatgtcctgtcatttcagagttcatgttgggtctggctttgtgtggcccaaagccccccatttttttttaagacagagtctcgctctgtcgcccaggctggagtgcagtggcacgatctcggctcactgaaagctccacctccaaggttcacgccattctcctgccgagtagctgggactacaggcacccaccaccacgcccggctaattttttgtatttttagtagagacggggtttcaccatgtcagccaggatggtctcaatctcctgacctcgtgatctgcccgcctcagcctcccaaagtgctgggattacaggcgtgaccgaagccctttttatctgcataggtctgctctaaaccttccgctggggcaggagctcctgcgcttgccagtcccacactcacccacctgtgacacactggcgatgaaagcagtctcctcaggtgaacacattttatgttgcagtcacagtatgagcttcagattgtcttttaaaaatacttttccttcttccatcctaaaacaaaaatcacatttaatgagcacattaaattaattaatctagagaaagattcagtcacctgtttaacccaaccaattggggtttgggagatagtctgtggttgccattgccatgagtttgagacaaatgttagttttctgaacagctgttatgttctcagggaaaattatctgccaaatgcaaaggttcttataaaagtcaagtcaacccccaaactcccctcccacagtgcgggagggcaggctttgggggaaggggtaagctactctgagatggtagcaggctctgggccatggtaaagccttcgaagaagctccaaatcttcaggaagctgacctgaagatgaatgcgtggggaacatggatttttgaggtgtaggagtagggggtatgtggaagccagtgacagagctgagcgtcacatccagggtatcttagagcaaaacaggtagctcacatggacccaggaacacgccagcagagaggtgtctgaaggcagcgctcaggtcgcagaagcatgaggatctggctgtcaccagccccgtagccagggctgtgaggaccagggcagccgctgtcccctgcctagcctggcagcctgggatgaaggaggacaccaggctggtgtctgcagagaagactgtcccttgaagccctgccataggagccaccctggcttttatgacctcacaggaggtgtgggtcactgttctctgtggggcctgggtccagctggaggcccgagccaggctcctagggcagagggcaaacggcccctccaggagggagccgggagattacgcagctccatgtaggtccacgtttaggttgggaggatctaccatgaagaaggtcaagaagaaaaggtcagaggccagacgccaccgagactccacctcccagcatgctagctccaattccacctctcagcagcctagtcctgaatccacaccacagcagcctagccctgaatccacaccacagcattccagccttgaaaccacctcccggcagccagcattccaagcccttccagcacccgaaatccgccgctcctcttgctgccttttatctccagatgctaacgtgaaggcagcccctcaatccaggaaagcaggtgggctgtcttctagcttcagcagttccagccttcctgctgatggagttctgggtcatcccaaaggctggttcttgtaggatagtgatgcatggttaacgtgtatcctggagctgtgctgtagagtgggaaggtttttgtttttgtttctacccaagagaccaggattcctgggttttgtcatttctcatcatcctgagtctcactgaagacagccacacatacatataaacatttaacttggttccatagtaatacttgctcactaggaatcagcagtgccatgcaactgctaaaaaataaaaaccaaggatgcatttatagaagtatatggtttagaataagggaggtgatgatactgctttattctgtcctcatcaagctatccttttgggctgtaaaagatgcctgacaaactagtccaaggaagatagtctgggttgatggaggatgagaaggatcagggagaccatttagtgtatgacagtcaattgaaggaattggaggatgtctgtctgtcaagtggaagatgtgaatagacttgttccttattgtcctcagagatctaagggtctgatgtggtttggctgtgtccccacccaaatctcttcttgaattcccaggtgttgtaggaaggacccagtgggaagtgattgaatcacgggggagggtcttttccgtggtgttctcgtgatagtgaataagtttcatgagatctaatggttttaaaaaagggagtttccctgcacaaactctcttctcttgtctgccgccatgtgagatgtgcctttcaccttccaccatgattgtgaggcctccccagccacgtggaactgtaagttccacaaacctctttcttttgtaaattgcctagtctcagatatgtctttatcagcagtgtgaaaacagacaaatacaggcccatggataggatagccagacaaaatacaagactctcagttaaattttaattttagtaaacaacaaataatatttttagtatgtgtgtccccagtattgcatgggcatcctatatttttatttgctaaattagcaatcttacccatggaagacattagtgacagaaagccttcggctcaacataaaaaacttcccaacaattagctctgtctgaaaatggaatggctgtcaggaaaagtggttccctgtcttcttgggagccaaacagtgtctgtataagcattggattgtgtagagggaattcaagtggagttcaggaggtgggctggtttatactactaacaataatggtgatagcaaactaacattatcactaagcatttactgtgtacctagcattcagatcaggtgtcttaattttcacacgtgataatcctataaaagttcttccatattatctccattttatagatggggaaactgaggctcataggagtcaaacaggttgctcctgagcagacgctggtagccctgagaagggaaacccactctattctgactccagaaccctcactttaaaccacagcactgacctttccattccaagaggcctaggagtctccacaagaggaagaacatctctgtccgagcatctcctggatctgccatgagccagtgcccacgactccatagccttgaacaggccacactccctgggccacagtttaccccccgggattgtgtgggcataaaataaataagtgatggagatgagagtgctaaatataaggcatgccatgccaatgatccttccatggccaggaatcaaacctttcttgacatatgatattgattttgagcaccatactatatgttgtaaagattgtgatcatcagccagtgagagaaacatttctgggttatgatcttcagaactggcatcttcagtactggtagaaagcaagactttccattcccaagtcttttaatgaacacatgtgactcatactcagagaagaatttggcccattgaacaggcaaagcaagaaagcaagaaatggtggtggctcgccagtggttacagcagacaccctatacttcttccaaaggaattctctgcgtagaaaggaatgttggagatgaaggatgagggcctgcaagtaaagcgtgccattttctaaaatccaagcctttttgtgtgcagaaatattgtagctcaagaaaatgccagtcttccactaggatgggtataatcagaaggatggacaataacaagtgttggtgaggatgtagagaagctggaatcctcatacactgtaggcgggaatgtaaaatggtgcagctgctgtggaaacagtctggtggttcctcagaggaacatgaagttaccttatgacccagcaattccacttctcagtatacatccaagagaattcgaagcatcttattaagcatattagaagcacaccaaaacttgtacacaaatgctcaaagcagcagcatttgtaatagccaaaaagtgggaacaacccaaatgtccatcagctgatgaatggataaacaaaatgtggtatgaaataccacagtacaatgagtatggtgaaatactatttggcaataaaaagagatagtgtcctgatacatggtacagcctggatgaaccttatagacacttggctaagtgaaagaatccagtctcccagaaacccacacatcgaatgattctatttacatgaaatgttcagaataggcaaatgtattgccagggactgggggaaatgggagagtggggagtaactgctcatggagatggggtttctttttggggaaatgaagacgttctgaaattagtggtgatggccacaaaactttgtgaatatactaaaaaccactgagcactctaaaagggtgaattttattgcctgggaatgatatctcaatttaaaaacttttttgtaattaaaaaaaaagacaagtcttgcctttagaatcccctctcctcattccgggaaagtacgtgtcgtgggcaagtctaagcagaaagtgtattgaatctgccaggttgaccacctgtttcatgcagcttagggtcagaagaatctgtagctctgtcaagaagacgcagggctacagataggaaacaggagggaataatccagccagaaattatcttgcccaaccacagagggcatcatctacattctgctgggatccataccagaggaggacagaaacagaaaataggatcgggactggaaactagagctgtggttgtcttctggatggatcagaatgctctagatcaatggaacgtggcagctccaattccaggaatgtcagtgcagcctctcctgaggtgagcagtcacctgaaattccattttcactgaattaaacgtgagaaagcctgagttgagaaagccaacttctgtaatctactccccaaaagggcatatcccttaaattagctgagcctcagtttccttatttgtaaaacaagaccagcagtatcccctttacaggattactgtgaaattaaatgagatgagcatgctaagtgcaaagcatcctgaaggtgtaagccatggcaccatcagcaccacctccatcatcatcatcgttgttgtcgtcgctgttgctactcccaggtagcaccagtataaaacagccattttcccatgcggtcagtcttctcttctgtttggttagagaacattttgtgggagaactgccttccttaggtagttcagtcccaaatcctcaatgatgccttggaaaaaatccagcgttcgccctggtaatcctgcagctgctgccgttgtggggggccttctcagactgtgttccagactcccccgccccagcctcccagggcaggtgcctccctcacctctctccttctgtccccacagggcctctgattcgcgccggcccgcattcctgctcctgtgccacttgcccctgcagctccgcttgctggcgtcgtctggggctatgccatagccgcatcttcgatgtccttctgcctcgggactggcagatggcgccagggagaggactccccaacctgctcaccttctacaggttccaagcgcgaggggctggagcctcggggcacacagtccccagggccaggctctgcccccagaccttattagcaatcatgtatcacttcctcttgggaatcccaggccgaaggaaagcctttctttccctctttgctttgcccacttcctggacgttggcaggcagggccctttctgaccggccccacccccggggtacccaccccgcctgtacagagaggtgccagttttcttcctcactgggattcctcctcaggggcttcctttttcttttctccagagatgccctcccctcctcagaacactctccccctcagcccttcacagagtcgctcaggagctttgtgtttaaacactgtttggccatgcacctccgtgggccctcagtggcctgtgtcataggcaggggccttaggttcctgatctgcctacgaatgtcgcccagaatttaatgataaaaaactacttgtaactcatatgcctcctccacacaatagcaagacgtcagcccccttcagactgtgctgggctctttctgggggtctccacagggaacatctgcccccaggctggtctgttggtggcggcccccatgacatcacccatagtatctgtccttccttcctcttcccaaaaagccaccaggagcagtgtcatggctgccaccgccctcataggaagaccccatccatgcagggaacagactggagatgttcccacgtttgggcgctgctaggttacatgcatgggctgggagaggggtcgccatctgccccacctgagggcctcacagatctcaatggaagaggcccttccacttggcgacctcacacccccaccccaggaactgaggccccccaacccccatccttgtcctgttcctcttcccagcctcttccctacccaatcccctctcctttctggagctgaaaaactccatctctcctacacatggagataagtaaatagataccggggcgtgtggggagaacacgcttggagccaaaaatactccaccacccagtaagctccgtcaaggaaaggtctgcctgccaccgttagccacaccctgcccacacgcttagtacttccatccatccatggccaaatcgtgccatgggttcatatcgttttaaaaccagcaagtgttattgagggaaacttactatgcagaggacatggggcactgtgagggaaaccagaacagggaactttacccctaaaattgttgcagtcgacatggagagctaagacccatgcatttagaaaccaagatgcaagatgcaaagagccttgtgtcctctaggagaggctccaacaggaacctctgaaaggttccaacaggaacaggctccaacaggaacctctgaaaggttcctgtcaacagcatgtgagccgagtccagaaggatcttgaagtcctctctggcttaagatgaaaagcgggagcaatctgggtgcaggaaaaggcaagcgtgaggctcagaatcaggaaagtgagcagggagagacagggtccatatctggccagggcaagacatgtagttttaattctgctccaattttagcactggcatgcttttctcaatggagtgtaatgttggctcttggctttcaatccacattcacattaaacaagaatccctatttttgtaggatttttatcaaaacgggtattgcattttttgaatgccctcctcacaattattgccttagtcatgttttccttgcctttgtgtgggtgtaatatattatttcccaagttcctttctctcaatggagtgaagtgatagaacttacctcatagggttgttgtgaggctggaagaagacactgggtgtgaggtatttagcacaaggcctggctcacagcagacttgaccaccttcctaacctggtccccttctgagtgttcagggcagctagcatcccaggccagctcaccctccgatcctcaggggtctttcagtagggacttgttggaaggatgggaagaattaaatgctctcctaagaggagtttggagagggggaagatgggtattcctgcaatcctgagggggccacataatttccactttctcctgttcgtagagaggcactgaagcccagcttcccaccacccccacttctgctttgctctacagaaaatcttcaagaaaaccctccagtcatcgtaacgcgtgtcctccaagccctcggaactgtggctgtggctctgggggctctaggagctgcctactacatcactgaatccttgtgaacaagcccctaggcccacagtctggcaggtatgttgagcgctctgtcccttcgaatggaggtggtctcttcaggtggaccaagccccggcctctcaagggaagcttgccagtggagtgactccctcctggcctcagggtcagccggcatggccctctagggaagacctgatgctctcagatgacgctagactcattattacaatcatctaaacagagcccccacctcctctgccccgggatggtgtccctggtcatggaccctggacaagaggaaatgggagggatgggggcaaaggtttctacccatctcggacctttcttggaactttctccctgcctggaaagcttgtctcctacccagtcctaccagtccatcacccataaagcccccttcttccatgaaacctttctccatcttcccaacttcaatgacgtcttccatcttctcaacccctgtcctctccacctgtgcctcctgtgttgtggatgatcctgtcgtttgcctgtggcctgtctcccatctgtcctgcaagacccctgagggcaaggggcatggctcatgcagccatcttccctcatccctggaagcagagcctgagactggggttgaatggacaggtttattgaggaggtgctctcagggagtgagggagtgagggaggcaagaagaggcaagggaaggagctgagaggcaggaggccagacctcagcttgaccctgtgggagccctggaacaagaatgatgacacagagttagtctcagcagaggggagagacttgccctctggtgctcctccttgtcagtgctttggctctgagtgttgggtagggactgcatgtctttgtggaaagagcagctccctttgggctgagggtgcttccctagaggaggggcagctctgagctattagcagcacattcacaactcacaggagttgggcagtggatgcaccagcccaaaaaggggataatcgtctgttttccttgcctttgcagtgggcgtaatatattatttcccaaggttcctctctcccagtggagtgaaatgatagaacctaccttgtagggttattgtgaggcttgaagaagacattgggtgtgaggtgtgaaggtctgggtggggtgccaagaactgccacgatgatccccttgccatgtccacacttagcaaatgcttaataagtgacagtggggatgatagcatggggataatgagaaacatttcaacccacttccagacctccaccagccccaggagttgataggtgatggcgctgggagaagatgttcagaatatctcaaaagccaagtccagaaggtaaactccagggagagctcactatcccctcatgtgctctgtgataccatgtcccatgtctgtggcagaggacatagtagttccttagctgctatgctatttcctgaggcgtttcctgagtggcaagaacctcagtttcctcatctgtaaatagggaaaatgacagtaccttcctcttgagcctgttgggagaggtgagataaggtgttagaggacagagctcactgctggggggtcccgttgctgttgtcaacatggaggtggtgggaaggatgccagctttggagttagagctgccggctcctttcttgactctgctgcctgatagctgggtgttagagacacgtttcttaatttctctgacagtgacatgtctagtggggacaataataactacctccacaggcaatggttttgaggattgactgaggggatgtgtggaagtgctgagcacaggacccagtgtcagggatgggtggatgctggccactggcaacatgacaaatgcacccgagttaaagcattttctcttcaaaattccttgcagcagaacctactggttgtgagctggagttctggaggcaggcaggcttgaggtcagaggcctcttcaatacccagtatttctgaggcctggggcaggttccctaactcctgatgtctcattttcttttcgttaaatggagataatcatagcacagatctcattggattgttgggggcattgagtggaaaaaatgcatgtaaaacacttagcacagttcctggcacaggataagcactcaacatagctacatcaccactactaccaccactgtcagcaccatcaccatcaccaccaccacctacctcatcaccatcacccaccggccctgcacctggcaattctgcacatcccttcaattaatctttacaaccatcacccttggaggtagttgtcatcaacaccattatcatcatcatgataatcattaccatttgttaaatcagtgttcccctaattttactgacttttgatacctgtaaaatcacttaatatttttctttaaatttgcttactttttggctgggaatagtggctcaaacctgtaatcctagacctttgggaggcccaggcagggggataacttgagcctgggagtttgagaccagcctgggtaacataccaagaccttgtctctacaaaaaaaaaaaaaaagagaaagaagaagaaaaaaagattaaaaaattagccaggcatggtcgtacacacctgtaatcccagctatttgggaggctgaggtggaaggattgcatgagctcagcagttggaggttgcaatgagctataattgcaccactgcactccagcctgggtgacagaactcatgagaccctgtctcaagaaaaaaaaaaaaaaaaaggccgggtgtggtggctcacgcctgtaatcccagcagtttggaaggccgaggcaggcagatcacaaggtcaggagatcaagaccatcctggccaacacggtgaaaccccgtctctactaaaaatacaaaaaaaaatagccgggcgtggtggcgggcacctgtagtcccagctactcgggaggctgaggcaggagaatggtgtgcacccaagaggtggaggttgcagtgagccgagatcgcaccattgcactccagcctgggcaacaacagcgaaactctgtctcaaaaaaaaaaaagaaagaaagaaaaagaaaagaaaattagcttactttttaactggccagggaagaactttagccaatgaaagctgcccgggcacctgtatgagagtcactgtaggggagggcgatggaggtgcatcgtgggggtacattaagtcgtgctgatcttgtaggctcagctcttaatcaacaggcagtttgatgtccttccctgtccagagagtgaagaaccatctgacgacagtgacatctttcctttttggggaaagatgcttctagaattttctttcctaaagtttggtgaacctctcccttggcatcttcctcagctgaaggtgaggccctaaaagcaaaggacttctttcccagccattttgggcgttgaatgtggtcaaaccactgcagtgtagcttttggggagtgagactccatcatagctgcaggggcccccggggaaggcgctggcaccgatgagctgagcaggagccaagcctggccaggcgcctggcaaaaggcattacagcctgaggtgtgtggctgaaagaaggagtgggtgcaaggaatggaagaaatttgaatcctaaataatttatttctccacggaaggatcacagctgctgaagcctcacctgtgaggctgtgaaactggaaagccaccaggattccaggtcacacggggtattgtctaagctgattggctctgtccttgtttttcttacagatccagtttccatcaaagggacctctcttgtcaccaaaatttaaaaaaagaaaaaaaaaacgagttctgtttctttagcatgttttacttagagacataaaagttggacttggcaaatgactaggaagggaggtctgggggccccagtgaccttttgggccacaggtcaagcagaactggtgcctgtcattcctgttcagggccacagacccccggtggagcagctttctctgcacacactcacagaacacagtgtttgctttagattttctcactctaaaggaagggattataaagcttaactcaatagctaacgtagttagtcatctgcacctctgtcccagggtaatcccagttactgggaataggaggaatgtgccggttcgcctccaggcctgcaccccagaggacagaggccctgtgcccaggaacactgtctctagaaacagcttcttttagggtcacctgtgatggggagcagcctgccatgcagccttgtgtttagtgctagtgatgtggctacacccagccagtgcctggtgcgattctacctctagctcctgaacaggcgactcgaaatcttagttcaaggtgatcccagcaaacaccaataggggagaggagtgtcaacgagggaaggaggctgggcctggtggctcatgcctataattccaagactttgggaggccaagacaggaggatggcttaagcccaggaggtcaaggctgcagtgagctatgattgcaccgctgcactccagcctggacgacatagcaagaccctgtctcaaaaaataaaaataaaaaaaaggaaccaccaaagaagggaggacagccagtactagtgagtcctaatgcagtggccattgagggcagctgaagcctgatcctgctggggcgtcgtgggatgggagaatggagaacacacaccacacagcatagtcatcccacctgacagggagctgaggcatttgtaacctgttggtcttggagaaaggctgcgaggagggaggtggttaattcctccacacttttgtccccttctggagaggaagcccccaggcaaagaagtgcagatgcgaggtttaggagtcagcccgcatgcactggaacggtgacagcggcatatggtgtaggggtggagggaggacaatgctgaatgcctgtgaggcatccacagacccatgcccaggtgacctcctatgactctaagaattagttagaccgggacccagcagggcagccactgggaaggcagggagctggtttacccacaacagcactggtgggattgggcaggatgggccaggctggagcccattccccacccctcagtcccaagatttcctttctgaaacaggtgtgggagttgcgtggggtcgtgttgtggtcctgtcctgcaggtcacaatgaagggacctatagacatggtggaagggactggggactccatggctgcagcttctggactgaagacacttcctttttctggcatattgaggtccccctttgttgtaaatgttggacaacctaacccaaactaggcttcagcaaaatgacaatgtattagctcctataaaagtcaggagagagttctggttcagatgtggcttgctccaggggcacaggccatttccctctctctgtagcagagttagttccattctagctacagcagcaacagctcccagcctacagagatcaagtctagcagagagggtgagccggcctgtctccccacagcaaacggcatcacagctctgactaggtcctgtgtccctcctggtacccatcactgtgcccaggaaaatgcagggggctgattggccaggctggagctgcacagcctcctttggaacatgaggataaaatccacagaaacagtgagcactgagcagggaagaaaatgattctccaactgcagtgtgggtaacctgttaccaaaagagatgggaatggacgctgggcagctaaaaacagcacatgctccctccagttggctgtgggtctgcatccaggacctgtgctctccctctgcttctccccgttttcctccaccaccaccacctcaccagaatgaatgctcaagtggccaggagagagaactcccagctgcctcaagcggcagacttgcagcagatcctggcagttggatcccccgggcagtggtgaaaactagccttccatccccggggaaatgtgtggggcgctgctggttgtcacagtgacggggggatgctgtgggctgttagtagtgaaggccaagaatgcaatgcacaagacagaccacacaataaagaaccatcccaccaaaaccccaagagcatcctcccggacagtcactgtcacctgggctcatctctcccacactggccttgcattgtggctcacgttgcctgtcgtgggccatagggatccctcttgaagagtggaaactgcacatgctaaacgaccacatgccggagtccctgtcttcatcctgccgagtgcagttctgttgacacatccgctactctgtggttaggtcctggaggcagagagcaggttttttcttctcaaatccttcccagcacattgcagactcatgaatgagtagacctgtcaccctcgggagcactttgggatacattaagatttggcttaggccattgtattcagagtgtggtataatgagtgagtgtgatattcagagtgagtataaatgtgatcactggagaggactattttaagtacagtcaatttcaagcaacagcccctgataggggctttcaagagggaagtttagagctggaaagaagagtgagcaggtatatttcctatcaatcaccatgcaataactaagactgctgtggctgtgagtttggggacagcctggctgtagctgagcctgcaagttataggggccaaggccctttgtcctctaaaggttcactgaaaactcatatgaggcaaattgattaataggagaaaggcatacacatttatgtgtacacatgggagccttcagaatgaagacccagaggtacagaggaaattgtcttcatgctgagtttcaacaaagatggacagccttgtagaaataggactggacaaaagggtcggatctaatgctaatagactatgtggggaacccagcaaggcctgtctgtctagattcttcttggcctctctgagcagcattccttcctctggggcatggggcaagatcttctctggaatgggggtcttatgactgactgcaaacaaggtaggtcagatcattttgttatgaccagttcttacacaaggctgggggaaaattcaagtaatacttttaggttttctgactagctctggggagaatgggttcttgtttctatggcatcttgggaaaggattgagtttgtatggctagccttgggggagatgggactgagagataggagggcaggagaagatcacagaaaactttcccttctgaggccttcattttgaggtattattgtctaagctccagcggagtctagcatcttcaccaggctgagctcagaccctggctctgaacattgtctcaagaccatcaactggcctggtgcagtggctcacgcctgtaatcccagcgttttgggaggccaaggcaggcagatgacttgagcccaggaattggagaccagtctgggcagcatggcgaaaactcatattttgtatttttctaaaaaaaaaaaaaaaaaaatacaaaaattagcacctgtagtcccagctatttgggtggctgaggtgggagggtcacttgagcctgggaggtcaaggctgcagtaagctgagatcgtgccactgcaatccagcctgggtgacaaaaggagaccctgtctcaaaaaaaaaaaaaaaaagaaaagaaaaagaaagccatcaatcaattggttattatgttattattatttatttatttgaggcagtcttgctctgtcgcccaggctcaatcttggctcactgcaacctccacctcccgggttcaagcaattctcctgcctcagcctcccgagtagctgggattacaagcatacgccaccacatctggctaatttttgtatttttagtagagacggggtttcaccattttggccaggctggtctcgaacttctgacttcaagtgatctgcccacctcagcctcccaaagtgctgggagcctccgcacccggtccagttggttattcttgagataggttggtccctgtatagtgatccatcgaagtgcagaagaaagtccaggaagccccatcctcctgcagctgcctgtctggtctgtccagtccactgtgccagggacacaggaccagatgagaggtccttggcttttcagatacaacctggtctccatcctccccacccccacccttgaggacagccaccctcccactggccatgaagcctggcacccaggccatcccgcagtcacagagtaagtaaataaccaggatccagggaaccaaactgccaggtaaaggcagccatgagactcaggggacacctgccatgcagcctgtcctgccaaggccccaggctcagggccatgttggagtcaatcaggcctgcagccaccaatgacccatcagaggaaggacagcacttcaggctgctattacaggctctggcttcactgggaaactcaggaagcctctccatccccaggcagctccccctctgtatgtgcaagcacagcatatacttattacacctcagccagtcacagggggtcgaagcagagatttgaactggaaaagtgcccttgccaatgtcccaagatgcattccggtcctaagccaggaggaactgagctgcgagctagcgaatgaggaggacagaggagctggaggtgcctgtttgttgggagtctggaggaaaggaggtgccaatcaccagcggcaagaaggaaagtgtccaaggcagagagccaggttggtcccagcggcagggctgagcgagagatccaggctcagactcctccaggaggggcctcgaggttgagaatttaaaaagaagagttctgttcaggtctgcgggtgtctgatctcatctgaggagtgcatcaaggagatgaatggagaagcccacttgtctcccattggggtcaggatgaagggtctgggctgaccagctccagaagaagctcacctttcgagaatgagttctcctttaaacctttctcctcctctgttctgcccttctcctgcctgccactgccagcagtcaagaatggactgtgtataccatattctggagaatctgattataccctggacactggtgtgtggattgcagtctgctgcaggatgacattagagtttagttgtttttttctaatggggctccattctgtgtgtctggtaggaggtgcttttaatgtgctgataaaccaacctcaggaaggtattatgtacagaagattcccaaggctgctgttgctgaaagagacttgggctactgccagggaactaggtgagtccccgtagctgaacagagctgcctaagagaagtggaatagaggatcatgtggtgtctgttttgtgcctttagtgatcggtgtttcatatgtatttggggatgttgctttctctgtgggaacaagcaaaagaatcgttttgttctgatgaaattaacaatgaatttggtgaaagaaacttccaactcccttgcccatctcccttcatcccattcatttggcaaaaccacaaccctggggcaaatccagttctctgcctcctgcgcacttggacttgtgcagctaaactttgggaagctcagccgtgcaggccagactcgcttgaaattcatgaccatgggctccaagtgggccttgatgctgccagggatcaaatcacattttattccccaagacgcttctcttctgtcctcagacttaccccttctcctccctgcttcaccagacctccaagactcaccaccgagtctccccacctaccagcgccctcttgagtatccatcccccttcccccaaggcaatgactgatttgattgctgtcacgacagacgcatagacacatgattttgcatgttctagaaactaacataaatggactcaatcagtttggactttttttacctggcttcttttgctcatcataatattttaaacctaaatcatatttctatacatatcaatagtttattcctctttatttctgagaagtatttcattgtgtgaatatgccatagcgtgtttatctactcacctgttaatggacattcagattggttccagtttttagatttttttttttttcttttgagaaggagtttcactcctgttgcccaggctggagtgcaatggcacaacctcggctcaccgcaatctccacctcccaggttcaagcgattctcctgcctcagcctcccaagtagctgggattacgggcatgtgccaccatgcctggctaattttgtattttcagtagagacggggcttcaccgtgttggtcagtctggtcttggactcctgacctcagatgatctgcccacctcagtctcgaaggcatgtttttaattgtactggcattttatcttggctaatttgctgtctattttattaacttttttggttagttaatatcagacataaaataaagggtaatttcttttttttttttttttgagggtctcactctgtcacccaggttggagtgcagcaggggcatgatcagctcactgaaggatcatttcttggtctaggctataggctggccttagaatcaactcacctggtgtcctattgtcagggacatcttaaccagggtgactgcacctcgaataaaggccagataaagccaaacttgctgggttacattccttgggggttagacacccttcatcacaagatgtttgtagctcaaagaaggggttaatgatgctaactagagacccagaacgtctgaaaacgtcctgatatttaaagaacaaagcatccttcatttgagaataagtttcactttaaaggtaatagtactctcataaattcttgctgaaatcaatagttacataggaaaataacaatgctaatagcctgtcacaagctgatcataagcctttgtttataaagtctactattcttagccttaacatcccatgtaagcaagtgctatgtttcagttagaggaattcctcctcttgctttctgaggacaccctattctgtaatagagtagtttctaataaactgttttatctttgctatgcactgcgactcaccctctttcccacatgaaatccaagaactcgctcttggggtctggagtaagtctcctttttccagtaacactgtgtgtgttcctggctttgaggggcatcctgggggacggaagctgcccatctggacccctcagctctgcaatcccaggtgcaagattgggacagcaacctggtggcatcgtggggctcctctggtactctgctggtctccatccttccaaaaggacacccaccaagaggctgacacaggccacagtgggagcactgggaggactgtgtgtttgtagagggtgagaatgggggagaggtgttggccaaacacttccatctttctcacagtgacctctcaaggtagccccctggggtaagccaaggaccttcagtgggctcttgtaatgggggtcaaagccttttgtaggtcgggtgttaaggtgcccttccttctcaaggctctctctgcctcttcagagcaaagatgatccagggatgggccaaagggagcaccagcaaaccctacagggagtcccaacttgggagagaggggagcaccaggaaatcctacagggagtcccaactgaggagagagggagcaccagcaaatcctacagggagtcccaactgaggagagagagagcaccagcaaaccctacagagtcccaactgaggagagagggagcaccagcaaaccctacagagtcccaactaaggtgcgaaggatggaaagaaagggagtccacctgagtggctgggactatcagcgcccgccaccacacccagctaactatcgttttggcttttttttttttttttttttttggtagaaacagggtttcaccatgttgaccaggctgatctcgagccacctgccttggcctcccaaagtgctgggatttcaggtgtgagccaccatggcccgccaggacctagtctttggaatgccaacgcagggaattaggggaggtgtgggtggtgaggcatagacagaaatgccccgtgtaccaaacagctgggctccgtcctcctgcactggccagcggcctcccttgcaggattgacccacaaggtcgtatcctagaggcaagaggaggcagcaaagcctggaatagaggcttgtggaattggaatcaggccgcatgcttaactcatgcaaagcagctccctggaaacctccagaggagaagtgactcaacacacacgtcccagaccctctgggcccctaggcaccctcggcctgcagctgtgggggcaatggaaagtgcctcctttctcttcttccccttgcattattcacagggagccacaaacacagaaaggcctcattcacaagctccaaggcctggccctctacggaaagctttctgaaaatgcaaatgtctcagaagtggattcttcttttcaaacactttaaagtggcatattcccacggagctgtgaagcagaccaagatttccctgggcaggagactccttaaaaataacatttgcatttcaaggaagcagaacttccagctgtgaagtccggcttgaaaatagaaggtgggagcctcacctctttgggcatgggcaggcgtgaagcccccactttccctgtctgtgccccatccccaccttggccttgcctcctccatcctttcattcagtgctagcttaggagtgcccatagtagccctgggtgactggggactcacaagacagaactgttgttcaccagaagctcaaatctaatgagccagacaagcctctaaatgagtcaattccacccccattccagggaccctgggcctgcctgttcccttcccccatagaaccaagaggttctgggttcagctctcctcagaggagcagatctccactgcggtgaaaagcacgggtcatttctgtctatgccccaccacccacacttccccgaattctctgccttggcatttcaaagactaggtcctggcggggcatggtggcttacacccaaaatcccagcactttgggaagccaaggcaggtggatcgagatcagcctggtcaacatggtgaaaccctgtctctacaaaaaaaaaaaaaaaaaagaagaagaaggttagctgggtgtggtggcgggcaccaatagtcccagctacttgggaggctgaggcaggaaaatcatgtgaacttggaaggcggaggttgcagtgagccaatatcgtgccactgccctccagcttgggcaacagattgagactcttatctcaaaaggaaaataaaaaacaaaggctaggtcccttccctggcttctgactcaagcctgcagccaggccttctagggggcccctcccacccctggaggcttcccctggaggagcgggtgccctctcctctctcctctcaggcatcagataggattcaagctgagataacccaggaaaacaacagactccttctctcctctcaatagctttcccattcaccatcaagacatcactcagttaaaatgtacatttccccaccctgatgatacaggattttatactacatatttgttgtctgctttttttcccacttctcaaagaaatctttctatgtaatatctcatttttaaacagctgcatggcgttgcatcatatgcctgtttcgtaattgatcaaatgagattctacagagcttaccttagtgcccatggtactgctcaaagaatcctggctacgatattagttagacccatttacagggagtggggaacctagctccatctggcttagacaataggggaacttaatggtttatgtaactgtaaagtctaaagataacacaggctttggggagagcttaatctgacatgctcttttctttcccactgcccccctttgccttccgtggtatcagcttccctcccctttggttgtaagatggcagagcctggcacagagccaaaagcacccacgggtacaatgggactttgtctacatccggagagagtgcccacaagcctgtgaatttcccagcattctgagcaagagtcctataattcactctaattggaccaactcagttgacatccccaccaatgactgggccccggggaactgggaatgtgttgactggctgaggccatgtgggggccacctaggggccacctgtgagtcagatttggattagcttcccttgaagtgagtaggctgtgtgagagaaggcagaatatccgaatgaaaattacattattttagtaaagaagtgtgggaaaccaaaatatgccacccaaaaatattccttggcatattttgggatggctattcagaggggctgcagacacaggatagctctggaaagctgtgtttttgtggggagttttgaatctgtagtagaaatctacattagtgaagtaaattgtggatgcaaacaggcttcctctgagacccctttatctgccttatccagatctctcaggagaaggagattagaagttctgacacttttaaaggtctgatagagaaactttttttttttcttttagacagggtctcactctgtcacccaggttggagtgcagtggcacaatctcagctcactgcaacctccgcctcccaggtttaagccgttctcctacctcagcctcctgagtagctgggattacaggagcacaccaccccgcccagctaatttttatatttttagtagagatggggtttcaacatgttggtcaggctggtctcgaactcctgacctcaggtgatccgcccgcctcagcctcccaaagtgctgggacaacaggcatgagccaccgcacccatcatgacggagaaattttaccacaagctgccatctgaactcatattgcaggaagaaagactgaagtttgtcaacacactggacatctctactctttctgcaggctgttgcttgtgagccttcatctgcataataagaaaaccttagctcaccatgcatctcctcccctctccttcccataacctattgccacctcccccgagatgctccaagtctctcttcctttccatatggtatagaaacttcagccatttggccctcttttagtctcatagtttgtgtggtccctatgcacatgttcttgttaatacatttgtgtgccttttctcttatttatctattgcccatttatttcagcagacttaaagactcaaaccttcagcaggggagggagagatattctacaccccagaatcaaggaatgctgagaaggccatcaacacatgtctgttttcagtattggtttttctttttttttttgaggtggagtcatcttgctctgtcacccaggctggagtgcagtggcataatctcagctcactgcaacctccacttcccaggttcaagcattctcctgcctcagcctcccaagtagctgggattacaggcacgtgccaccacacccagctaattttttgtatttttagtagagatggagtttcaccatgttggccgggctggtcttgaattcctgacctcaggtgatccacccgcctcagccaccgtgcctggcctgatttttctttttctttttttttttttttgagatggagtctcactctgttgcccaggctggagcgcagtggcacgatctcggctcactgcaagctccgcctcccaggttcacaccattctcctgcctcagccccctgagtagctgcgactacaggcgcccgccacaacgcttggctaatttttttttgtatttttagtagagacggggtttcaccatgttagccaggatggtctcgatctcccgaccttgtgatccgcccaccttggcctcccaaagtgccgggattacaggagtgagccaccgtgccaggcctcgatttttctttttttaactattctcctactaacagatacttaagtttattcaatctcacttttttttttttgagacagagtcttgcactgttgcccaggctggagtgcagtggtgcgatctcagctcactgcaagctccgcctcccgggttcacaccattctcctgcctcagcctcccgagtagctgggactacaggcacctgccaccacgcctggctaatttttttgtatttttagtagagatggggtttcaccgtgttagccgggatggtctcgatctcctgacctcgtgattcacccacctcggcctcccagagtgctgggattacaggcgtgagccaccgcgcccggcccaatctcacttttataagtagtattgcaatgaacatccttaaacacatatttttgccaaggattccttctcagtgccactctcctctgatttccagaccccctcaatatcctcctcagatttgccctgcacttcttgttccatgcttggggtcctaagaacaagccatctgatgcctctactatcattacctctattgggacccagaaaccaataccccaaaatatggtgcatggacatgctgaactgaagaagatgcctcaaggcaagttctctctggcctccccactcgactccccaccccactctctatcgtttgtctctctcaaaacacaggatgaagttgttctctgaagttcctttatctacctaaagtgtggacataccaaaggggaaaaaaaaaaaaacagttacctctggtcccatccttgagttttcattaactgaactcatatctcaggaagaaagaataaagtctgtcaacacactagatggacttttttttcccacaaaccattgtatctgctctgtgggcccaacagacttggtcccaggccacagtatattcttcaagcacattgaattcccctaaaaatcatttgctatccccctaaaatcatccacacttccccatcttcctttcccctaaaaagaaggttatataagcatctgcaccccattgggttaatggataattattctcctgcaattcccctatgctatgcatattaaaataaattcatatgccttttctccaattaatctgccctctgtgagttgatttttcagtgaactttcagagggcaaaggggaagtttttcccctggcccttactttccatagcctgagtaaggaagacagaaatgagttaggaggccttctctcttttttttttttttgaatcggagtcttgctctgttgcccaggctggagtgcagtggtgcaatctcaactcactgcaacctccaccaggaaggccttctaaaattgggaaatccaaggctcagttctcactccacaatggccaactgtggcagtagagtactcaactagggccagaaattctggtgagataccttccttggcccacttatgtgtctttaaactaattatttgctctttcctttaaagcaggcacagccttccaagaggttgtcttggcatcaaataaattacttttcctgtgtcccaccaatgggaaaatcatggaagtctccagaaatatgactgtagtgaatgctgtagtgtgctacccagatcaaggccctcatttccccagatgccagagtgctggctgtttgtagttatgcctgtctctgggcattgcccttggctaaagtaagctgcctcaccccaagatcacaccgcttccccagaggcaacatgaatcaatgacaggaccatgtaggggtaaaaaggcctggaaaaagtcttctcaaaattcatgtctcattttgagaagactctgaaagatcatcccatgatgttttttatgtgtttcagttacctaccgtcacataacaaatcacgccaaaatttagtggcttaaaacaaaatgatttgttatttttcatgattctatggattgatggggctcaactggctgggtcttctgctctaagcggtagagatgaagttactcatgcaaatgcattcagttgggagtttggtgggaactacagcacccaagattaattgcctctcatcctctagagtctctctctacattgccttcattgttcagtagtctaatatgggctgctttatgtgtcacagctgaattctgaagagtgtttcaagaggacaagccccactggggggcacttatcaaatctctgcttgcatcattctagctgatgtcctgttggccacaccctgagttaacacagaattatataccggaagggatagttcactggggctactaatgtaacaacctaccattgtctgccctctgactcttaataattcatatctgcttgcaaaatagggtcatccctaaaggcaaaaacagaacttccaaagtatctttctgtgacaacattaggttcaggcttgaagtccctgatttcgccatcaaagtcagatccaggggggacgatgctattcaggtaaggttccccaagtgttgttcctaggagcagagacctatgaactaaaaagaccagttatctactcctccaacacctgaaaaatactgtagagccaggaaaactgcaatactctcattcaaaaagttgaggagacagggaggcacataataatcaccagtccatagctatttttaagaaaaatatttttgtgtactaatgtaattgcatcacacaaattttggacctttatttttacttttattcaactaaacatattccataatgtcacttgtgaccgttttttagacagggtcttgctctgttgcccaggctggagtgcagtggctcaatcacagctcactgcagcctcaacctcctgggctcaagtgatcttcacgccttatactccagagtagatggaacgacaggtgcacaccaccacaactggctcatttttttaaatttttttgtagagacaaagtctcactatgttgcccaggctggtctcgaactactgggctcaagcagtcttcccaacacagcctccaaaagtgctgggattacaggagtgaaccaccgtgcctagcctattaaaaaaaaatttttttggagacagaggctttcacttatcacccaggctggaatgcagtggcccgatcacagctcactgcagcctggacctccgagcacaagtgatttctgcacctcagcctcctgtgtagctggaacttcaggcatacgccaccacacctggctaatttttttttttttttagtagagacaaagtctcactatgttgcccgggtggtcctaatctcctgggctcaagagaacttcctgcctaggcctcccaaagtgctggggttacaggcatgagccaccatgcctggcctgagcagtgcacttttaaataacctgtgggacaaattaaaaagtggcaaggcctttttaagtgttctggaactgtgatttcagctactccggaggctgagttaggaggatcacttgagcctggaaggtcaatgctgcagtgagcagtgatacagccactgcaccccagcctgggcaacagagtgagaccttgtctcaaaaaaaaaaaaaaaaaaagaaaaaaagaaaagagaaaagaaatatgttgctcaatttccacatattcaggaatttctagatatcatattgttattgatgatcaatttaatacctctgtgattgattactaatttaatacctcagaaaatgtactctgtgtattttcaatcctttgaaatttattaaggtttgtttattaagaggaccccgcatatggtctatcttggtgaatgtgcatatgatctatactggtgaatgttctatgtttttttacacagtctgtcaatctctgtctcttacataaaagtatttaaggccgggtgtggtggctcatgcctgtaatcccagcagtttgggaggctgaggtgggcagatcatgaggtcaggagatcgagaccatcctggctaacacggtgaaaccccatctctaataaaaatacaaaaaattagacgggcgcagtggcgggcacctgtagtcccagctacttgggaggctgaggcaggataatggtgtgaacccgggaggcggagcttgcagtgagctgagatcgcgccactgcactccaacctgggtgacagagcaagactccgtctcaaaaaaaaaaaaaaaattttaggtcattgatattagataactattactgtatggtcgggtttaccatcttggtttggttttctatttgtctcatgtttcttttttctttgcttgcccttcttgctcttattttgggtgaattggatatcatgtagtatgccattgacttcatttattaaattttagctcagcctcttggtgttgcttctagagttttctctagaaattgaaacatgcatctttaacttgtccatgatactaaactccagcctgcccgtcagcatatcccctctgcctcccatgtgtcacctccactgtggattgtctgtccctcgtccacaccatttctccagtcctgggatctgttcctgcatgcattcgcctaccagatacacacttatcgagcaacacactaacgcaggaagaatgtaccaaaaaatagaaggagagttggctccttccaccactagaagtgacaagtgacaaggcaatttaatcattaactattaactaaaagaccaatttgagatgatgctgttgatgtaatattattataaggataaagccaggccgggtgccgtggctcacgcctgtaatcccagcagtttgggaggctgaggcgggtggatcgcttgaggtcaggagttcaagaccagcctggccaacgtggtgaaaccccatctctactaaaaatacaaaaattatccaggcataggggcacacactggtaacctcagctactcaggaggctgaggcaggagaatcacttgaaccaggaagcggaggttgcagtgagccgagattgcaccactgcactccagcctgggagacagagtctcactctgtctcgattttttttaaaaaaggataaagccagcccctctctttcactcttccaccgtctcacaagcattcctggtcagatagacctaaatgtaagcattgtgggctactgcacaaaaagatcacccgggtgcagctgcagtcattgaactagaaaagccggaaagatcctgggtgatgtggaaccaatattccacaccggtgcatctgaggatgctttaacagcatcttgaaataataagaccagtgcacagatctatatttgtaaggatgtgcacagaagtgccttttataattgcataaaagttcattttattagggcactgattagaataaactatggttaatcatatgcataatactattcagccttttgaaataatgatgttggcctacagattacatggaaggatatccagaatgtgtatgtccagtgagaaaagcaggtcactgaacactatatactgggtgatccggtttgtataaatgtattatgggcaatgagatcacagtataaggcgtacagtatggatgacatctagttttgaatcctgctatattccaggacataacacagtgattaacagattaacacatagtagtttatcaataaatatttgttgaatatacacttaattaaaaatctggactgctaaccccctagttactagtaataggaagatgggtgataattttttcttttttaatgactttaagttttatttttttctacaagaaacgtgctgagaagaggactgcaatgactgctttcaaaaaacaccagaataaatacatacgtagtgtaagcaagcgaccactgttgtatcaaaagccctttgttgtatctgttggtggcggaggcagccagcggttaactgaggttctactgagctctgtggaccacagagttgtcttctcaagtttgcttctagggacaaattagtgactttatgatgtcaatctgtcccaagtccatggccaaagagaaaaaaataatgctgaaaaagtcaaaattcttagaattcttagagaattataaaactgcataggggctgggtgtggtggctcatgcctgtaatcccagcaatttgggaggctgaggcaggcagatgacctgaggtcagggatttgagaccagcctggcccaacatggtgaaactccatctctactaaaaatataaaaattagctgggcatggtggcgtgtgcctgtagtcccagatactcgggaggctgaggcaggagaatcacttgaacccaggagatggaggttgcagtgaactgaaattgtaccactgcactccagcctgggcaacagagtgagactccgtctccaaaaagaaaacaaacaaacaaaaaaaactgcacaaggatatgaatttctgaatagatttctgagtcacattccactatccagagaataaagataagttcataattatggtgtccagtatcaagtacataccagaaaaagactttttaaaggatgcaagtagataacaatcatgcctacgctcaatcactaccctagtgtagcatcttctgagacagagtctcgctcagtggccacgctggagtgccgtggcgcgatctcagctcactgcaacctccacggcccgggcgcaagcaatcctcctgtttcatcttttcaagtaattgggactacaggcgtgcaccaccacttccagctaattattgtatttttagtagagacagggttgcaccatgttggccgggatgctctcaatctattgacctcgtgatctgccagcctcagactcccaaagtgctgggattacagacgtgagccactgagcctggccgatgacaattctttctaccacagtaaacacaggagtggtaacaaaatgattattctcagactaaaatgaaaacttaaaaccaaataaaatccctgagcttccaggatcagagaatggcacagagagcagtataagaggccaggagaaaatataagattttaaatattttatgtgtacctttctttttattttcgactgactaaaaaataaaggaaaaatatttaagttaactcacaaaatactttttttaaaaaaagacatggaggacattaggaagaagggaaagaaaattaggtcgaaagaaataaagtgaatccagggatgagattaatacacaaaatgtttgccttgaaagtcctttacacttgctagatatgggtcacaatttgactcagcttcccagcagcctatgcaaagaaaaaacaagaccagctgtattactcacaatgtccattggataaaaacaaatccagtgctcagaagaagacaaattccaagaccagaaaggtatttcttccatgtgtttctatccaaatggcctgtgtcacgtagtaaacaaggccctaaaaccatctttacagtaaacaaaacaatgagtacctcgaggattgttaacctcccttatttaagttaacacattaacccatgtgaatgtaaataaagcaatcctacaggggtggaaagcatggggtcatccaagctgccatattcaatcccaaaataaatgctaatgaggaatggagctctctcgtgcatgaatgaatatgtgactgcccatgatattgtgatacaataaaaaatatatatttagtcttcatcccacgttcctggcacagagctcctaaaacccttggaatttctgagtgataggagtgaggagtatttgttacttatcataagccttcttcaaccaaacctgagtttatctaataagctgacacttggaggctggggctgatggccagaggaaataaccatgtattttaaagggttggaactttcagctcctttattccccattcccctgacccctactccccaaacacccccacctccagagagtggagaagggctacagattgaggtaatcattaatgaccaaagatttaatcaatcatgtctacataatcagaacctctataaaaaccccaaacgggccaggtgcagtggcttatgcctgtaatcccagcattttgaaaggctgaggtgggaggatcacttgaggtcgggagtttgagactagcttggccaacgtggcaaaaccctgtctctactaaaaatacaaaaattagctgagcgtggtagccttcacctataatcccagctacttgggaggttgaggcatgagaatcacttgaactcgtgggatggaggttgcagtgagctgagatcatgccattacactccagcctgggtgacagagcgagactctgtcaaaaacaaacaaacaaaaaaggcatttggagagcttctgggtgggtgagtatccattctgggagagtggtgcactccaacttcataaggacagaaactcctctgctcgggagcctgtgggacctttccctttgtacctgctcctcacctggcttccatctgtgccctttattgtatcccatataataaccagcaaacacaaattaagtgcttccctgagttatgtgagctgttagaaccaattacggacctgaggaagggttcataggagtccccaatttgtagccaagtcagacagaagtgtgaataacctgggggcccactatttgagattggcgtctgaagtggggggcaggcttgtgggactgagcccttaacctgcatgctttgatggaactctagtttgttcatgctagaattgaatcactggacacccagctggtatcctcagagaactggagaatttcgtgatatggaaaagccacgtatttggtgccagaagtgctgtgagtagagagcacgctttttctttgtactgccatggagacaagtcttcctaaatgtttcttcaattcgaccaaatgtttgctaagtattgaatagcagtgagtttgaggttgtggctctgatctaacaaggatccagaatattccacattgctggttaagtgtaaatctcaatgtttgaatagacagctgcgcagggttaacaacctcttctgaaattcaaggggcccaaatagaggccaccagaacccccacagagcggggccaagcaggacccagacaggccactccagtttcaacttcagactcacacacaaatgactgggccccaaattcttgtatcagtgttcctgaccttttcaggttcaggaaatatttttaatgctccccatgtgtataatagtaattgtactgttggaattggttgactgaaaaatatacacaatggccaggtgttgtggctcacgcctgtaatcccagcactttgggaggctgaggtggacagatcacttgaggtcaggagttcgagaccagcccggtcaacatggtgaaaccccatctctactaaaaatacaaaaattagccaggcatggtggtgggcgcctgtaatcccagctactcgggaggctgaggcatgagaatcacttgaacccaagagacggaggttgcagtgagccaagatcgcaccactgcactccagcctgggtgacacagcgagacttcatctcaaaataaaataaaataaaataaagtgtacacaatgacagactccttgttaaaatttatgcatgtaataaatactcattgtagaaaacccaaccacacaaaaatcaaagattttttttaaatcaccattttgcttacctggtgcccagatagatatcattctattggagtgggaggtcttttgggcaggtggggtgccagggtctatctacttctctctaaggaagccaacagggaatcaaatattctctcttccaggctctttataactagtacatagtcatgtgatctgagcttagccaatcagatgctcctgccaagggctttggattgtgaggaagtgatgcaaaggccctgtggtcaaccagagatttttcacaatggctgcagcagagtcaagagtccaataccatggtcctgaggggccagcagcaataatgccagggccagcatcccaagctgactgttcttggtctccctgattccagcagaacatcccagtggggattctttgatatgtcccttgaattaagtggctgccaggtccccttgagaaaagaccatgtgataacatcaaaaaaatattctctgttttagcccttcctttcccacaggggaactgaccatggaccagggaaactacagtggggaaagggatgatccagacctttgagggggtttgggacagtaactgtaaactgacacagaccccctggggaacagaacactactgacaaatttgatgggattcctgttcatggtaggcctgatggaatcctgaacccatcacttctccagtgcctgggtgtagagttggaatagatcccctaagctacaggtggaatctccacactggctctgtgacccaaaaagtaagggctattatgacagagggagcaaagggaagcccttggaccctccccagtcccttcaacaaaatagcaaatctagaggaacactgcgtccctgctgggaacacagatgttgatatcactgtgaatgagtcaaaaggggtgggtgtgtgtgtgtgtgtgtgtgcgcacgcgcgcatgtggaggcagtgggtgattcccctcacagctctacgtaagtctcccgtcttctggccagtgcagaatggtggctcctggaggggtggacagcagcacattgtctgcatcttgctcgtgggctctgtgctgggtggaccttagccacctcaccatcctgcaggacatcgtgctggtccactgcactgaccgtatcaggcctaggacttggtgaggtgccttagatgctccagaagttacttatattcaccaatggcctccttatggcttccaataggaaataagtgaacgggtagattaattactcagtgttttatacaaatagattggacaaggcttggctcttaaagacagcaatcccaaatagcggcaagctgtttagcttttttcttttctactttgtttaatatattttctaatcaaagtatgtaataatatgcataaatttttttttagggcaagtagaacagctttttacaatggaaacaaagccgcctcctggttttccttccaactctgagctccactccaaaaaggccaccgcttttttaatgtaaacttgttattaaggacataaatcataagtgaccagctcaatacatttttacaaagtgaacacacctatgtaaacaacacatacttttaacaactcaggtttgagtttttgggtggttacttccatgcagcaaaataagatcctcatgtactactttatttattttagtagtattattattattatcatcattattattttgagacagggtcttgctctgttgcccaggttggagggcagtggcactatctcagctcactgcaacctctgcctcccgggttcaagtgattctcctgcctcagcctcctgagtagatgggattacaggagctcaccactatgcccagctaatttttgtagtttcagtagagatggggtttcaccatgttggccaggctggtctcgaatttctgacctcaagtgatctgcctgcctcggcctcccaaagtgctgggactacaggcatgagccactgcgcctggccttaactttaataaacctatttttgagtagacagttcattcctgtggaacaaaattcaaaacaaacaaatggataggcagtgttaaatgtccctcccacccataaatcttaacctgtcatttccctttgtcagaagccatcctgttaccagtagcttggatttccttctaaaggcaatctattatttgacctattttaaatattttatttaataatttatgtcctatctcaatataaaacaatttaaggaagatgttgggttatacaatttgaagggcagaattcctctcaaagcagtgaaaactgacaacaccaaagaagtaaggtgttcactgagcttttccaaatatcgttaacaattcatagaaagatactaattcttttggcctttccctcatggtagcaagatggctgccatagctccaaatatcaagtcttcacacaacattctgtgaagcaaggaaggtgatggccccaaaagggcctgtcaacttccctagtcagggaaggaaatctttcctggaaatctctccttgtcttggactggctagaagtgagcagcatgcccacctcaagaccaatcactagcaatgaagaacagttggcttcatctattcacgcttcaacccctgaggctgggtccattgcttttacaccaaaatcagggctcagtaagcatgagtggccaatgagcagaaaaccaacagtgtctgccacagccagtacctttgtcctgtcactgtctaaacctgaaaaccaatctaaactaagttgttaatcaggccatggaaataaatcaaccttggaagagaatgatgatagcataccttctagacctgtgctgtccaatatgggagccactagccacacgtgccatttaaacttaactttacattacttaaaattaaacaaaactttaaatgcagttcctcagtcacacaagccacatctcagctgttcaatagcctcatgtgactagtggctactgtactggatagcacagatttagaacaatttcttcattgcagaaagctctactggcaaccactgcctgtccatctgccgctaccactgataagaggcttctctaaagtggtgaagcgagagtttctctaaagtggtgaggtggtgccaccttagtgtcattagcaacaccgccatcatctttgtccagtgcaacctgaaattggtaagctgaacatcctctagccagtgatcacagaagctccctgtcctgcagagtcacgtcagggtcagtcacagagctctgacaagatctggtgcagaggaacctcatgtttccatgcactcactgagcccatcttcctgaccgggttcttgatccacccctctgggaaagagaggcactggccaggagctggcttgggcaactaaggttatcataagattattttaatggtcaccttgttctatatcaggcacctcatgaacgatgatcatgaagtcacccactgcccattgccccaacacttgcacacttcctattttttcatcagccggggaccgaggagctgcagaaagtgaacagaatgagacatacaggtacaggggcagggcgtctgtggtgggcaccggccctcatgcccaccccacagatacagctcacattgtatttgatagtctataaaagggcacctgctctgagacttgggggaggaataaggttgcctccagtaataactgctctttgctccactttaacctcaatgggcctgacagttgaggtgccagcttgggtgcagttggtgcagccctgtcctgggggagggaaaggccaaccagggtcccattcaactcttagagaccatggtttcttcctggccaattttggctggtgccattctcccaggaggggaccttgggagacttacactgaagctctaacttgatctggcccagtagatttgaaaggaggcccaaattgagtggcttcgaagtcaccatatgtccttgctgcacaaatgagctgctgttctcctcctcacccctactggggcctcagatgctcacagatccccacgaagtcaccttgcagctgtggccaccaaggtgacaggtgtagacactctccccacagttatgtgccaggtgttggctgacggaggactgcccccactgtgatgccctcagccagtacaggtgtgtcctgggggcctgcctgcccctcctcctggcaccactgactagtccagggctcagcaggagcatgataggcactgaagcctggtctctgcccgtcagcatttcctgcaggcttcttcaatcccatttattcctagtgttccattattggaacgctaagcatgtgggagttatttatttcctgctgctcaaggtcattgccaaggtctgatttttcacacatgtctgcaattcaaaaaattgcaacctcctgcataagtgggttaacaaaccttcaccagacccctaaagttcaggcgaaattgagatatttgacccccataagaacaccagctggcacagagatctgcattcctggtgccctcatgggaaccagcctgggcctggcagaggaggaaacgaagtcccagcacaccagcgagcaggcctgctccacctcaggggcacccagcacttgttagacccagtttcaagtttccagcccctcttcccacctcagcctctttcctccgtgggtcctgggggctcctccaatttcctttccctctgaggtcttcctcatgttaaagatcttcctccctccacccagctccccaggaagccagaaagtctccccaggtccagccttccttttagcccccaaatcaaacatcttagggaaaaagcggaaaagtacagggagagaagagaggaaggaaaggaaagaagagagaaagggggaggtggggagaggggaagcggggaaaggaagaaagaaggagaggagaatagggtgacagagtgtgagtaaagagggaaaaggagctggcaagcaactagagggagattactccttgttttccaaaccaacactttctggtcacttttttttttttttttttttttttgagacaagtccttgatctctcacccaggctggagtgcagtggcacaatcacggctcactgcagcctcgacctctcgggctcaagccatccacccaccccaacctcccaaggagtaactgtgactagatacacactgccatacccaactagctgtttgatttttgtttgtttgtttatttagggatggggtctcgctatgatgcccaggctggtctaaaactcctgggctcaagaaatccttccacctcagtttcccaaagtaccgggattacaggtgtgagccaccacaccagtctcttatcacttgattcccaccaaattctgtttaaatgaacatgaagaggtaaagtatttcaaaaatcccagtttactttatatcttcattgaacaccagagaaagaagaagtccattaattttatgatgtttttctaaggtgcggtgggagaggaggaagaaatattcttggcatcttgcctttttttaaaaaaaaaaaaaagatctttgcagtttcctgttaatttaataccagaacctttgctgtgtaaataacacagataaagataaactttactggccctggactccaaccttcgtttaacattccacccccctctgatccatcccgcatcccgcctatggaaatttgtaattagttgtggagatttagaggctgagaatatatagttcaggaggcagagcatgttggttttagacaagccttgtaagaatgtgctaaaaatcccagtatacctgacagtgcttctctagaacttgtctttctctcttcctcagaggtgacctggatggggttaattccctttctggtcaacttgtaggtttcaccctggctctgccacccaccctcccagtttattatacccacttaggctgtgctttgctggcatggccttgcactgttatttagacaagtgatttaatccctcttacttgctattattgagcactcttagttcctctttttttttttttttttttaagatagtctcactctgtcacccaggctggagtacactggtataatcttggctcaccgcaacctccgtctcctgggttcaagcgagtctcctgcctcagcctcccaagtagctgggattacaggcacacaccaccatgcccagctaatttttgtattt

SEQ ID NO: 11 - DNA, 555 bp, Homo sapiens
caggagggagccgggagattacgcagctccatgtaggtccacgtttaggttgggaggatctaccatgaagaaggtcaagaagaaaagggcctctgattcgcgccggcccgcattcctgctcctgtgccacttgcccctgcagctccgcttgctggcgtcgtctggggctatgccatagccgcatcttcgatgtccttctgcctcgggactggcagatggcgccagggagaggactccccaacctgctcaccttctacagaaaatcttcaagaaaaccctccagtcatcgtaacgcgtgtcctccaagccctcggaactgtggctgtggctctgggggctctaggagctgcctactacatcactgaatccttgtgaacaagcccctaggcccacagtctggcaggaggtgcttttaatgtgctgataaaccaacctcaggaaggtattatgtacagaagattcccaaggctgctgttgctgaaagagacttgggctactgccagggaactagaaacgtgctgagaagaggactgcaatgactgctttcaaaaaaca

SEQ ID NO: 12 - protein, 98 aa, Homo sapiens
RRSRRKGPLIRAGPHSCSCATCPCSSACWRRLGLCHSRIFDVLLPRDWQMAPGRGLPNLLTFYRKSSRKPSSHRNACPPSPRNCGCGSGGSRSCLLHH

SEQ ID NO: 13 - DNA, 546 bp, Homo sapiens
caggagggagccgggagattacgcagctccatgtaggtccacgtttaggttgggaggatctaccatgaagaaggtcaagaagaaaagggcctctgattcgcgccggcccgcattcctgctcctgtgccacttgcccctgcagctccgcttgctggcgtcgtctggggctatgccatagccgcatcttcgatgtccttctgcctcgggactggcagatggcgccagggagaggactccccaacctgctcaccttctacagaaaatcttcaagaaaaccctccagtcatcgtaacgcgtgtcctccaagccctcggaactgtggctgtggctctgggggctctaggagctgcctactacatcactgaatccttgtgaacaagcccctaggcccacagtctggcagacctccaccagccccaggagttgataggtgatggcgctgggagaagatgttcagaatatctcaaaagccaagtccagaagatccagtttccatcaaagggacctctcttgtcaccaaaatttaaaaaaagaaaaaaaaaacga

SEQ ID NO: 14 - protein, 98 aa, Homo sapiens; identical to SEQ ID NO: 12

SEQ ID NO: 15 - DNA, 855 bp, Homo sapiens
agctggaggcccgagccaggctcctagggcagagggcaaacggcccctccaggagggagccgggagattacgcagctccatgtaggtccacgtttaggttgggaggatctaccatgaagaaggtcaagaagaaaaggtcagaggccagacgccaccgagactccacctcccagcatgctagctccaattccacctctcagcagcctagtcctgaatccacaccacagcagcctagccctgaatccacaccacagcattccagccttgaaaccacctcccggcagccagcattccaagcccttccagcacccgaaatccgccgctcctcttgctgccttttatctccagatgctaacgtgaaggcagcccctcaatccaggaaagcagggcctctgattcgcgccggcccgcattcctgctcctgtgccacttgcccctgcagctccgcttgctggcgtcgtctggggctatgccatagccgcatcttcgatgtccttctgcctcgggactggcagatggcgccagggagaggactccccaacctgctcaccttctacagaaaatcttcaagaaaaccctccagtcatcgtaacgcgtgtcctccaagccctcggaactgtggctgtggctctgggggctctaggagctgcctactacatcactgaatccttgtgaacaagcccctaggcccacagtctggcaggaggtgcttttaatgtgctgataaaccaacctcaggaaggtattatgtacagaagattcccaaggctgctgttgctgaaagagacttgggctactgccagggaactagaaacgtgctgagaagaggactgcaatgactgctttcaaaaaaca

SEQ ID NO: 16 - protein, 220 aa, Homo sapiens
LEARARLLGQRANGPSRREPGDYAAPCRSTFRLGGSTMKKVKKKRSEARRHRDSTSQHASSNSTSQQPSPESTPQQPSPESTPQHSSLETTSRQPAFQALPAPEIRRSSCCLLSPDANVKAAPQSRKAGPLIRAGPHSCSCATCPCSSACWRRLGLCHSRIFDVLLPRDWQMAPGRGLPNLLTFYRKSSRKPSSHRNACPPSPRNCGCGSGGSRSCLLHH

SEQ ID NO: 17 - DNA, 847 bp, Homo sapiens
agctggaggcccgagccaggctcctagggcagagggcaaacggcccctccaggagggagccgggagattacgcagctccatgtaggtccacgtttaggttgggaggatctaccatgaagaaggtcaagaagaaaaggtcagaggccagacgccaccgagactccacctcccagcatgctagctccaattccacctctcagcagcctagtcctgaatccacaccacagcagcctagccctgaatccacaccacagcattccagccttgaaaccacctcccggcagccagcattccaagcccttccagcacccgaaatccgccgctcctcttgctgccttttatctccagatgctaacgtgaaggcagcccctcaatccaggaaagcagggcctctgattcgcgccggcccgcattcctgctcctgtgccacttgcccctgcagctccgcttgctggcgtcgtctggggctatgccatagccgcatcttcgatgtccttctgcctcgggactggcagatggcgccagggagaggactccccaacctgctcaccttctacagaaaatcttcaagaaaaccctccagtcatcgtaacgcgtgtcctccaagccctcggaactgtggctgtggctctgggggctctaggagctgcctactacatcactgaatccttgtgaacaagcccctaggcccacagtctggcagacctccaccagccccaggagttgataggtgatggcgctgggagaagatgttcagaatatctcaaaagccaagtccagaagatccagtttccatcaaagggacctctcttgtcaccaaaatttaaaaaaagaaaaaaaaaacgag

SEQ ID NO: 18 - protein, 220 aa, Homo sapiens; identical to SEQ ID NO: 16

SEQ ID NO: 19 - DNA, 674 bp, Homo sapiens
agctggaggcccgagccaggctcctagggcagagggcaaacggcccctccaggagggagccgggagattacgcagctccatgtaggtccacgtttaggttgggaggatctaccatgaagaaggtcaagaagaaaaggtcagaggccagacgccaccgagactccacctcccagcatgctagctccaattccacctctcagcagcctagtcctgaatccacaccacagcagcctagccctgaatccacaccacagcattccagccttgaaaccacctcccggcagccagcattccaagcccttccagcacccgaaatccgccgctcctcttgctgccttttatctccagatgctaacgtgaaggcagcccctcaatccaggaaagcagaaaatcttcaagaaaaccctccagtcatcgtaacgcgtgtcctccaagccctcggaactgtggctgtggctctgggggctctaggagctgcctactacatcactgaatccttgtgaacaagcccctaggcccacagtctggcagacctccaccagccccaggagttgataggtgatggcgctgggagaagatgttcagaatatctcaaaagccaagtccagaagatccagtttccatcaaagggacctctcttgtcaccaaaatttaaaaaaagaaaaaaaaaacga

SEQ ID NO: 20 - protein, 164 aa, Homo sapiens
LEARARLLGQRANGPSRREPGDYAAPCRSTFRLGGSTMKKVKKKRSEARRHRDSTSQHASSNSTSQQPSPESTPQQPSPESTPQHSSLETTSRQPAFQALPAPEIRRSSCCLLSPDANVKAAPQSRKAENLQENPPVIVTRVLQALGTVAVGALGAAYYITESL

SEQ ID NO: 21 - DNA, 561 bp, Homo sapiens
gtcgtgggcaagtctaagcagaaagtgtattgaatctgccaggttgaccacctgtttcatgcagcttagggtcagaagaatctgtagctctgtcaagaagacgcagggctacagataggaaacaggagggaataatccagccagaaattatcttgcccaaccacagagggcatcatctacattctgctgggatccataccagaggaggacagaaacagaaaataggatcgggactggaaactagagctgtggttgtcttctggatggatcagaatgctctagatcaatggaacgtggcagctccaattccaggaattcatcgtaacgcgtgtcctccaagccctcggaactgtggctgtggctctgggggctctaggagctgcctactacatcactgaatccttgtgaacaagcccctaggcccacagtctggcagacctccaccagccccaggagttgataggtgatggcgctgggagaagatgttcagaatatctcaaaagccaagtccagaagatccagtttccatcaaagggacctctcttgtcaccaaaatttaaa

SEQ ID NO: 22 - protein, 114 aa, Homo sapiens [sequence omitted]

SEQ ID NO: 23 - DNA, 393323 bp, Mus musculus
  misc_feature (1)...(393323): n = A,T,C or G
atcatttcacatactgagaaacagtctatttagatgttttaatgaatcaaaacttattatttgaaagcatagctatatgtacagggttaactcttcttgttccctaaaattctctcctcagtttgattgaaagtttccatggcccttaccatctctttcgtttcctgttacttgtgcatttaagaaagttaacatagatacgtacatttgtatttcattgttaaaacaaatttaaaatcacagagtttatcctaaaatcgaaattcagtgatattaaactctagtaaacttgagtgaccaaacttcaaacacttaagatagtttgtgcagagtggtgggaatcaggggcacactgataggcttcggtgagcactgtggtgttgactacatctgcattaaacacagttgtacagacaaacatgaggtgtttgtccatcaataaataacattctcataataaaaaataagatatttctaccctttcaagttattactaagatgggctttgttgtctcatgcttatttttgttaggatacaaacaaaagtattaaaaaattaaaagcaattaaaacgcacctcacatgctagtaaaattccatggcctatgtaatgggtccagccgacttgtaaacagatcactacagcgtgcctttaagacaagtttgagcatgctgctcagggaacacggaggaatgagcagcaattagcctggagacctgaacacttattggtatgtttaagaggagagattccagataagcaccgaggagacacctgagctttattagggattatatagtttacttttctcattatcactttctcttcccgttggaacggcaaaacctttgtgaattaggcacacagcctcttaggtatattcaggtttccactttcagaagtagatttcctgaatgcagacaaactcaggttattctctgtcccttatttctagttatacacattcacatacatgtacacatacaagttgtacacattcacatacatgtacacatacaagtctgttgtttgcatcagagacttagaagaagccgccccgggaccacatttttatgtgtgcatagggcagtgcataggcgagcaatgtcgtccatcatagaggataaaatgctatgggagcgattcaaagtaaaaaccatttgttattttagaactggggaaactgcgatgctgttttcttgctctctgtatcaggcggagccattgctgttggatgtgatttagtgcaaaatgtcagggagctctgttttccctgtgatctttcccaaggttgttgggagagaaagactgtttactcccaggcccaagagttgtcttttatctagtctgcctggttatcatccaccaagcaattatgttactgactagcttagtgaaacctaccactctgagttttctttgcttgtagggcatttgggtttgctccctgcctcctaactgctctgctaagttgggtaagcactttcaccttctctaaatctgtagaggttttcttcatgttacgttccaattagaagaaacacattagttcctgatgtgtgtagggactctcagtgacctcttatgtctctctagcttatcttgtctgctgtcaactatcttttctttccctatgactactaagacaacataagggcagctaggcttgtccaccctatcctagctttctcgggagccctggacctcattctccttggtgttgtttccccacagctcctttttccggtgatactgtgaatttgaagggactgtgtgttatggggcctgtctctattctgtgccccctctgatgacagtgactcactcacagttactcactgagaccactgagacctgatgcttctcctttttcgttactgctcggttcctttagtgtgtcgtcgtccccccacccccccctcgccacagtgttgccaggggcagcaagcacattgttacattgttgctttctgtaggagtacctttgtgccaggcaggtcaagagtctgtctggactctttctctacctctccttactcttacctcctcatctggggtgtggtgggggtgggggtacttaggaattcctagtaactagaacatggtcttaccggaatcctcagttgactcagctatagttttggggaattgtgggacatgagaattggacagaattttggaaataaagtaattttagtttacagataaggagatgtattgaagctggaagatgtgcaagggctaatgtcagagcgctctgtgacggagggagcgattgctgccgagtgtgctgtgtctacgtctagtgctgtttcaagtatttccagtgtctttgagagagcctatataaagggttggcatttctgtggagttgttctccttgctccctctgagcaatgccagctgtccatgtagggagaggggcttgaagccagtattcttccaaagctgtctctctctccagagaaagaagttcagttgaatacatgacattttcagcccatggcagaccctgctttgcccttgctgctctgggtagcctgatgcttcagaacatgattgagttcgctgcttccctagcaattgtgtgtaattttcagcccgcctccttcttcggtgctgcctgcccacgcttccgtcacatgctgcagcgtacctgctttgtaattacgctgctagggacttacctccacagcgtggaaaaggtttgcctaacgtgcttatttacttgcacacagtaagtcttgattgataccttggtaatcactgagattaatctgagacttcctcccacaatggggagggtcagagaattaggaaacaggtgtcaaggaaagggagaaaagagagttgtgcttcctctgatgagctgagaggaaaattatagatgatttgtgatctccagacctaactttacttgtttttttaaatagttatcttgtcaggatttcttcaaaattcatgtaagcagattcacgtatagaatcccctcccccattcaactgtggcacagtcagacaaggacattcgctccctaagtgtaaaagttgcattgcagcctcctgtctgagctggaagctggttctgaactatgaaggtcaagcaacctccagccaaatactgctctgtagtacagggtgaacggctatacctgagacatctaagcacatccttacatttaaaaaggtaacaatagttctgggatcagcccaccaagcacagtgctctgtgttcagatcctggcatgggaggcagttgaaaaggagaaggaaggagggaagaaaagcctctttgaattgcattgaaaattccttattcaagtcaaaatgaccatcaccaaacacaaagaactaacactggtaaggatacaggtgaagaggagccgtttcacataagtaccactggctcatgaaaatctcttcaaaagccatagaacttgcgtatggccaagctgcacgatgctgtgtatagacctgacctcttctcgctctgcctacagcagagagacagctccgtactcagtcattacagttcagttcacacttaggcaagttatagagtcagtctctatgctacccaatgaaagatgggaaaggactgtaacatatgcatacagtggggtttcattaggctacaaagaccaaagattatttctaggaaattgtgcacaactaaagatcatacatgtgtaagggacaaagactagattcctagggctaacaccatggttttcatggatgtggaatgaaaaaaggaatatgtaaatagacagagagctatatggaggaggaagggaccagggggaggcagggcaagaaaataacaggaggattgaatatgttcagagtatatataaaatgtatgaacttatcataatgaaatccagtgtttgtataatcaataatgctaacaagaatcttacagcaggggtttggtaattctagcaaggcactgacattttcatggggaggccagtctcagaaaaaccttcatggtttaaacaggaatgcattgtttaagtcttaatgcttgttcaaataaagagtctgttggtgatagacatgaatgttcaactgagtccgccatgcacttttgctgtctcagctgcagcttgtcagttcctacaccattaaattagtgagtattaatttctgttctcccccttaatctcatcagcttgctgagcacacattgacagagcagttactgaggagctatgcaaattagagattaatgtgaacgttttataccacttactctcctctctggagtcagaacgtctatacaaagagtcttggcctatgtcttagtggtctagtgctagcttgccaaacactagaacctttgaatccccaccagtgcaaggtaaataatcagggagatcccacacaagcttagcttggaggtcgttttagaacccacaatttgatgcttatagcaccagatgttgcataaggccatatagcaggtggttggtcttcagtaatcttagaaatgcttatagaattgcatgttaatttggagaaaagaaaaagggaaatctgatcaaatatcagttctttctgttcacaaataccagtgagttggcatttatatacgcaagctaaggcttcctcagcatccgctggccctcaggtctccttcctcgacagggaaggggccgatcatcagtttgctcctttgaataccttgccttctctatggctgggatgtgttgaatattgtcttcatcagcctatgattgtggagtatgagagaaagaatgttttataatcactgcaatccttggtaagtatggaggtgccaagattccaaaccactcatttcacaaagatagaggacagcaaagaaaacacattcaagctttttttaggtttgcaatttgttagcgggttatcttaatcaatctgtgtaactccttagaaccttactttgtgtgtacgtatgtgtgtgtgtgtgtgtgtgtgtgtgtgtgtgtgtgtgtgtgtttgttggggttatgggtctaggtattgaattcaaggccttgcaactacaattcaaatgttctgccactgaagtcgttccctgaccccaggcttatgttcttgattttgacctgcaggtcatggtaatagatccccagatagcagtgtgatgagtccgtgggcattacaacaatctcgtcacaaacagtcagacagccctcaggaaacacttggtatttcttgttaatctgtggctttgctgttcctataattgctggggagagatgacagcgagccttagagaatatgatcagtgaaaccatgtcggctcactgtacttgctttgcatgtagcccagaccttggagggatggggcggggcacagtctctaactttttagcagcaggcgtgttgctgggatcagggctgtttcttctgcttgctatctctgggtgctgtggcttcattttcagtgtcaggagaggactggggaaggatcctctctttcacttcttgcttcagaggttctaagcctagagtgaaacttacctcagggcagaggaagtaagaccagggttggaaggtacagcaaagcccactcttaccctgcctgcttgtactttcactgggcctgtctctgagaagctaaggaggggtcttgactggtttttgtcagttcatgcatttctcagactcttttatcagaaacaagtttaagatttagacgtagaaaacaaccataaaccataggagtggttttgtaatttacagatgttcagttgtccaactttagatatatatatttttgtgttaaaagtcactctaatttaactgagattcaaattagggccagagggactccatgttcatactgttggatttattattttcttggatccatcttgcatgaactaatatccctatgtccctcaatatgctttgatttgtttcacttttcttctctctctcccttcgtccttccctccctccctcccttcctcccctttcctccttccttcgtccttccctctaccctttattctctccctgtccatccttatgtctataagtgtatatgtgtgttgggttaggtaagaggagaactttcgggtgtcagtttccctctttgaggcagtatcatttttttccccactgtgaggaatatcttagatctcctggggacaatgctgtccctatctgccatctcactgtagtaacactgagatcacagtcacacactatcgtttcctggcttatgtgtagtctgggaatttgaacttgggtccttacatgtgcatggcaagtacatttcccactgagccatcccctcagcccctgtgttgttaattcttgtcattgttctccctcatgttatatttcacaactgcatagccttctaagtcccgatgggagctgcctctcccagcctgcactagttctttgacagctcctccagtttctcagtatagcatcttttctaggctactctccttccttgcatttagatgaatgtaactcccccagactatactttttgagtgaaggaggggaatctaattcatctagagaactagtaacagacatataagtttatttgatccttaagttaataagtgttttcattgagttcttatcatgaactagaccttggcgttataatatggtaaggagttgtgttctccaggattggggagtttactttggggagcatgcatgtagctgatcacctgaccattgtgtgcagcagggtaatgtgctggtgttgagcagggtttgcagctgagcaaaggattaaaagcatcctttacatcctgaagacctagctggaagtaatccccaggacataaaggatgcattatggataagaaattatttgtaactaagggatagcttgtgagaatgggtaaaatcttgtgcagaaaatgaattttctggaagatataaatgctatcacattatcttagaagtattatcacaacagctattagaaatagcttttagtatctgttattaaataaagtagcatcgcatatagaagtatttttattgaattacgatgaacctttaaagatcagattattcagggtcattattaagttaggtgagattgcactcggatttaaaacatctgggcgaaaaactaataataaaagaaaggaaagaggccaagagcatgccactgctgacctttgacctcatgcacagaatataagtaaaagttttaatttttccatgagtttagcaaagcaccgtgtttgtgacttaggctttttttcttcataatattgaaaaaatattttaatatctagaaatctatcaacaggattcattacataccaagtaggaggcaaagtgattgtgctggtagatgccaataggggaggagaggtgtgctgtgggtgctgatggggagggagaggtatactgattgatgctgatggggaggggtactggttggtgctgatggggagggagtggtgtgctgattgatgctgatggggagggagaggggtactgattgatgctgatgggaaggggtactggttggtgctgatggagagggagtggtgtgctgattgatgctgatggggaggggtactggttggtgctgatgggagggagtggtgtgctgattgatgctgatggggagggagaggggtactagtggatgctgatggatgctaatggggaaggggagatgtgctatacagttgtaaggggctgcatggagatatgtatgtcagacagtatcttatgatagtacaatgagaccatccaggaatttccaggtcattgtagcatgcatgtagattgataaattgctttttagcaaactaatattagtatggaaaaatactagaagaatccagtcaaagaacctgctgttactcccctttaggaggactcattcacatgcaggaatctgagctggggcaacataaaatcagggagtggggcttggtacccagggattggaaggaaatgcagttgttcatagtgggcacatcataaagatgggctcagaagcatgaaaattcactgtaagccttggggcacagtagaccagtggaagatgctgtgatgcttatctctatctagatgtggccttcatggtgggcaggcccagagtgccttctatatagatgtgatcctcatagaggggaagcccagagcgcttcctgtggagaagcaggcatcatcagcataagtcacattgccatgggggacagagatgactatgattttcatactgagtcttggatttttacttttaattctgtcccaatagttacttgtttctgtatgtttgtgtcagttgtaagtaatgtagaattggtctgcaggttttcaactttgcttcagagaccattacacactgtatgagattgcattgaaaaatttttgttttggaataagtctagatttacagcaaaggtgtcaatgatgctattaatccattttaatatatacagttgaaatctattctacgaatatacataaagcaccagaattttttcaataatttattgttttgtagtcacagtagtcacattgaaagtaaaaatagtaccattattccaatcccataaatgataagctccatcaataagaaaaagacttttttttttcctctctgctccatccttagagaaaggcttagttttggtctctttacatgattctaaatgtcaactagatttaaaaactctgttctttattgattttgtggcataccttactggtaattttaggatatctaaaatacagtccctgtctttttgtataggctcatagttctctaatatttgtatttctgtgcacatacacagggaccgagaaggaagagtgggttctgatgccagagggaaaccagtatcaccattggcttcaagcccctatgtctttatctcttttctttccctttttaaaatccagagttgttaccatagagtgacacctgtttcctgctatgtaaaatgaccaataattctcgctcattctctatgagaatagaggtacacccaccccactttcattgcaatggacagtatatgcataaagtcctttaatgttattgtattggttttcttaaaatctctgtgattaaggaggccaggaatgtctcagtcataactttgaccaggccctcatttagggctcctgatcatactgcttgtccgtggagtgagaacatgtgaattcccagcaagcatgctactgtgtcacctcctccttctctcgcaattgctttgtgacatgctgaggtcttcatttgttcctccatttgctgcatgctttgtcgctgtagacatctggagataatcatgtagccctcttaattaattcagttcaattaataaattacaaggtagatttggggctaggagtgggtaccgggcaccttccggcctccctgtgctggagagctcttgcaatcaggcctggagagctctcctcacctagtctgtaagactcttccccagcaggtaggctgccggcagtggtgattggcgtatcctgacagagaactcaactttctcttcacaccgagtggatactctgatggagcagtgtctgggctgggttggttatccctcatggagttaaagtaattttttccagtttctcagcttagttaggtgttactggccatttccctgatttgcaggttcaccattggattgctgctgttgaatattctttgtctattcatatacatgttagtgtatgtctcacgtgttttggcaaacagtgcctctgtgcccctgcccctttccaagtgcctcttagggttggggatggggcagagcctgcattatacaaaggacattttaaagtatgcttcatgtatctgctaatgaaataaatgttcactgtttctctaatgcccgctgggtaaatcgaggatcaactctgtgtgcagaggtgtccctggccccatcacccattccagcactttgatcaactgccttccttttcatatggctctccagccacactaaacacagtgttgtctgtttttctgtttttctaactgcagatttccacaatgtctcacccatcttggctgccacccaaaagcactggtgagcctcttggccacgtgcctgcacggatggagaccacccattcttttgggaaccccagtatctcagtgtcaacacaacagccacccaagaagtatgctccagttgttgctccgaaacccaagtataacccatacaagcagcctggaggagagggtgagttctggtgactagagtgggaaatgagcgtaaaagatgtgatttgctgtagagttgtgttggtcgtttctcattatatttcctacagtttatgaagtgtccggttttccccagctccctattgtcagttacaccaactgcatttcagaaacaaagaggttaaatctcacagagttgggttcgtaaagtaataaatatctaggataatacatatccattgctatttattactctaaaacagaaacatgaccttttcaagtgtgactcagaacctttctatagccttatactcatccttccctattcttctgtggggatatgttcaccacccagtgtagctatcaggcaagtgccaaaatgtcaccaagcaatagtccagtgagaaagcattaggacacaaaccctgtgaaatccctgggaccctgctgctgcttactctctccctgggagaagactgtccttggaggccctgggtgttgaagtcctagatggttcagagcaaaccttagttgcagtggtttttactagcaatgtattcattttacatcaagtggattttgaatgtctagatgagctgagcatccagtgtgtggttatactgtggctctcacattaacaaagttgagcagtacagtctttgtggtagaagagactccgtatttatcccagtcatgtcacgagctccttcacacccatgaagcagtaacctaagactaatatatagaacagtgtaagacttctagaagctgagaacagaagatgtgcgctcacaagatttcatctctttctcgattttgtgccccatctatcttctcaaaaatgactgttctgtttctacagttgccatcattgtgttcttagatacatcttttgtatttgttgtagcaatgttgtggggacctatgttatgccctgtagtgttgcctcttctctctgttttttttttttttttttttattttgagtccttcccacctcccagcaaccacatcattaatccacccgtttacctaggcctttggcctcctggtgttttaggactcttttcagaaacaagatacacatgtcttgcttgtgctaacaagctgcaggctaagaggttatgagaagaaaggccaggcctctctctatactgggtgttgtggatctttaggagtctctgtgtgtccttcccttcgcattgtcaaggcatgagcatgcctttctggaaaacgtgcttgctgtccatggacttcctgaccccagtgtctgggctggaagcttccacacccatgtaggacactgaacttctgcaggtgactatggtccttgtgaagctggtttgcactggcttattctcctctaagggctgtagggttcatccttactgaagaggagggagagccaaggggtggcttcctggtttgtttccttaccatttccttttgtgtgatttagaaggcacctttagttcttctcctattgaggaattcaaatagacttcttactaatcgggagagaacaaagacaaagtattaacacagaaaaaggtgtccatgaggaagcttgtagtggatatgggagttaattatatgcccagaggttagattgtgactagagtctgcatgaaaacacatgggccatcaggggaaaaaaaaacatacaatgatgtctctttcatttcttctctctgaatgccattgagtcttagtgagacaagcccttagttgtcctctgccttgccctgctcctggctcgtgatgcccctgcctctactccatatggcaaggccactgaattgccctcaccccactcacagcttcttgtcccttgccaccctattgcatttgttgcctgcctggatcctgttggtagccctttgcccacaatgtttggtgcatcctgaacgagaagcagtcacttccctctccgcaagcatgctactgtctccctgcagcatggctacacttctcactaatgctccacttgtctgcacttactgagcatgtagtgtatgctgtacactgcattcctcctcctgcacttactgaccatgcagtgtatggcacacacactctctctctctgcggtattcagctgcctgttcagagaaccctctgaactagcttgcacccacatccacaaggacattgaaactttgagaggggagatggccctcactgtattttctggttagggattatgtgtgccaaggctgttgtacagtgtgtacctttactctgtataattctgtttcatttttttccgtgagcttttcatttgaggggttgtctaaacactgctgccttcaagtagtgattacactgctccattactattatgtctgtgatctctggggttggctttcttatttttttccttctgactgtgaaagtagaaaggacccacatgctttccacatcaacttatatttatgtgatacccatatgttataattttcttgtataaaacaccatgctaataacctttgtgtaaagggttttgacacacagtgggtgtgtttttttcccaggcagtggttctttaggccttagccccttgattttcataaaatttaaaagaatttgtattttctccatgttttgaatgcccctacatttttaccttctctctatccagtactgaatgctgagctgtgttctttgtgtgtgtgtgtgtgtttgttgttgttgttgtagtatgttacagaatgcatatttaaatatatactatatagtatatctatatatcaatatattgatatagatagatagtaaagttctttggtttccattatgagagtttttttcctcaagggaaatgatatgacacaattttgttctggttcttaaagtgcaacctcaagtattctttattttgttttctggcctctgccttcagaacaaccaggaaaactgtaaggcagaaccagagccatgaaccttaaactttaacggtacaggaatctgaaattctttttctgctcttcacgggttgtgaaatatatggactttcctatggttttgcttatctcaaatggttttgaggttattctgttgtctgcctgcccgcctgtttgcctgtttctgtttctccatcgtctgaaaaagacaagtttgtatagttggagttgtcttgtggtgtagaattatctttctgtaatctctaaaattccgttcacaagacatttttgtatttacaagtgcaggtgtagagtgcaggtgatggaggggcagtcagtcaggatgtagagtgtaggtgatggaggacagtcatgctgtagagtgtatgtgatgtaggggcagacagtcatgctattgagtgtaggtgatggaggggcaatcagtcagactgtagagtgtaggtgatagaggggtagtcagtcaggctgtagagtgtaggtgatggaggggcagacagtcatgttattgagtgtaggtgatggaggggcagcacctttcatgttggtttagtcctttgcagtttacttggcatttgcatttcattttttgtttttaaatttccaaagataatttttactactgctttctctggcagacagaacagatgttatttctatttactgattgctagaccacagaaatgaaacagcttattaaagaatgatttaacgggctgagtatatagttctgaatatagtgcctgcatacctgcatgcatgcaaatgcacacacatgtgtggatgtgtgtgtatgggtgcatacacactcacacacacatcatatgataaagaaactgtttctttgtaaccacattcatgtttatctttaagatttttaaacttttaaaagaactttaatattttaatttacatgtatgagtgtttgcatgcatggctgtctgtgggttccctagaactggagttataaacaattgtcagatgccatgtgtgtggtgctgggactcaaacccaggtcaatgttcttaacccctgagccatcttttcagttcctgattataagattttaaaatactttatccataagctatttatctaggcaaccaccaccttgatacaactccagtattttattatttcatggttttttttgacgtaaattcacaggttgaacatttccacgaactgttctttaatatattcccttgtgcacgtctatgcctctatgtcataagcaatgcttgtgctttccttgcttgacctgagcttttgaaggcagaacgggtgagctgaatggcatcagtgggaccgctcggctgctcggtttcctttcccactcttatctcatgttagtaaatccgcaccatgcagaggaaagagttttacatcaataacgtgacatagtaaccaatggccccagtaaccttaagaactggatttccctggtagaaattagttcatgtttagttcttttctgtgttcatagttgggccattttaggcaaattaatatggagtttttgagtattagaaataggaagggtttgaaaattgttttgcttagcccttcccttttattggctgaggaaacttcatcacttagatacacaagttccctaccagctgcactccatcataccctaaagcacctatgctagagcacggaggtgtcctatatagactcataaagtcctagccccgcccaagagtcgctttgctcttcaggcaaggtcatcttgtatgtgtctttggaactacagatagcaaacatcttttcatatgcttattaaatcatcagtgagttgcaatgtgttagattttggttatatttctgagtgtgccttaaggatcctcattattcactgaaatgctattaattctcctgagcctgtagttgactgccatgccccttctcaggagcaatgtagggatctcagcctcatctgttgctatggcgtgcaggacatggcttctaattttctggttctcatgggcaaagaggaccagctgtttcttcatttaggaattacctactaattgtgttaatttggtctttacatcttcttgaagaagaaagtatttgcaattcatgggatgttatcagatcagaacaggaattgctaaccctccctgctacctagcttcatggcacagcacaaagcggagggtctgtctaggccagcagtttttaacctgtgggttacaaccaacccctttggagatcatatatcagatatcctacatatcagatatttatattccaatttataatagtagcaaaattacacttatgaagtagaaaaaaaccaaccaattttatgattgtagattagcacaacatgagggacagcatcaaagggtcatagcattcagaaggttaagaaccaaagagctaggcacttacactcatgtcatggttttagaacacatttggacagagtccttttcttcttcagttttgttttacaaagggacctacttgggaatactatcattaagactttcagggtccactatgatgggaagtatgagatatttttaaaggcagagtatttcacaatctcagcaagctgtcactctgtgcccaacacacaattacataaaacgtaggtatttgtgggaaacactcttcttggggctgaagtaatgaaagttagcaatatggagattctttgcagagagaatgtattttcttttaaaatagacatgagttattgacactaatattttgtaaccttgataatttataaaatattatttagattacaagtataggtataatcacacaatactattgctagtaatcctaaattatgagctgtgatacttagtaatatgaataatttattaataatggcctccataagtaccaatagtattcctaagattatagtgttaaaaatcactctgcctaaatgttacaaacagaaaaaaattcataactccaggcaggcagaatccttaaacttatcctcatttaatttctcatttcctaaataagaaatgattcttaaatctcttcaaagaaaatacacagacattgcctgggaatgctgtacggtgagattgaccgttgagcaggctggagttattatcctggttttagagactcagatcgtcctgagtgacttgttgagctgaggtgtggacgtgtgggataccttcaatgattatgcgagttgtgcgtcacagatgcatttgtgatgacttgtttggaagctgccccgagaactaagatacaacacgagcagagtagattagatgttttcgcacaaagagatgttcatgtaattggtgacaaaattctcattcattttgtagtctgtcagcctaattaactgttgaagtgaatttgtaataaggtgatggattcacaatacttaaacagtttgaaaaacagtgattaatgctgatttgtatgggaggtaatttttatttgtctccactttaaaatatgaaaatgtatatcattctaggtgtgttttgaacttgaatagctatttttttttctgtaagtaaaaatggagaacaggacagtaaggacttattcaggcataggcaggtgaagtgaaagatacacttatgggaatgagtccacactgcatacctccatccccagacacttttgagatgagaaacctccagagatgagtgattgctcatggccagagatagaaagagtgggacacaatgcaggtgtcttgccaacaggcatcagaagtcttcttgtgtggcgaatttgggtggttccaagtatgtaatcctgcgacatgttgcatagagcttaccctggtgggtagaagcccaaaatgctggagtggactgagagtcatccagtgcagtcttaagttctccatttctggtcttggtgattcacagtagctatatgctcggttgccatgggaagaagctgggcatgctcctccttagattttatgctattttgggaaatttctgttagtccatattttccaataatatttttaaaaacgtgttataaagaagtacatgattttataaaatctatatatttatgataacttacataaatcatacattttacggtcattgttatggctagtttaaacttagttttcaatggtatctggtcttcccaaaacttgaaagacaacagaaaagcaatccatgtcctaatcagttatttttaataaatagtattcccaggtaattctgagtgtattcaactaaagcaccgtcatcaagaatttagcccaataccaccaaggtcctgatttgatgctagagtacgcctcctgttgctctccccttggtcatggccagtagctgtgaaatcttgagcatctgttctgtgagcagctgttgagaaccaaaatccttcttcctaatgctgcacctatcgctctgaactctcttctctggtattagacgtttacataaggttgtttaaagaattttgcttaggatacaaaagcaggtttaaaagtaaaggcatagtgtccttcctctaggatggctttatgatactcaaccttctatattccaggtcttttactattttgttaacttcttatagtgatgtctgaaatctccgctgattttgggtcatggcaagtctatgtaaatcatctattaatggattcattatgactactattaaaaaaaaattcgacactcgagcctttgggcaaatagactatatagagaaactgtggcctagaatcatgattgacccaaggagctgtaaaattattcattgtatggtatttgtgtcatccttccttaaaaatactcagagactgggctgttgagaataaaacccaggtcataggagggcatatcccagggatgtggtaccctgaggctccctgcatttccccgtcaacattctctgaaattctgtcccattttccatgtgtttctgtattcaaggttagatggtctgcggtcctgaggtatctcatacagaaggtcacattatttaaatttagtgttatgaaagaattagagtgacctgttataggaacactgggaaatgctctgcagagatgtatatttgattgacatctgagagaaagagttcaggcttcaccaggcaggaaagcatgccagtctttgcggccaatgaatgcacaagcagagggtagagctctcggttacacttggggcattagctgctctttttctaatgtcctcaaaagtacatgggaacccgtaggggcttctcttcagtgagaacagagcgaattcattacgggcagagccatgttaccattaatctcttcccttacgtttaagctgagtaactacagagagcaaagcacattcctgtcccacagcatgtcctgatgcatgtttctggtgtggtgttaagcagaggatgggcagtccttgcttcatctctggtaccttatgctgaaatgtttctgtgtaaatggatgctaaaaggggagccattccgggtgattttcatgagactgaagacagactttaaccgttttaagcatacaccctctagaaagcgaggcaggatcaaacttaaaccttttgatctatcgttctttcttagttatccacacacttggcaatgattctgagaaaagaagcgttttgtttctaaatatttgctactactttaaagattgtgtatacaggtacagttttgtgtcaccatctcactctcctggttgaattttcaaagggccctcaaactatattattgtcttcacaatgacattatcattgttcctagtaataagtgagtaaccggagactcagcaggcccacagggagactaataatgtggaagccacatgcaatcaaatattagtatttcctcatattaataatttacacaagccagtgtataataatcatacatgctagcaagtgttctatcagaggcctttatctcagtcctatccactgacttgaccatttgtctcttgaataatgtctacaggatgtaaatctctttttgttggatgtatactccttactgtatgtgaagtcacaccttttctgtaaagaatactgccacttgtggacaacagagaaaatgtacacacgatggacacagtcacccagggtaaaactgtgacttgaatctttgtcccttattctaaggccatgtcttttccatgcaccaaattctaaattaatggtcttgctatgtagttcattagaatgagcaacatttttcactgttacttcctcgctgactaactgagagttactagacattcatccgcatctttacatatgacgtcaaacccctggtcacggacagggatgcggtatagtcgtgtctaccagtcagagtaatctgaagttactgccaaggagatattgttacagaggatcttgggaactgctgcttgcagtgtccactaatttaagtgagttgtggcatcttgtttaaacttctcaggtgacattggtagttgtaatgacattagaatgaaagcaaaatgacattttaacctgtcattatttcatattggcctgttaattttgatggtagtgatttcagttttatgaagtgcttcctcttctaaaattactgtcggtaaaagaaatctacaggttgtatgacttgttcctggaagtgtcatctaatataggatctcttaaggagattcgactttctcacatcttgaaatcatattaatacccttctatcattaattctagttcagatctatatgattttttttatagttttcattctttttgatcccggatctcactgtctattcctgtctggcctggcattctctacatagaccaggctgacttcaaactcacaggtatttttctgccttgatgtcccaagttctaggattgaagccatggtcatctcaccgcacctgtcaatccatttttagttaacaatgtcacacaactataacttaagccattcccacaccttgtaaaaactttacatttttatgagaaagttgatatattaaaatgaccatttggctaagaatataaagatttagttataaagcccctgtttggaaaatgacttcatgtttaactatcagagaaatccgaataattagtttgcttgggtacagactactggaagactgacagaatggaaacagacatgggaaaagctcttgtctgctgtatggactccagtgaaagagttctgagctctacttttgccttcagactttaatttctctggggattgctgtgctcggctgagtatacaaagtgctattggttgtgattgtggagtagagatgcaagcatctcagtcagtcaggagccttaagtggggcaagagtcggcactgcatctgaggtagaacagtagtcagtagatggtgccacgagcatctttgctgttattaaaattaaagcatgaatgttactctggggctcttagtccattacatttttttttatgtttataactacaactggtaccatacaattcatcctggcagtttaattcattattctgtggtgttcctttgcatgcgctatatactcggtgcctgggactttcaaattggtttgggttttgtttctcctcgcattatggcaggtagatctgtctgttgtatgctttcagttattatgaaattcagtcagtctcccgtctccacttggtccactggtgtccccagatactcaagtacttcccaagtagtcactgctttcaaatgagttatattagtgttgtttaaataataactaggctcccttctcttctcctcacccccatattttgtgcatagtatataagaagaggacttgatagttggtgctagtcctggagcttcataattaggaatcaccaggaatatgcgtatatatacttctaatgtggttttgaaacaattcatattttttcttgttttttttttttttcagttgagaaggaatcacacacctcccctggtctatgtctggcttataagacaggataggaatggatgtcctcagagacttcctgctgagaatcaggccagagaggaattcttacctccactgcacaggtagccagcctgaggtttgctttaaggcattggtgcctatccgtgatcgtaggaagtagtcaaggggagacccacgcacagctcttaagactccaaacgagcatcttaagcactaacatgatttttgttgcctagcacataagtagtacctgtacattttaatttattcctcttacatgggaatttaaaatgccatatttttttctgcttccattattgtagttttgagtgatgattcatcagcgcaatggcctatttaagtgaaccacaatagcttgggtagaaagaaaaaaaaaaaaaaagattcaacatactcaggaatggaaagcagccatctttttatagctaaaattgcaaacatctggcaattaccctcttctacctcccctccaaagcgaagaattgtcccttcaaccggagcctgctgctgtgtttaatcaagacagctatgcaagccttaaggagcaataggttttgattcaaggaggccattgcctcacccacttggacagagaagctttggaaaacacaccgcgtaatgttccccatatgctactgtgttacataatgatactagtggtggcatggcagttaataactatagaaagccagcccggctactcagtccaactttcttgtgtggctctctaagcagttgtcatatttgaaatgtttactggtcaggtcaagttcgcctctctgtatcttcttaaaccttttgtgtcctgggtcaaagagtctactaaatcaacccagctaatagtttctgacttgattgttttataaagcggtctagggatgttgaaggaataaatccatgtcctttgaacacttggccttgccctttcagtgaaacatcttactctcctaccccaccctcatctcttcctctgatcattttttatgaaactacttcttccttgactggcaaaagccgtctctgtgggcaagggaagtgagagaggctggtggtttgcaatagatgctgagaatggtgacttcctcatctttctttttctcagggctgacccgtatgttcactgtggccctggcaatgcctttcttttctgttcccatgtatctttcctgtcctctgggtctctgaaggctagaggtgaacttcacctttcacatcttgggctgttcccattcgtcaaaggggatcatgggaaagatttttacttatcactggacaaggtatagtaggaacagaaatcaaggttcagtgtcctggtggttctcaaaaacagtctcacatactaaaaataggccattctcttgtcctagtattatgctgcctttagtcatagacttactgtgaggcctttgagagctttattcccttgctatatgttatttcaccttggtaccactgcattgaatgattggaactagagctttctccctggctttactaggccatccattcccaaagtctgagtgaaatctgttaacacctcatcaaactaagtctgatttgggaagagtgaatgggcaaagtttctagcttaaaaaatgaaggtagggatgggaactttaaataacctaaagtgcacaggttattcaacacagttactccatgtaaagtcagataaaatgatggtgtctgtaacatcaaaaagaatgtgctcacttctgtcagtccttgcccatttatatggtgatcaccttgttctaggtatgcatcttcaacttgaaatactttattatcaccagtattgtcaccatgacatgtttccttcatactacatttattcaatgatccatcccacatttcacttttaccaacagagttacagtctataaactcatttaaaaatatttatttagttactttacatcccagtctcccagccccttgactccttccagtacccctgcttacatgaggcaatgaacttggactcttttgggcttccctagactaaaggttcaagcaagcgctcacagggctgcttgttaagttttaggttgttcaacctttgacctaggttatcttgtttgccagttcagatatctcttagtactttgatatttcctttttctttttatgaaaataggataattatgtctctcctctgtctgtatcagtcacttgtaatgttcctatcatagttacacagcatcgggacttgtgtatagaggaccaaatccacaggctggctggaaaagtgatcatgtctttggaagcttgcatgatctcagtacagaggcagcagtagctgttgctctctgaccctttgctgctttggtctttggtgtgtgtttggagcatttcccatccataaacacctggagtagacgcatgatgaggactccttcctaaaatgtaggaaagtctctgaagcaacctatgggaacagacacataactcaaagcctgatgtttaagcacaagtttgatcaagtaaagatgcttttacagtgtgcttgacaatgttggtcttctctcttagcatgccctggattcagatttttgatatagatttttatgtgttccatccattgcataatttgaaacacacacacacacacacacacacacacacacacacacacaccaggtctcttagcttcttaataattttattatttcatagatctgcagacataattccattaaatagaggactcttctgagaaatcttttgctaatggtaaatttaaagctttttgttgttgttgttgttgttttctgatcacatttctctgggttgaattaatccatatataaacattactagttttatagtgaaattgccatctgccatcatgttgtcttatccttcaacatggtctagctgagaccaggtccaaatcttggctaagtctctgtctggtgactatagagaatcttcattcttttgtacaacgaatttggcacatattatcatgccattaagtggaagtggttttggaagtggaaggagaataaagctggagccccaggggaggatggagacttggagaatgatgggtaccatgcaggtggcatcagaccacccttactaccactgcttttcccactctttgaagaataatggtttctcctaactacttagagccttttcaagtttggctttgttctgaacagcactcctagatcgtcttcatgcatgctcagtataaaagactgtgggtgggaaagatctaccaggcttaatgctgatgttttgtcttagtaacactgactagaaggtggcatgcagccagatagggttaacaggacatcagggaggttgtggaaatgtgtgaaaatggacaaaacacaccagtaatcacaatagttaccaaacaatgggctagttttctcagttgtcaaaacagtgtgacagaacaactcagcttcatttccatccagatctaaactgtaggatggtgctattcactttcagcaattgtttgacaatggtttactcctgaaagacatggaatcaaattgtttccacaaaacacaaatttagttatgttataaaattgacctttggatgtctactctgtgttccctgtcagcagtcccatgggttaatgttttacttgttctttctccaaagtctttgcacagtgtatgttcacatgcttaagtgtatctagtttactagtgagatctcattaagcatgttccggtttcttgttatatcctttttatagcattattacagcttggcactaacattttttgttttgaaacaaattaaattgaaactcagacagataataaacaagctatccaaggtcttgtggcttacaaaaaaaaatggagactttgatttgagtacagctatgtctaaatgccagttccatagtctaatgttccgacttgtaaagtctgtgtaagaatttttttgttgagtgtgcacacactgaactatggataactgtgtggctataggtagatagatatcaaaattggaagggaacaaatttgtttttgaaagtgtgtcagagtggaacccagccaggacaacttcaattttgataaaaattaaaaccttaaaggaatgaatggaatttgagtaataaaagctcacagtgatggtgacggaaactgtcagcctgctgtctttgtaaagatgttatagattatcctatgtgagcttgctttgaagctttgaatgtagaaaaggtaactgaaaatgtctattgtttagaaatgttgtaactgtgtgtgtgtgtatgtgtgtgtgtgtgtatgtgtgtgtgtatgtgtgtgtgtatgtgtgtgtatgtgtgtgtatgtgtgtatgtgtgtatatgtgtgtgtatgtgtgtatatgtgtgtgtatgtgtgtgtatgtgtgtgtgtatgtgtgtgtgtgtatgtgtgtgtatgtatgtgtgtatgtgtgtgtgtgtatgtgtgtgtgtatgcgtgtgtatgtgtttgtatgtgtatgtgctcttgcatgctcatgcctttgaatgtgtttctgtgtgtctttataactcatggaattcagttctctttgatgctttggttttgttgattacattcaggtcaacaagctttgtgcttctacctccagggcccatcttgagagcccaataaaaaaatcccaggttgactcttcgatggaggaattgatagaaaagtagattaaatggttgcatctttccagctgtctgaaggaaatatcaatccaggatagcaatgatcccccttgagaatctttactcgtatcttatatattttactgtcttctccttgatttcttggtctgttcagaggtctccttttgtaagaaactcctaactcttcctgaagctttaaccactggggtaaatgggtgggcaagctgaataggagactcagggaagggaactgaagcccaacacttagttgtacacacattgagcaaacacatgggtttttcatgttttctgccctgagctggttaggattggaaacagaaaaatgtaatctttgcctggctctttatagtagtaaaggaataagaaattaaagcctgaccaagaaggatcttaagagaccttatccaagatggagagatgaattcagaactttcccacaaatgatgtaaggaactattgtcttaataggtaactcagaactcttaaagaagtacattgcagtgtatcagctgctgcaggaatgggtactgggcaaccgccatagcccctcccttaaaggaggataaatcctttgactccatgtgcaaaggagctcagggaatactgatctgcagcagtgagagggttaaaaaagtccatcattgtataagaggccctgcgatcttgtctgaaccatgtcaggatgttgcctgcacgctgtctttgctgatcacagtaatccggtcataagagaaagagaagtaataagagtgtctcttagcaaccaaccccaggagaaagagaaaattactcaaactgagccattcagctagggaagtagaaagaaaaatattctgaaagtctgaaaatgctcaagttcagtcttcaatgccgcagacagaggtggcaggctggggtgggtgtgttagtaacaaaaatctgtgagaaattgaaatgttctctctttcgctttccttctgtttcctgccacctcaccctataagatacaggagtaagaaagggtgagccaaagaaggctaaaaagtccttctttcccactataggacctgggtggttgaagcatgggagaagagaaacggaactcactcactctctctctctctctctctctctctctctctgtgtgtgtgtgtgtgtgtgtgtgtgtgtgtgtgtgtgtgtgtgtgtgtgtgccatgcaggtgctaatgcatgcatgtgcctgcatttgtgtggtatgtgtgctctggcctgtttgtgtgctcctgtgtgtgcagagatgcatgtgtgtgcacatacacaaacacatctacgtgtgcaagtgtgtatggcagaggttcatttacccagcttgtccagtggcgatcaggattgctctttagagggagaagtgtgaaatctaggggtgtgattcctttctgaagacttgctttgcccttactgcatactaattggctctgtaatgtgtaggtgtcagctgtgaagctatgtatgcttgtacactttgttctatgatagttttaaccctgcccccttttcttacaaatatcagtaagaggtacattttacactgacagttgtgcgtcacacatgtatgtaatttgaagtgagagtttctttacatatgcttttaaggtatatgttattcactgtactttctattgtctgtcattttcaagtgctgttgaagcccactgaactgatattgtggtccttcatgagtgagtatcttttcccctctgatgaaactagagggtaaatttagaatttgccttaaattttgatttgatcaaagtgtcacaaagcaagtatagtcatggagaagaatcctggggcaaaactgtaatattcagggtcatagttactttaaattcttttttttttctgttaagtcaccatatcctaatagcttagctggcttccatttatggaagtaaacccaaggcacttcctctagactgtcagtgtgtagaagcaagtcacgaggtagccaggaatcactgcgttgggtaattttgcacgtcactccggtttgtaacatactggaatctggagcgggaagtggccttgcaaatcattcagtcttatgcatttctaagattcaatttcagaaaaacactgattgacttctgcctctctataaggatgttatgaactaatatttataatttagttatattaataatattataggggaatattagatatatgtatatacatgtatatatataaagttatagatatacgagtgtgtgtgttgtatgcatgtgtgtgagtatgatcttcgggaaagtgcgacttgttgaaaactatgtgtggtggaaaattcaacgtgggaaaaaaaacagaaaagagggtttgaaataatagtctcaaggttgcaaaagtctagaaagagaaagcctttgtatcaggtcccctggacatgagaatacttggagaccatatttgttagttcatggagagagagagagtcaagtagagtacatgtcgtaagtaatttgaaaagggaaattctttttgctcccttgagtttgttgcagtgatttcacactcatcagtttcggtatttttctatattgtgtaacgtattttgtcccctactagcctgcatgtctcattgccagctgcttgatggcaaggtggggtttcattagtagtgggcagtatgactggctcttggaaaccattcttacataaagatatggtgtacatgccctcggagttggaagaaaataaacagggacctacaaattaatatctgttgtctttttgtaacaaatgacacttgaattttgttgctgcttttctattttcttaaggcagaaattttatttgattgcactttttagtagtttattggccacagaaagaccctctgttagtgcgtatgctagagatattctcaagtgatgtccccttctgagccagactgagctttgtaattaaacgagaattagcagaagtatgtcgtgcctgtattcctactctgctagtaccttttggtgagggtgctccaagttctcatatatctaacactactgtctagctcttcctattatcgcagtggagtagacagacagggatgctgttttctcatagcttggtctctgactcagttccttgatagaaatttattctttattctttattcttcatctgtctcaaacataacattaacggtgacagaagccaagaaaacctttcagtattgcatggtgtcttataacacacatggagaaccattactctatttgatctttaggactctttgatatctaaatgccaggggttattctcattttatggagcttgaactgagtctacacagctgtttccacatagtatcactggctataaaattgcagagtggatgatcagaacggccagtgtttggaacctgagtagactattttaggaagtgtaaaccccctaaaatttgaggccagactttgtttcaccttttacaatgctgttcacataatatgacttagaaaatgagatgatgatgatgatggtggtggtggttgtggtgttggtgttggtagtggtagactttctaagtcccactccacactgctgttttgaataaggttttgtcccagggatgtctctccagactttctttatgagaggtctctgagaagactggaacctctgttcaaaacccctgcttttgatgagcatggtaagtgatacacattcatttagctgttacaaagaaaagttcctgttatttggaagatttgctctttccttgattgtttcaattgtataagcctagtttgtattctttttctttgataacattagatacatttgaagattttccatgtatttttataagatcaataaaagcaaatttacttagtaaccccaaacctctattttgtaatttgtcagctcctatttttttttttataattctttgctcatcaatacaggcgtatagttttcttaaaggcatatttattttaactgtatgcagctgcgagtgctgttccctcagagtccagaaggaagtctaggatctcctagaattagggctacaagcagtttgagccatcttatgtgcgtgatgggcaccaaacgtggtcttccccgcagaacagtaagaacacttaattctgcatcaattcttcatccccaggtcactctgtattgttcattaactaaggactgacataagtttatgttttcattaaatgtgatagtataagaatctagcccaacatttctagcagtggcttattaaagtattcgaagtgacaaaataatttgaattcccattgccttgttactggtcatgtgtctttcctatagtccctacagtcaaggtcttcatagatataactgtatggggaaacgtgctggaggattcagatatttactgcctgcttccctgaactgaacccgggcagctctggaaggatatttagaactgattagataagagggttttatgtactggaggaggtagagatggttgcacagatttttctcctagccatacccactgatcttgaacaatggacacatgagttcaggtgtagtctactgacagttcctggtatattatcctgtgtggggctgggagtgtatagctcagtagtagaaggtttgccaaacaactgttaaggtggtgggttcaaatcctaccctgcataaataaaccaaaggaaaaccacactacttgtgttcttgtgtctcacatagtttcattgtgatatgtgatggatcctaagtgaggacatagacaaagggtagctgaacgcatgtccttacagttgcttctgtccctgtgacaaactgagcctctccttcttgtcatcactgttttaataatagtaacatgacctatagtaaagattttttagtattaaccatgttctagatatcattcctgatcctcctctctcagttgtcacgttaattttaagaaattgttttgttagtgtctttcacttgatgctgatctacccttgtcatggccacagtgctttcttcccgatatgaggcaaggaaagacaggagccagagtggagtcttgtaggtgtccatgttcatgagagtcaacacagttctgatcctgaggctgagatcagaactagtgtttgagctgtcattgtggaatcctccagaagcaggatgaaaagagttgctatggcaggcagcagagactggacttcattagggctgtgactttctcatcagctatttggttcttgaagacaggagtctggcacacagttggtatacattgttaatttcaggctcaaaggaacaagtggatgtttgactatttcaagagagtctacttaattcttcagaaattttgttcatctgtaatcagcctagagttttcatggaatttctgctaatacaaaatcttgtgtgatattaaaacagagctctggaactgtgaagatgttaacacatttcaaaatgtgttggtttgatttattgttttcttgttctgataaagataggggactactcttctctgtttagtgattaagtcacccgccacctttttctattttggtctttgtggtaatacatgtttcctggaaaattccccccccccccccgttctattaatacagtaaaagggggttacggccgtgactcaccccaggaaatcagccttcgtttgcttcctcaatctcacaaacagtgcagtccccatgcacaaaatcaacaacttctgcaaatgggttactttatagttcttaagaaagttctagaaaatacagtatttgtggtcgactgtgtgcttcctgtgatggtggggattgtacaaaagttcaggttttgcttctcagtgttcgtgaaatccttgccacgctagatcagtgatatggtctctggtaggagttctctgacctgctgatgttgagcaaacattccaggaacacatccttgcacagttacagctcagggcaggggcttcagcagttactgtctgggggtcagaatttcagtgcacatgaggtgtgtgccagcttagagtcccactgtcacccctctgctcactcggcaatgactggatggggccatccacacattaattctctccatgtgtcttggcgtctctgaggttttgctcagttctcctcatgaacttgggacctgctctaaggaagcttccattcccatgactgtgactgctattacacagttacctgtcatgtccaaggacttcagactgtgagctcatcctaaggatgtctagcctcagctgatgtggatcaaggctgcgtagagtaagcttagtcattttaattccatacgttgttcaaccccaattttgtctagaaattcattcttttaaaaacagaaatggagtttaaccatgtgttttctgtaggatttgtattttccactttgccttataatttatattcttccttagctgattttttaggtatctgactgtgaattttttctgaattataaatgtcttccttttgacattactcttcactgcctttctattttcctggtacagtatgggataaatagtagctgttcactgtttgagaaatgctaactatgtggttatttgaccagtgagtgaacttctctggatctctggtgtaggaaagggtagaggaacagttcctgcttattttgaaggctaggtattatatttaaaaactcttttaatagtgcctggtacttagtaagcacttactaaatgttatcataaataaatgatctttctgctacttataaagtagccacatagcatttccttctaggattttcttccagtcttttatgatggataaagaagagccatacagtctaggagttcctgtcagctttctttatataggaaaccagatgtaaatatgctgtttcagttacatacatctcatatttttatatgattgctgacaaaacattaagtaagaattatgctatcatattccctagatatcaattcatgctctcattaaagtcagacatttatctggtactgctgactgctgttcttacccgcagtaatgttaagtactgtcaccatttaatggtcttgcctgacctttgggcattagtgccaatcctttcttcattctgtccatgaaaacaacaacttagacatcccattccttcctccctgtgtcttcttctagcttagaaacctttgtttaatagagggcttgaaaacttgctgcaacagaaaaagattgtaataagaaattctttcttccatccttccaagtcgaagcatgtgtttatatgccttttcatatgtcacacatttaggtgcatatacttttatatgtgtaattttcagaattttcctgttatacgttgaacagttgcctttgtgattgctgctgcaaagaactcagagggttttatttttttttcctttcatgatttcaaccttgagagtcagcagtcagtgtgctctggcacagggcatgttgttttgcatttatcagatgatactttgcatgcccagaggggatcagatttggaagatgcatgcttaagtttttaaatataagtaactctacagtgggtttgtgtttgtcagcccagtaaatctttatagaactttgcattgcagttgtctctgtgtgttgataactgttccctggagagtacagcatcagaattgaatcctataactccaatccctaagtctactgctgcacatttcccacagtacctaacggtatgtggggaactgctcactgtcctgtcccgtgtcatatgccatgtgggcagccagtgcacacagatattctctatattcagctttaaccgccacaagtcactttttcatgtaataagtgtaccacaatgcccagcgggttgtagatgcttagtagttgctggaagattattaagttacccagatataaaagtggcaaatggcttagttacctgggtgtggaaacgtctggtgtggttctagtgggagctttctaagtgtcttagtttaagctgatgacatagtaaagaggatcatacctgctctggtcactgatacagagagcctacattgcccttcaagacaaggcatctgtcacctaaaagcccgatactttcccatggcagtctaaaaggtgacagattctaggcgatgtcttttgggaagaacagacagacaccgaggatgctgctcttctgaacagcttttgtggttaggagtgagactaggaagtgactggatcagtgtggaagcctcactgggtcccaggatggagagacttaggagtgctgttgtccagcctgagagagtggatgtattgtcacatgtgatgctgatttcccctttctatcagtaactgtgtctgcagcaccttcttcccactgtctataccaccacccctcattactccttttgcttgctaaaatttgaatacttggtaatgatttgtaaaaattacattccatgtgataatgtatcatatcagcaacctgggcaaagagatatcctctaaaatccgtagcatgaatctgagtgagatgagacctcacctttccctgaaagaagtttgtttgacatttgtttgttcattgtgttgtgtgcgcctcagttcattcttttattttattttatctaaggaagttatacctattgatatgtcagtgaactatgtgtatgcctttcctttgaggccagaagtggttgttggatattttgggactagagttacaactagagctgtaagctgccatttgttttctggggatagaacatggggttttagaaagaatggcctgcgttcttaaccactgagccatctggaaagatcctgtgtgtctatgttgtaaaggaatttctgaacttaatccccgcacagtttcagtgcaagccctttgttgtagtaactgttccagaaggatgcctggcgttgtgtcctgaggatgctcaccagcttagatcagggagtagagcagcctgggaaagctgatggcgttcttcctgactctagagtattcttgattaagaatttgatggaggagccaattcttgtggtatactcctacaatctcaggacctgggaggtcaagccaggaaagagctacaaatttgatgagtctgtgtttattttttttaaagatgtttctagatgattaaaggtgtcataggtctacagtttgtttttttgtttcaaggatagagacagacagaaaaaaaccattgagagaatatttgtgaactttccttccagattcagttttccatcattttgacttattagtatatacatagagaaacacatcaaattttccagaatggagagggactctataaactctgacttcatttagttgcgtatttagccccatctttagcaaaagtgaccattcctgtcagtgactgcatgctgtacatccaaagtgaacgtgttatacattacagttccaactgaatcggtgtaatggagtacaagtgaatgcagccctggcctacctctgaggcctgtctctctctttggcagactctgtgtcctttcttgtaaaaacctatccaacttaagattctccatttaacagaaaatcttaacctttatttgtttcttttctaacagtatattagggaaagggtagttgtgaatttgaaatgctgaacacatttgaaagcctgtgatcatatcagtctggatgagagaaattggtggggtgcgttggatatcttacatccggtcctccttatttttggttttgacttccaaagcttcagagctatgctttctgaccttcctagttagcagtgctgaatctcagcattgtgtcaatcctcctcagctactaggatgtaaagcagtgttgtgtcatagctctaacatgcacaggataggaaggagctgcaatccagtcacaatttttctcactcaacttcactttaccccgattcattaacaaagcactttgcctctttcctccttttccggggcacagaaggaaatggatcacaccagaacgtctaatcagtttgttcagcaggggtggcatgctcctcatttcaccagcgtgtgtacaatactttaagcagagatgcatcattttcaaacctaccttgagtctccctcatacctgcttatagtctttggcttttctcccctcactgaaatattccaatctggaaattttatcgttggactctagatctttctccctttattttgtagagtcaaactacataatttcaatactgtgatctacaagcatggtctagttttgttctgcataaccttcttatggttgtgttatatccttcacactataaatgatttattgtgtgtatacctttgttcctattcatatatatgttgaaaggacacagagagcaaacagctttgcgaccttagccactcattgaacatctaaatgggaaaataaagttatttcttgtactttgaatataatttaaatagggggaaatgtctattataatctgtttagcatgtactcaggattttaagaaaaaaataaaagatgcaggccttagttcaataaaggaaagaatcatgcatccatccattcaaataatgtttaggagtctgccacgtgccaagcactatctttggtttgtaaataagtaaggctcaaggtccttgacctccttggtcttctaccctttaaagaaacaaaggcacacagatacagataaagcactccccgtctcttcctctctctctttacctgctccctggtttcagagtcgtatatatcagttagttgaaagagatgaagcaccctggccatttgtgctagagaacatatgtaatgacttgctaccagttatctccctgcaagccttctgtcacaatcaagtgtttttctccttcctgttccattgggcagcgatggggacattttcatcccttgccactcagggctttttctttctagtagaaacaactgtgcacacaaaagcacatcctgtgtgcatgcgttgtgcttactactgctatgaaagaaagcatcatgcatacctcactcagtctgggcccatgctgcaatgagtggaaatggcgccgagtactcaggtgggcactgtccatcatttgagctgaatgtgcaggaccagcttcatttggatgcttagtcccacgtggcccctgcgaaccagtgaaagtagcaagtggcttttagtttcccccaaccatgtctctttctgctgccgcccaggttgtgccggtgagactgcaagggcaagatgggatttgaactgttgctcatgttcagtttagttttcttttgaaaagcaatattatagtctgtggctatgggtgacctcatctccctttagcttctgtgtggttggtttttataatgctatactatataaaagctcttttgacttttcattttgttactgtttccattttaaattttcatttaattaaaaacaatttagtccctctctgcctttctcagctcatttcctgagtttcctttctttgttttgtactggcagattgaaacactttctctcccctatgtttccccagactgctgctgttgctgcttctccttctgcaggcctggtctcagcatctaccttgtttctaacctcttaggctgataatagctttgtcttcaacagcaatgagaagactgagaaggcagggagtgattttgtttgtctgtttgtttgcttttgcttttttttctaggttctttccaagccccatgcttgctttccagctttctagaaatgccccactttccctgcacaacacctgctgttggccatttgtcatccttgtcttccagagagcaggtgctgaggactccagggctggaaggaagagcttccatctctcccttggtggctgtagccaaccaataggctctctgtacctaatgtgaatctgccttcaccagagagcactgcaaacgccccagttgcaccgagtcattcaacactgatacgtgatgcatggaaacttagaatctcagcggatccaccacggcacttgcttagctaagcttggatggaacaagcagccctcacatatctgatcattttgctgaacagaggatgtgcacatcatcaggtcttttaaacatttcccatgtcagtcgtgaagtcagagtcgagaaacatgtgattttatgaaacaacataagatgtgaagcaaaaatgacctctctgggcacccatgtccagaggttggaaacatgaagggcaatgctgccactcctgtatgcacagtgttgaattggctccaccttcttcctctgacgtagagaggggtcttgacattgaatgacacaggagtgtagattggggctgaggaaatcctcagaagacctaacattatgaaaaggctgggtttataagctgttaagagtaccacagtgagtgtcaagagattactttgggggcccaggacttatggtagtgccggctgcaagttgactctatttatgtggtttggaaacatggacccactctcttcttttgagcattatttctcgttctttttaccttggaggcagacctgaaagggagtcagtcaggtgttgtaggcggggctgatggggctgaaggcagctctgcagtgctgagaggctcaccttgtttccttgtgtgtgtgagccctctgctcagtcccctggcagagtttatatacacccccttagcactgtggtctctgttaggttttaaccatcttctgttgcctcatcctcactctttattttggtttcttttcttctccaaggtgtttgtgaatgcctttctgtatgcagggctctttagaaatacatagagctgtttaaagtaacataataattgtttatttgccatatcctgcattttcagttctcttttatatcttttatatgtgtacaaccaattctaagaaccttctgtttgatagataggcccaatgaggtacgagactgtaagctatttgaggggctgtgttgggattcagaggcaagcagccattttctttggctgctttgaccttttgtgctcacgcaccttatttacacgctgccagcctggacctgcccatgcctcactttgtacacccagcttatttagcagagactgtatttgctttcaatagaataatacatgtattatttaatgataacagatagaacataacattttgtgaggatttataatatactctttgagctagatctaggatatgaatattatctggataatgtgaaaacattaatataagcttgcaaactgatcaaatatgtacaagatatgtttagacacagataatacttaatgaacacagactggtaagaagcccagcagggcccctagttcactcactgtccacacaacaggagccactgctctcctctccctaatgagtttaaacaggcatattaatcggcttctgtctgcatgactccagccttgtaatgatctatgcacattgcagactctctagaggtttactgctcccaacaattcagagtatgacatcgtatatgctctctgtatctcatgattttatttccatagataaaactcaatgtgatttaagcatgtctttctaactttttggtcttatatacatgactggcttgagcatctttgtacaatatccttcgggactcgtaggcttagggtgtggtcggaagctgtatagttagtcattttgtgcctatctagtcagttttagcatttctgtcaagatgttttacatgtaggttatttcagggataatgtatcctgctgaagtgtgcttgtcttgttttgccctggcatcccaacacatggtaccatgcagtattgtagttcttgctgatacggtggggagaatggtagttcctagttctggcttctgtttctatatgagaaacgatgactcaatgtctcacaatgatgtggaggaaatgtctcatgaggagggcaaagcatctatttctagtcaaatagctgtctaaaatcatgattgcagaggattctgtgacatttcagcagatcttggggctagaaaccaattactttgacagtgatgccttggccaggacaggtcactttggtgacagtcttgaaggatccttctttaatcatctaattacttttgtcttagtatttactgtgtgacaatggggacatggttgtaagcaaaatgaatatggctttggttttatgaaccctttactgtagtcgggaacattggtgatcaaatactcatggaagcatgtgattgtagaacacaagcattgccacacagagacaagagaggaactatagtgtctggtactggtgctcgcttctgtgcatgcctgtttgatgaatatgtgtgctaagagtgttgtaggttgtaggttgggataatagtaatggattggtcagggttctctcaaggaaaagaacaaattgattaaatagataaatatattcatgtacacataaattacataataacacatatatgtagaaagacaattgtgcatatatattaattaaaggggtcaattataaggatataacctttgtattctaccttgtaggtctcacattggataggcctagaatcctagagatgctcaggccatgaggctaaatgtctcagcactgccagtcagagttaacagtccagaagattcctggagagccattggtcttcagcctgtgtttgaatcctgaggaacttggttctaatattggtgattgatgccacaccatgatagcttcaaagcgatggaatcatgttagatattgtgctagaaagctgagcagatgttccctgtttgtgttgagctctaaccagtgaactaggtcaacactgtccatggagtttggcaaatatttgatgtccattccctatggcatggagatcttatcttgttctgtgacctcccctttctaagtatgccattttctcatatctaaggtatattacttcaagaatcgggtttttatccccagggaaagttagaaaatacaaaataaacaaataaaaatcatcttactgtctttcagtaagtgggtatcagtataactactaacctatcttgttttttaaactaatagcaagtcattagtctactagacattgcctagataatgctcatctaccaagaggggcagatctacatttcgctctgattggttaaccaggatatgcagccatgctagaggtccttgttcagtattagttcttccacatcccaactcctcatcgtgttctttaatcctagaaagtaatttctggcactttccctcgactgttcagaaccctggattactgctgtacatcaatgatagtacactggcaatagttgtgtgagtgtattggtctgaacctatgagctgtctatggaacaccagagtctgtatttttagttcatttccttaggcaaatacaaacattgcacagttacctcgggcatacacaagctagactgtcagcatgagcacaaggaacctattagtttaacatgtaccaggtccctccttaagctttggatgagaaaatcgaaaggggacatttataagctaagcgccacatgtgtgtcggattgagtatagattacaaaccattcaacctatatcaaatactgaacttcggctaaggctggcttgaactctgagagataaagtccatacagtttatctcgcctgtgccattttaactcagaattgtgttgtatcttaagttctggatgctggggcttctttcatgacttccaaaagcacatacttttctggtttttggttgtttttttttttttaacaatttgccatggacaattttaaaaactgttgtaacaattattttaatgtttctttccacatatgtcatcatcttcagcaaggattggctcatgtacttctttgtactgctgttcctcctgtcgcatgtagtccctctctcttctttccacagccttccttccctttgatggtcacttcatctcctctgtacctcagtccttccctccggaattgtctcagagataatctcaaatatcacagaatacaatcagtgctgtaaaactgaaacttttgtaggtgtgtcaaaagcacttctctcagccataaataatgttaggtgaccatttttgcagggtgtttattgatcttgtggcttttgccttggggcatggtgtgggaaagtttaagagtaaaaattttaattctgagtgacttctctggttgggtgaagtgacagactggtctgtgtctattgtagctattatatatatttaaaatatttagtcaaatgaaccatattagcattagtgagtctattgtattgtcagtagagttctgctcttaattataaactattttaagatatagatagaagcacaggtatatatagccaatacttcattaaggttagtggtttctctgatttcctcagtctaggttataagattctgtgtggtaagcacagaaggtgtttgcttttaaccaaattacctagaaaatagagagggaggcagaagtttatattcttagaatgaggaaacccaagtgaggtgtttctaatatagaggcagagagcagacagacagtacatagcatagcatagcatagcatagcatagcatagcatagcatagcatagcattgattgctgtggtctcattacatcttcataaaagcttcctgagcaagggtgttctcagtgatccacttggggaagcaagaagagttaatgtgggtccccactttccctgctcacacggcgctgagtttcccaggcttttgtagaagtatgcttttagttcctcctgtgtcattgtgaccactttttgtaacaacttgactcatagcatcccagggaggcttgccattctttagggctgggaaggcatagtggggcagctcagcctgtggctgtgcatcatgggatacaggcctttccatgttgctgaccacgaggcgcacagaggtagaacataaccatgtcttccatcagtcaggtctcagttcctcacagctctatagcttcaaaatcccgataaagtgaagcaaagggttcaagaatgattctgtggagacatttcccactcagatgatggcaccatgataagggaaaaccttaaaatatttgtccaaagggcttatctgcctaacagaccaccggaaatgagatgacatttcccattaagcctgattctagatccttacacccagttgttcctaatagatccataaccctggcttacttgggtcctctgatcagatgcatgggtgttctgttgcatggatctccttgtaagctaaagagatccctggttatgtgtccctgttctgtattaggtgccagtttctcacggttctctctcatactcacgtctcctttgcttgtgtcaaggagctgctgctgaagagatgggtggcagtttcattgcagcagcttgatgaagtgactttctgcacacagagtgaattagttggcatgtcacaattctggctttattttcccttgtcccatgataggatttttttttttttaaaacaaacaattgcctaatcaggtaactcacatcttatccaaacagcattaactttgtgtgtgtgtgtgtgtgtctgtgtgtgtgtgtgagtgtgtgtgattctgttagcgtttttgaattttatgtattatgcgcatatatactagtgttacctttacatttggggtgtcttttaattttgctgtaatttgcaagtataatcaagttcatttcaatttgctttgaagttattaatctgttgatggaggttgaaggtctaagtggatttgaaatgacttcccgtgtgccatgtgctgactcagtagctcacactgcctctcttcctgtgtgttcactgtacgtctgttcccctcacacctgctatgcctgcataactcttaacctttccggttgcatttgccctgccttccctgcagtttctttactagtgaagagcctcactttctgctatgcctcactgtgctgggtccctgcctcctcgggggtattagtgtgttctgtggccctacctgtgttcagaatagagacactgctcctctgcccctgctgtttggtaatgcggactgtggaaccttaacatatggcctcatcagtaataaactcccctgagaagccatgtcagccacttgctccccagaatgtcctcatgaaacatccttggcagggtagcactaacactcggggctttctgtagcactgcccttttttttctaaataacaacaacacacaaaaacaaaacaaaacaaaacaaaacataaaacagtgtttccctgtgtaataattccctttcctagttcctggccctcacttgtgagtacctttaacccagtatctgagttgaggtgttgggaatatgtaaaacctgattattttccctattggcatctccttattcaaatgatgagaaatctgtgaatctgctcatgccttgggggtttcttctatatactctctgatactgaaattttgacaaaaaacgggttgagtttcatactttccaaacatgaattttgtccttggaaaatggaatgagtcatcttctttatgtagtagagataattccctgacatgtgatatgctagctgctagtcatgattttgagttttagtttatatctaatttatatgaattaacatgaagtagaatttacaattagttccatcgactctctgtgttttaggcgatgactcccatgctcatcgcatgctgggctgtttagaacatcccatttaaaacaaatttgtattgtccagtggcgatagaatggactccatagaggacagttagggaactggaggaaccagtcttcaggtgtgtcttactgctttctctaagcttagttcaaacaatattggcctgtattggtaatcaataagatactgagatactttgttttcaagatactttcgttttttgttttttgtttttttttttaacgtaggcaccaaaaaccaaaacaaaacagaaaactctgtaggataaatcctcgctggcacagaagatcaacacttagacttgttttataaccgagaggattaagagtacaacaccgcccaatccctagaatatcagagaaacaaaggccacaggtgtttgagagctttgtcaggagtgctgtttctagaaatgtgtccttctcatgtttatgcccctgctggcttgggatgagaagttgttgggaatcctagaatgttaagacccctgtcctcagaagatttctatatcatagcctcgttccaatccagtctgaggcatacgaacaaaagctttcctattaaaatgaagagatcaacaaagtaagtagatggtaaatgaatgacatcatttgtttgtttgtttgtttgtttgttatatagagtcagaagctgtggttgatacactctggtatttatttttgggagaacgattttgcctgatggtttgacagaaatgccaggacagcgtttctcccctttgggtggccagacagaagtgaaacctagttgactttcacttccaatttaccttgctttgatttccaatttattggcacccaggatctggtgtttgggtggtgaccaagatcagcgggtgagggttactatgagaaattccacagggaataagttggtgttgggtgcaaaaagctcatatgtcctatttgaggctgtgtgaaatgaactggatcctcccaatgaggtggccccagagatttaatcctctggggtgactgcattcacaagtcttttcaagagcctaagcaccataaaatacaaccacaaagccttccttccaaggaatgtgtgtatcggctcatgtcaagggctcttagcaggaaacaatgagcctaaagccataatctaataaacaaacagataatccagttcaggtttgtctaggtaatataatgtctctatcaaactagttcttgcacctttagctctattcagaaggaaagagttcttcgtgggaatatgtgtgttttcttagcagggggatgtgtgtttcccgtgaccgcatagcttgtttttctcttcttgctcagtcttgttgctcacggtgggaattttccatcttggtaatttggtattttccttggtttttattgtaaaggatggaaatgtgtacacctcaatttcaggtttcttgttgcaccacctccatctcagttgcctttggcctgggcagccagtactcgctcgtcttcatgcctttctacccaccaaacctttaggcaaccagcaagctcgaaggtgaagctgtttctatacaggaagttcacggattcctggggggaatttccaaaggtctggagtcctttatactcccctgtgacaactgagtggcacgtggaaaatactgtacgctgggagtctactttgaaaacaactactgaattgcttaatttccaatatggccatggggttttggtatgagggaggtcagtcattagcagcacgagttactgagttctctttgcctgatcttgcctagagaattatgtgttatggtaaatgctcaatgagtgccttcttgcagttaggctaactgccctgccataacatcgggctattttctggctactcaggttggaaacagtctgtctctttgctgttaattcgccctcacattttgagtcacggagtcataaaccattggtgttgaaagcgtctttaaaagctattaagcaagtgcctggcacttacaaagctttaatctgtatcacagtatttctcctcctcaccccgccttgaacatgtgcagttataggtagttttcactttctcaagccagtgactttctagttttctttcacggtcaagcatcaggcacttagcaaacgcagatacactgaagtgatatgttattgccaatgtttctgtgaaactctttgtaggttttccaaacaagcttaatattcccagctgtatcatcagggtagttcaggctcatattctgtattacctagtgtcagctgtaacatgtccaaagaagtaaatatggttatagggtggcttgctttttgtttttgttgttgcatgtatctgctagatatattctacctctcattccatttgttatcttctccttaaagtcacaaagtagctctctggtccctgattctggtgtggaccatcctatcctgggcagcatcagaatcctttggaggccttttctttttaaatcgatgcagtggtgtaaagaaaagcctcccacaggtagagtcaagaactggcttagctgaaaatctaattttgcttcctgaaatgcatttctcagcttaccatctaacatggattttccctaaatttggtagcaagattatggatcacaaggagaacagtgtgtggaagacaaaatagaatgttgaagtaatatctaaatttggaaagatatcctgaaatatgaaggctgtcttaggaagttctttaacttcagatgctctgtgtcatgacgggaagacacttacagtgccctgaggaacctgttccctcccagctttccagtgcctcctgcagcctcctccttcatggctcacggtggcatgtggaatatctggtaggaggattccaggtcctgattgctgcaacctgtgaataggttggctccatggcaaagggtcttcgtaagttaaacagagttcaggctgctaagcagctgagtattcacagtaattttccttagaagtcagtgaggggcaaataaaaatagtttggagtaatccatgatgagagaatgtccaaggagtgttggctttgaacatggaaaagaggccacataccaacgaatgagggccagttctcaaagctgggtaaggagaggcaatgtctctgcagacattcataacataaagcagctctagggatattttgggtttagtccactggtataaatgatggacttttgcttatgaaacaataagatcagaaacctatgttattttaaactctgaagcctatagaaacaatgggaagctaccagagactatggtacatggagatcatttgtttgcttatttcacctttttggaaaaggaaactttcaagctttactatgtcttatttcaacataatttcatctgaaaggaacatacaatcccctgacaaatagtaggcagaactagtgtgtttattcagtgtgtgtgcagaatgcctgaactttttgataagggtacctttactgaatctaaattttcttatgtgtaaagtaagttgctgggcaagatcaaggtcagtaagttttctgtaagtcctaactgtcactgtagataggcttttagggaagtgaggtgttttctctacttagctttgacattggaatgggaaagcagccacgtataataagtaattaaatggttgtggctgtgttccaataaagctttatttgtaaaagcagaaagtgggcatttgtccatttagaaattgtttatgaacctttgggcttttgaaccttcttatgctattcaaatttccttctaacctgattatttggtaggtttataatgttgtgtattgtccattaagctgaaaaagtgtcagtaggacttaaatagagactcaagtgtgtttctttgtaagaatccctgtagtatttgcagacttaagtgccaggacgggaactgctaccatgtccttggcaaacggacctggaacaaatgctcttaaggatgagacacagggagacccttgcatgccaaggctgagctcactcatcttgagactcgaaggactgcagctactgttggaagaatacacgggtgcaataaatccagtgtggtaaggaatgatagaccttccgaggccactggccaaatgaagtgaaaggagggaaggaaggaatccttcactcagctaaattatgtctttgggctgctcagacaagtccactaaattagcaaggtgcttgagcttcagcccagaatacgtcattggattgtgctgtttgtattgtcttccatcacaggacctcctctgagggagaaaggtgaagtaaatgaaatgcaagcagtggctgactccctaaagacaaaacttgctttttccagagaacttaaatattgaagtcttaattggacatgacaaatcttgattcttcgatgaataaaatccaatagattttggacttttaaaagcttttctactggttcaggagttgaccatgtttatcatgctggagtgtggtttttagagcagggcttgaccatgttcagatgttggagtgtggtttagagaacaacatggggagaaagagccagttaagcaaaagaaattgggttgcgactgtttgtttgatcaccagattgtggttgttgttttgacttggctgatgtatttgattttgagggtggaagtgaactcttctatgagtatgttagatttccctgttgtgtcttgaaaattgtttaagaacagattgtccttaaggaaacaggttagcaagtaatacatagcagagccctggtaaaaacagagtttaattgttttagaagaattcactggtggacattttaaggggaaccaagtataccagtggtgaggacttcctctgccatctctagtcatatgtttttcttttctgtccctttgcctttgcccttgagtccttagaagcacagtatactacgagctatatattgtgcttatttacttaattacatttttatgcttgattttctaaatatttgtgaagaatggtctgatcattaggttacattaaaaatcacctcatagtaaaaaataatgtatatttatagaggacatcgatgtttaaagacagtttaaaatttatgtactttcgttggtaaaatccaaggcagtagctaaggcatgtgctgttattttcactttgcaaaggagtgtagacatagaattccattattttctcaagtgcctgtagctagttagtgctttgtctgtgacctactctactattatagggccgtgtctgtactatgtctaagtcccccacacttgaacagggaaagggaactcccttttgtagagctgtctcacactgtcttcaactgagtcttgagttaagtttttgctttctctctcccatcctccctttccccaccttctccctttggatagaaccttgagttgcattcttattagaaagctacaaatggggcaggcagtttaggtttctttgctgtcttatatgggaaaaccatgtctctgtaaactttatctcaggaaaagcctaggactgctaagtcttctgtggaagttctcaattctcagataaggcttttcatagagaagctcctgcattctcccccacatcttaccctctgacctttcctcctgccttgtgtgtctgcccccacatgttcccactgattttgagacttttgtccgagcatttttttcctccaagttgtttaaggacagacttaggtggcagagattcaatttgcacaaaaccaatgcatctacacactcatcacatattttccagctcttcttgatctcagttgtatcagccattggaggagatgctgcgggaatggaatgtgtagctgacatgctaagtgccattaaagatgacatagtgtagtgaggtaaatgtctctctgtttttcatgcagtgcatatggtaatgttctagatatgttgtaggaagttagatgaaagtctttgtctcaggaagccaaggatatctgtttaggattgcaggtgctctgcatgttcaagaaaggcttgggcttctccatgaaaaaaacaaacaaaaaaaaaaaacaaaaaaaaaacaacaaaaaaaaaaacaaccaaccaaccaaccaaacaaacaaacaaacggtagataagacagtcctggtagagagggatgaatgagcctgtccctggcacctggaaacagagttgtgtaaatcgacagagtggcattcgactaagtaaagaaaagcaaaagttctcatcaaaatacagatgccagtcttaaaaaaaattctgtgtaaccaaattagccaaaatattcttaatgacacacacacacacacacacacatacacatacacacacacacacacacacacacacacacacacacacacacacacacacaaatagtgcctgtcttcaaaacttacttccaagctatatctacccaacaggaagctacaagcagaaaatctaacatagagaccaatggaacagaagaggtattacagcaggtactctgtgagtttatagccaaatgatgcttctcagaatcatgaagaacatccattggagcaaagacattgtcttcaggaaatggtggggggaaaatggatatttgtgtataaaaaaaacttggtgtctatttctcactaaaaattcattaaaaaaatcaaataaaattggatcaaagacctaaatatgcaacttaaactgtgaaacagctaaagaaatcatatggaaaacaattcaacacattggtgtaagtaaaggtatttttttctaatgaaacccccaaggcaaagtcaagaaaagtaaaacagaaaagaagagataatctcagaatcaagggcagcacaataaagaacagtaaatgaagtgaggagctagatagacaaccagaagagtgagaagcactgcagccaggtatctgggaagcgcttcatagctaggatacataagacctcaaaagaaagataggactttatccctaaaaacatggaaaatgacttaactaaatatttatcaaaaaagatgagcaaatagtcaacaaatatatagaatactttcaacctcactcactactagggaagtacatgtcaaagcaaccgtgagctactatgtcacctattaaaatagcgatgagagaggagcagtaatgggtgatagtgagcttgcagcaaagctcaacttttccagtgtgttgctggcaatgcatattcatacacacacctgagcaagaccttgttgtggcttcctcaagctaaaaaaatgacccggagatctcattagtgagtatattaccacagaaatagttacatcaagaagatatctaaactcacatgtttattataccatattaacagctttcaatatatgaacacaatgaaagtgtctgtcagtgtgagaatggatggaaatgcacagtgcatgaataggtatgtaaagaataaaacatttgcagcaatatgattggaggatattctcagcaaagatacaataatgcacatacatgcttttactcatttgtaacaactaaaataaagtactctcatagaaaatgcagtggaatgggctcatctgattatagaaagggtcctgtggtgaggagaagctgagagatgaggggcataaaagtataggtaagatgaagacggatttaccacttcatagcatagagacaaagtctacagtgatctctggtctctgatctatttcaaaataatttggtccaagacttcttatttccttattataggaaaggttttggtttgaagaagtggaaaggataattaccctgatttcatcctttcatatttatatacatatgcaagattatcatgtacctatagacatataataacatgggttattctgagcgtctgggctaatatccacttatcagtgagtgcatatcatgtgtgttctttcatgattaggttacctcacttaggatgatgtcctccagatccatccatttgtctaagaatttcataaaatcattgttttaatagctgtgtagtactccatcatttaaatgtaacatattttctgtatccattcctctattgagggacatctgggttctttccagcttctggctattataaataatgttgctatgtacatagtggagcatgtgtccttattacaagttggagcatcatctagatacatgcccaggagtggtattgctgaatcttccagtagtactatgtctcattttctgaggaatggccaaactgattaccagagtggttgtaccagcttgtaatcccaccagcaatggaggattgtcagtttgcaaaacacatgaaactaaagaataaggaagaccaaaatgtggatacttcgatcctttttagaaggaggaacaaaataaccatggaagaagttacagagacaaagttcggagcagagactgaaggagtgaccatccagagactgccccacctggcgatccatcccataaacaaccaccaaacctaaggactattgaggatgccagtaatagcttgctgacaggagcctgatgtagctgtctcctgagaggctatggtgatgcctgacaaatacagaagtgatactcacagccatccattggacggagcacagggtccccagtgaaagagctagagaaagtacccaaggagctgaaggggtttgcagcccccttggaggaacaacaacaatatgaaccaatcagtaccccaaagctccctgggattaaaccactaaaaaaaagaaatatctggctgaaggtcactccttcaggtgggtctcatggctctacttgcatatgtagcagaggatggcctaccttggtcctgtgaaggtcctatgccccagtatgggggaatgccagggcctagaagtgggagtgggtgggttgtggagcagggggagtagggaagagagtaggggatttttggaggggaaactgggatgaggataacatttgaaatgtaaataaagataatatctaataaaaaaaattcttatttgatgttactgctaagtctacccttctggcatgtggctttgcccatagttgctactcaagtatcatgtatttaaaataaaataaaaaaaaatatatatctcaaacaaagacacccccccccaaaaaaaaaaaaaaaaccaaagcaattacatgggttagagacgctgtttgcatccaaaagatattaattgatcagtgtatctggggtggtaggactataacccaagtttgtcatttttctctctattcttaaagaaggttcatctagctggagagtttcttctttccagaatatgaacctatcaaatctctgggatctccaaacaaggcttgtctcgagcttccaatattcctctaaactccagcttgatggccaggggatgtgctggttgccagtatgaggcttgtttctgcactgtctgttttatccattagaacatatatgctttcccttggccaacaccacattggttacattaccatagtcttgcacaatcttgtgaaatcagggagcgcagtcctcctgccttgccctcctttttaaagatggtttggttatgcttatggggtggagtgtcagggtgttttcagtttgacaactccatagatagtgctttgaaaatactagcttgggaaaaatggaaaccacttagagaccatgccttttgtctaaatatgagataactacattaagaatactgtcttggtagcagtagaggtgaagaatagtgaatgaagttttcaaaagagggtaatttgatgtggcttccttgtattcagagcagatggctggaacaaagaagataggcatttttcagagtgtttgatgagaggaaatggcaatggagtaaacagaaagacagaggacatggaatgaggccagcaggtctgcggctaacatagctaagtctggtttgttgagtcctgggctgtaaatccagtctgtggtactcagctgatcactgagtacatggaacatacatggggcaggatcattgagttccatgatagcatcagagtcagtgctgcctggaagtggcatattcacttagtttcctttttctggtacccagttatggttaccatggcggcagtgatgcaagcagaggaaagtggttgcggaaagtggcaaaaatgacctggttaaagacagtttcgggaaccttctgcagcctagtgaggcttacagaaaccctgctggatggttgttgacttgtgtttgattttgaagcgactgttcttaccatggttggaaatcctttgcctccatctcgctgagcctaatgttcctgttctccagctgagagagactaattcaccaccttgtgttgtaaacactcactcattttaactgattacacctccaatgattctcaaatcactaaaattactaattgctattccttacacatcaaagagtgaatcctgaataattaaccccaaataaaattagatgaattggcccttttaattagagtccctgctgctgtttgttctgagcttccttttcttactgttaagagacttttagaatgattaaaactgtttaaggcttaaacagccagtgaccttttaatacaatataaatccatgaaagcaatatttcagctagcaggtggtgaagtaaatttttagagcaagtacctgtcagctccagtattcctgtgggggtaaatgcatgccaaaaaacaaccaccttgaaatgaaatgagtgtctctatttgattatttttatagcatttatgcatttgctaagcttcaggcttgatgaaataaatggcagggttgaaggagagtgagtaatggctggcatcattttatataaatagtaacgagaatttctcagcaagaagaacttcaagtgcgtagaagatgaagactggagaaattgcagaaggctcctaggcacgcagccatttatgtctggatttcctgaaaaagaggaagagacagcagcatggagaagtggagtgctgtgggacttctgggtcgtggttatggacatggattcccagcctttccctgctgcattcagactgcagatctttcccgtgttcctttcttctccatggaccccgggttgttctttttcagccttcaagagttgtaagaggggccagttcttcaaaactccccagatatctcaattcttcacctcaaatctgctctggagccttctaaactctgtcctatgctttgagctaaggagattctgagtcagaatatatattctacacaatttgactacttgtagccagattttctacactagaaggaaagtctctataacctgatgtgattgggttaatttaagtacttttttctttataatttaaaagtaaactttagcttcccatggggaaacaattgcaggttttacagaaacactgacaaactaatttcaaggactctttttttttttaaacttaacctacccaaatatttgcaacttgtatgatcagagtaggtctacataacacaaggaattaaccaatgcaacttaataacttatgtagaattttttcagatgtgatcaggtgccatcttaatgtgtgtcttttgatctcaatttatgttgagaattggcttttgtccaatgtttcttcctatttctaatctcagataatttttcatggtgatcagtgatgcttacctggaaataagactcagagtctcctaggatactttgtaaaatactttttttgctccctaagcaaaggttctggctttagaattacagagtagcaccttctatattctatgtggtagatggcaatatgtattggttattcttcattaatgtattcttattcttagaaccaaatcagtaacatatgtatatgtgtgtattagttagtttctatttttctataaaacatcatgacccaaagcactctgggaatgaaaggtttgtttcatttatacctctatacaaagtccatcagtgaaggaagtcagggcaaacactgaagctggttagaatcaacctggaggcagaactgctttcgggctctgtcagggagctatgtcctgctttgttccttccagctccctcagtctgctctcttatgtgccccatgtacctcaggacaaccttcccagggacaacatctcacacagtgggctcagctctgctctccctgtcatgaatccatcaagaaatagctctacagccaggctgataggccaattttattatcacattttctttttaccagttgtggttccctcttcctgggttactctggcttctgtcgagctgacaaaaacaaacaataaacaaaaacaaaccccaaaccgccagacagcacaacatgtaaacaagcatgcctgtgggtatggagggacaggtagaaaagagatgaagaacctgaagagaggaggatggcaagaaccgtgtgcaggcaaataacaggacttacaaagagggcggaaagaggagtggtcctctactcctaagtctaccagcgagttttccttttgatggcaatatgtgtgtaaaaatagagtaaatagtgaaattataagatccggtgcaaagctttgcagtgtccttctggaatggctgcttttactgaataggacttcattgacctgtctgctctttgggtaaaacgtgattggtggtgctttttattcactccctttcatacagtaaagtttaaaatacaaaattaaataatgaagtgtgaagtcagattgcttccacatctggagcactgatgtttcggtgaaattcctagaagatcagtagaactttctggatactcattgatcatgggtgtttttgcaagtctagtctcagatctttgattattgaagaaaaatccagagcaaatgcagatgtttgcaacccttctggaggataaaataccctcagaacagaaaataatttagggttccggacttgccatcatacttggcagacagactcggtaatttaaattgtaaacaatcagaaggaagttaagcaacaagagcaacagcagcagtaaaaacagaaccgacagggccattaaaactgaagtcctctgctgcttggtcaccaggaccataacccctggaccactcatgttagtctgctaggtacaagttttgctataccttacattaataattagaatgggcaaaacttgactatagacaatcacattatttcacagttcacttgagtttatattaaatatgtatgtacaatttctacattcactatagggagtatgcagtaaaaaataagctcatgataaattattcaaaaaacaggatgtagggctgcagctatctcctacctggcccagttggggaaaaccaatagataggtagtaaaactgggagcagaatttgtgcagttgtggttctcagtacctggtcattgttggtgaggatggcaaatacaggatcaacagagctacaactctcttcgttacccatggatgcactgtgtggaggacccgctgtcgtgcaggcttcatgctgtccttgaagagattctgcctggcatggccactactggtcatcttcaaatgggtgggatagttcggcaagattcattcagcacagtaatattcacttgccagtttctgagttataaattaagatttttcttgttgcattattgtttttgtcttttgatgttgggttgatttttatccataacgactttcaaatttttatttcgtcttttcacactgagaatgttcacgttttagtattggggctgagggtgtctcagtaactggtagaagactaacacatccaattcaacctgctgtcctgtttacttttattgttaatgttcatggacatggtggctgtttggatcgcagttgctctgtttttgtgagacaggaagcacctgggacatttgtgagtgcatgcgactctagtctacttctcagaagcatgctcttcttcaccgtgtggatcgtgtggaatctgttctgtgttttctcctgagaactggaatctttacagcacggtgctatgtgatagagatgtgggatatgctccatcagccatggtacagcagggtctacctctgggtggagaggttatctgtgagtttaggaagagttctgatgaagttagtgtagtcccagaagttcagtattagctaaatatggagagagactgtccaatttaaaagtggggagacgtcatctttttcaaagataataaatcttcttgctttcaatccgaggatctcaaagagcattttgagctgagttatttagaaagatgcccgcacattacattttagcttgggtaaatatagggatgcattaaaattaaactctggctttgaggagattctgcgattcatttcaaagtatcttccttctgattcttaaaaatggcaaagttacagttcatatttattgcatagaattaaagataaacagagaaaagagaaagcagcgtttgttgtgccatgagctctgggtaacctctggcaacatctagccatgtagaaagcaccgtgctgcaagcacccttcggagcctggccttcgtctcctctacttggtaatctgctggttcttcctctcctgcccccagatattctgtgactcactcccttactccatttacatttttgcccaaatgccaccctggtgaggtatttctcaatcctgttctttaaagctgcaacaccctgctaccatcccagctattccccttccttcctctgccatttctcctcgtatgtattgctacttgacattcaactcatattatctgtttatttcttaatcattcttttttacctgctccagtgcaggttttacagggggcaacatttccatttgttttgtgcgtttacctgtttgtacctttatatggcagagcctagagaaatgactggtgcacagagggcactgagtaaatgatagatgacagaaacagaagacaccatcagctgggtggctctccggctttccagtgtgggagcaactgcagtcactgtgtaagcagtgctatactgaggagcattattcaattattgaatgtgactatttcgtaattaaaacctataagtacaattgagggtttcataccatttgccatattttgtaaagggacctgcctactaggatcacatacagctctttaccggcttattttcacatgatatttccagttggtggatggtgtttataaatcctcatatgatgatgttgaatgtgtatttttgatccatacatgtgtgagggaaagagcaaagcagggtaattcccatctctatcacctcagacacattttcattagttatcttaaccctagtgttttcttaaaaataacactgtctggtagagttctaagtacagtcccaattagtaatttagttagttaggtgaagaaaatgaagattgaaggatagaatattaatttttctaatatcttgccatgtttgtttacacgcccacattttagattgcccagatagcaactgaaagaactttagtcagtgtcacttatctccttattcatggtgaaggtaggttcttcaggagagggattggtgctattttcatgacaatgaagacaagacagccagcactagccatgaatggccttgagagtgaacattccccaatgagttctcacatagggagaacatgaattcaggctctgcatattaagggttctgtgacactcagtctttgtgtgggtctctgactattcttaggtattgtgcacatgtcacatcctgtcccctctccatgtaacttcatttcacgagccaccacactctgtgaaccttgcaaaatctggtgtgttctgttatgtggcgttgagaagagtcttccaggctactagtatcctgccagacctagaaaccagacacggtattaagtctgaaagaagagattcaagaaaacactgatgtatatacttctttcttggactgagattcacgaaacataacggtccacacagggcactgagggaggaacatcacacgttcaagcccaaagatggagaccatgttacaaagaagagggagggagagagggaagaccgagattcacataggagtatctggatcgatgagcctggcaaactcccctagtcagttaaaagacaggagctggatagagtgaggaaaagcttcattacttagagaagccacacattcctagcttcagttttgaacagaggtgttcataagttgaaaaggctgagaaggtcattcaatggatgagaaaggtttattttcttggtctgtcacatcacagcactttctgatggtttcaaggcactgctcagctaaatatctgatgaagacataggctcctcataccagttcatttcatgggcttacccgattaggatgcccaccagctctctccttccattctcagatgcatgtgtggccactgtcactgtggcattcaaaggtgcttcctgtcccctaaagaacttaaaacaaatttaagagtctttggagagcgaaggagaaggatctaggtgcccccttttcccagtttgaagtaagagggaaagcattgatgattgcagcagtgaaaagagaagactttgttatattcttgcctccaagtctgctctctactggcacagttcagcttcttaaaggccgcttaccatttttcaccctctaaggaatttattgccatcatctctgtgataacatacattttgtaggtttatcacacatctatcattgagtatgtttttctattggatgttcatctatacatcagaattatggcatacagatgatgacaaagagttgtgcaggttcttcattccagttcctacagctagggcatttctcctccagagcatccccttccagtacctccccctttcgtgcccaccccattgctgcattagcatgcaagtcccagtataggatgtaggaaccgaaacctagatgattgaacttagtgaactgaacccttggttgtagtcagtggttgatggttaagaggttaacagctggcttcttaagaacctacatcatctttcttagaattaggttctttgttgttttcatattatttctttgttaaagaagtcagtttttctttctctttaatccttctgggattaccatcagcctgtgcatctctttaagttcttatagacaaacaggataaaggagaatatacttaggaggtatttcagagacagagttgtacctttatttttaaaattatttctgtgatattttggtttactcatatgcatgttatgggccttttgagtcaccctatatgatagggataccaagagttcaggcaggtttgagaatgtctgatggtctgataatttgaaatgccacatagaatctggtcaattacacattcccctccatactgcgttatagagggtgggagaagacagagtgattgctagaatctaaacttaggttgtgaacaaccacctagtcatggcttcatggctcaataccttgtgaattaatttttttcattcactctgttttaaggtagaagaggactctgttgtagtgcattttccttcagagttaatgaatactttccatgagctgtgtagccaccccagcatttctccattttagctgcatgtggagtcccctagatcaaagaaacactgatgccacacatttattccaatccccaggattctcatccaatcaaatccagaggaggtagtttggacagccatcggtttgatggctttcttacagattccagtgtgtggacaagggatagtgaatggatagtttcaaattataatgctaaaatggtaaggaaagacttcgagacaaaagaaatccctatacaacaggagtttggaacctttcaaatcctggggttctccaaaggatggaaggtactttgccgaactcagtgaaacttgaactatgttccaggagccaatgccactgaagttacctaggctttttagaagcacaaatcattggtccttccttagaactactacattaaacgtctttggaagtgccagccagaggtatgaattttataactcctctctgaaatcctgatggattgtgaacatggaccagcgtttgagcaaggttatatcatgacttgggggtgggggtgatgatagcctggtaaaactgaatggctctagagacactgtccttggctgttgtggcaggggttagatctgacagctcatagctactcctcccagtgtagcaacaccaccaggtgtttcagagcccaataggctaccatcatttgcaggatacacctttgcagttttagactttctttcctctgagatacccaagttgtcacatttttatattattcaaaagttaataatttgcttatggaatctgattcctatagcttggtgccatggtgacaggcgaggaagaagcacttacatgtaagggatacttctaaatgaaacatcaaaactacatttttaaagggagaacaaactgccttttaaaatggtaaaaaaaacaaaacaaaataaatccaatgtttttttctagtatatctgatttttaaacaattttaaatattttataatatagtcatacagatttgtatgtttgcttcccacatcggtggttacatatggtagtaacctgagccttcttgatgactgtgttgtacttagatatctagatcatctagtttctgttcaagtgtcccctaatctgttctctggccatttatacacacagtgaaagctgaactcgcaggctgtgtgtcagaccttgctagttttccttacgctcagtgttatttggagttttatgttatttgctatgttgtcgatgtttatattcaacatgacttgtgtgcacatattctcctgccttactacctggaatgggcttgctgtgcaggtcatactgtctaaggtgatgctagtacagcccccattttccctacctggatttaagctttattttatgttaacttccaaaaatgtgtcctcataaatgaacctattacccttacatgtatacaaatcttttcttcttctacttgattaggattttattagtgccatttatcaattctaataaaattcagtatccataattattattctaagaagtcctttgcctctgtttaatgtacttgacctctctatactaactttaaattatgaaatcaggtcttttatcttatgaaagctaaggctaacaattaatccaacattatctaagtaagggaaattttctatataactcaaacaagtgggtctaaaacattgacaataaattgccagccaatgtatcttttaaagagttctataacgtctcagacgtgttaacctctcatatgtgtccccttcctgtaggtgatcttctcccaccgccaccaccacctctagaggatcctggtaccatcccacctggtcccggacacttccctcctcctccaccactggatgaaggggctttcaaagtgcaggtaagagcagtgatagaagtcaggtttataagacaatgccaggaggcctggtttctgtgggtcataagcatttatccagagtatagaaggagctttgaaacacacagggacttagagttctttaatgggaaaggcccaagctacacgtgacagagtcctgttggcttacactttgaagtgctggactattttacctaccgatttcatttaaaaactgaagttgatttttttttcttttatgaaatactgtttgagaagtccactttttttttcttttcttttcttttctgttttttttttttgaataaagccaggcctttaaaaaatatcttttctttctacatttaagctatggattctatatgagaaagagtaatagttaagtctatgccttatcagtgtgagcgctgaatggacaacaacctgttttcactaaaataatactaagacgctgtagggccttctaggtgtcttcgacgaagaatgttatagttgtgtatcgttgatatgtaagcattgtgtcctggagaggacagattgcagagtaactaactccagctcagtgcacaagtgacaagagaagtatttttgctctgcagcaaggtgacctgtgaccagccactccacttaaggctgaagacttcattcaggattgaaacattataacatcatagacattgccattcttagataagataatattaatatagatacactggagacaacaatcaagaactggtctttctctaaatttctcgaaatgctgattgtcagatgaggtagcagagtgtctggcacttgcttctctcagtgaggcatcagcatcttgtgagttacaacacaaaccagataccttgtgttaatgttggtgtctggtgatgtctgtgtgctttattctgttgttgtttttgcctttgtatatgtccccagcgtcccatatggaatgtgagggaggagaagctgtaaaggagaatggcctaggctctcatctgtttacttctttcttttaaagtttaggttgggagagcaaagcagaaattattcatttatttcccaaatagtctttgttcctatgcagatgttatttgagcactggaaatcctataatacaaacagcaaacatagattatgtgcgatggaacttccatgtaaatagagtacagtcattgcacccctggctggggtgtgtgccaggcgggcaggcaggcacagggtggcttttaagagtaacttggtaagtatagcatcatcaggacagtgccactcaacaaaggcttacaggagaaaagacattatgagccagatgcattcctgaagaagtatgttttcatgaggtttggccatgttttaataaactatttttgttgtctgcttttatatgccttgttttgtgttgtggtatgtcttcctatattggttaatgggcataattttaaaattctcctctgttttcattcctggattcttactaagtctgttgtggaatattttgaatatttgccttgccgaggtctgaaggagttgagaactaagttctaagttagtgattgtgggtagatccgtgagtgctggtgatgctcacaaataaaaagaaggaaaccacaccttaaaacatcacagcacaccaatgcctctgaaaattctggtagtgatagctgggtgatagtttgatattcctgccaatattgtgcaaagcaactcatagcaatgataatattaagatcaatattgatagaatatgaagctgataataataaagttgacatagatactaggtgaagttacaatcacaataacagtaaagtcttgtccatggattctatttaaatgccatccaacccaaggacagagtgtttttatattgattgctccttgctttactttggtctttgttgcataattttcattgtgaatatcttttatatcatttaaaagctgtatttcagtttatgcttttgtagggactacgaatgtatcttctttcttgattactgtttcagagagttggcttttaacataaataacctttatatgtagattttatatcatgaaatttaattgaatctatttattaattcaatatgatttctacagttttcgggttgtctctgtgtgtgataaccttgtgtctgaaacagggacaattcatcttccttctttcccagtctagaccctctttaattcttggttttgcctgattcctctggtagggcttgtagttctgtggtgaatggcgttagtgaaagtggcttccttgtgcggttcacagggctttcatgaaaatgacaaaaagtctctttctctgaggactttgttctgaaaatgtactcaagccatggctttgtttttgaagaggaaggaaataaacaagaagcctgttgccatgttggcttgtattctctgtaaaacagaagggatgaggataaaaaataaagcagtgtttgccaagtggaaaaggacaaatctggtagggagagggtgttgtttttgaggttcttcctatgacattcttggtaacttagaaatgatgccttggccactcttgggccatagtgagttggacttgacagtggttgaccctgctcctactgtacagcagctccctttagacagagctcagggtgcctcagtctgatcactgggaacaattttgcacatttttttctctcagctctggtaaaacctcattgtgccaattccaaatccaaactggtaaatgtgtgttttgtgtagaagtctgtttatatttccagccagactttcagcctagagccagaagactgcctactaacttggacttttgcaaggctgaaacataccacctccatgtcattgactccaacttgatattcagacttctagataatagcaccctctgaaggaatcaattcccaaccctctttggaaatggggagactgaggcctaaagagatatgtgtagagatggtacttctgatagaactctcatcaggaagtctctcctcctggccataaacccccaccccccaccccaagttgattgttttgtatgcttgtcttagccctctctgtagctagcttaaggctccatgatggaactgctaaaaacaggttctgttggagttttgcttgggtctttattttgataaatgctttatatatttttgtacaaaagcaaatatttagtgtaaagaattacctttcttttgaaaatgcacatttttatagtagagatgaatctttgaagacaaatgagagatttggttttcttttccagaataaatttaacttttatgcctataaagtttgacctgaccccttgttagtcccttcattcatttgtcattcctcattcaaaggaaactgaatacactccataagtagacatgttatgctgtagggatgttagccttaggactgggctttctcagtagagtgatccaagtgttaagtctgtgacactatcttatcactttgctctaattgggtgtcaaagtttgcaatttgtcttttggtgagcctcatgaacaggtgcacagtattgcttatcatttttatgagaggacagaatatctttccttaggtcttttgaagtatgttttaaagtgtcttatattcctagcaattggacttatattttttaggtttttctattgtttcaatcagtagagcttatttaattaattaatagattaattatgacatcctgggtaaagtttcccccttactcttctccctctggctcctcctttatactcctctaccccatcccctttccatatcttagtttctcttcagaaaacagcaggcctcccacagatatcaagcagccacggcatataaagtagtaagactaggcacctcatctcctattatggctggacaaagcaacccagtaaagcaaaagttgacaaaagcaagcaacagagtcagagacagttccatctcccactgttaggagtcccaaaacaagaccaagctacacaactgtaacttggccctaggtcagacacatggagactccatggtgggtgcattagtttctgtgtgtccgtatgagcctagattggtaatgctgtgagattttttgtggtgtcctttgctcctctagcttctgcaatctttctttcactttttccacagggtctctgtctctgtctctgtctctgtctctgtctctgtctctgtctctctctctctctctctctctctcggtctctgtctgtctgtctctctctctctctctctccttctttttcaagaaaaatgctataggtatagtgaggaaatggtgaaggataaggaggtagatgagcttcaacacacacacacacacccacacccacccacacccacaaccccccaacacacacacacaacaaggaaggggcaaaccagatgcagatggttgcttggtaggcttcccaagcatctgggggacaacctggcactctggatgacactggcttgatcttttcatgacctccagtaaagacctttgactaggccttgcatgtggtctggccctgcagcttgctttgcttgcctgttgttcagcagttgccatcccctggttaacctgtctctcttgtgcttacttaggccagatgattatgcgtgctagtgtcaagttagtttctctacggcaaaatatttttttttcagcactgtttgtttcagctgttaaaattttcatattcaaatgcaatgtttccttttaatatttattgttagtgcctgtcttcctatacttttggaaaataatacacaaatagataatgggggctggtgtggatgtgtgtgtgtgtgtgagagagagagagagagagagagagagagagagagagagagagagagagagatgtagtgtcccacaaaatgctgataaacaaagctgtggaaagaggctgccgtttctaaggataaagtgaacacagtattgtgaactatgaagaaacctaattcaagtctgaaagtccagttattatgttattatatatttaagcaaactcaccttttttgaaaagagtttacagccagtatatgtgtatgatggctaataatcaccttcctgtttcccattgtgcccatttttaggcataatgacctcaggtccacaaccagcccactttcatttgtgaacccacagtgactgacagctccctggatcatgtttggacggagcttatcacagaggttgcctttacctctgtccatcaacatgatgagggaagaggactctgatgtcggagcacatttatgctattgagcctgagaatgtggtagtggggagtgtgtgatcatgagtggatgtggcatcccactctgagccatgtgctcttttcatcaatcgaaatatataagaaggctgaggatgctctgtgctttgtgaccctttaccctcttccttctagatcagtggatgaagagcagcagtaaggaggttgcttgtgtcataatttctcccttcctgtgtgcgtgtgtgcatgtgtgtgtgtgtgtgtgtgcgagtgcgtgtgtgtgtgtgtggccagactgttgggttctttgccattttctgatctgggccaatatgatagctaaacatgtatgccaaacattgcttttagctctgcttcagactctggttcggcatttagatgtgagcaggtagatttggggattctgtttttgtaaaaccgttttggacatcaagtccagtgttaataggagctactctagtaattgctttataataattaatctttcatgtggtgtcttcctccgccttcttccttttcttcctccttctcttcttcacttttcttcctttttgaaggaactagggctttatacttgccaaaaaaaaaaaatatgctactggtgaatagtatcctcaaatctttcctatttttcagatctattctactgggtatggttgtatacacctataatcacatccaaggtcttaggagtctaaggaaatatttcaggccagtctgggatagatagcaagatcccatttcaaagtcaaaactaatgattaattcacattaggtaagcttcttgcaatttgatcctgaaatatatatgtaaacccagcttcaccaatctgctaccttagacaataacctaagatacatccatgttgacagtgagaagagcttcatcaatgagtagtcaaaaaacctttgggggagttagtcctggccaatagaggtttattgtgagataaccaatgagtctggccctcacccatggcttctacctaaaaattgaaaaccttcaatagactccagagttccaaatctgtcatgtcatgcagaccatgacattgtggcatttgtttactggctgttacgtgcttcctactctgctgtcttcccagaacctggtgtctctcctttgtttcccctcacaagttccttccttacagcatcttctttctccctatttgtacattccgtgcccaatgagatgccttcctttaaccctctctcttctcttactaggagcagggatatgaagggttcagctcagcggttggtcacctgatagctggatctggtgaagatcccttctgtggttaacaactgcaaggcccatcattgagaagataattcccattatcttccacagtcctcttcatggaaaaactgtcttcagattcgaactcagttcatctcaaagtttttccatcatcttattacgagagttacatttggttcaacacactgtcattttctgcaatcctgcattgaaatccccgggtcctttggtcattgtgtacatgtcctgttttttcctgtattcatcagcaaggtctttgggcttgagaatgagtctgatttgttccagcccatttattttactgcccatcatttcggcctattcataatacaaatgactcattgcttttattctaattttttctcattacagctaaatgtccctaaacagttaatgttcaaaaaattgttatttccttcctgtgcttctgtactgccagccacatggattttcttcttttattgaactgttcaggggacaccatgacttatcttacttactctcacaacccagtgacttctctgtatgatctttgctgtattgatatgatgcttccattcttaaacaataccaagttaaatttccttgttttatgtttgctggctgatacttgtttatctattgactggccagtatttttttttaattaaaagaagagctgtactttattttccactgtcttgttcatggtttcgaccagtcctgccttcttgtaatccttctctgtttctgtcatgacatacctgatgcaccattgctcaatgataaaaagctcccgtgtgatccttgggaacatgtttacagcttcacctgcaaaatgacaagttgaagaatattttcctagaaaaccattctgtctagcaatgtctacctcattgtaaatgctaccttgaaatccgactacagagataagcagctactgctgcttaatgttcccttcatctgatgtatgcatcttcgtggagtgatgcaattagtcctggacattgatcctgactttctgctatattctataaagttagaattgcagcatagtatagagaagtcctacagaagtaatttgatatcataagtcaccaactccctgatttatctgttcctattctaaccagttcttgttctgagggaacaggaggcctacatttctcagctggcccacctgttcataccaccccagttactagaagagctggtcactagctccgtgacaggcttctgtgttcctgggtgtgtgttcttcccattatcttccatttcatttccattttagtacccacccaaaatatgatgatttagctcctatgtcatccatagtccttattttattggaagaatatagattaggaacttagttgatattcatagattggttgttgattgtttgatttcacagtaggaaacttggaaagcagagagtgcgctatgtatcacacttaaccttttgctgctagtgtgagcttgcaaagagtttaccatgtactacttttgctggcatggggtgataaagataggaaatgggagaggaagttatatagttcttgtgcaaatctaggttttctatttttcctgttttgctactgtttggaaagtacagcctccgttcatggcagcctcacatgtgtttccttagtgccatttcaaaaagggggaaataaatatggcatttttttcatagtgagaatagtaaaatcacgaagatttcccctttttctgttggtgaaacttcaatcgcactaggcacagattcctctacttcagctatgtgtgccaaggcaaagcacacagaacagcatactagagctgtaaaaaccaggataacaagaaatgctacagaacccttacattgcacagtagtagggaggcctgggagccagtgactctgctactccacactcagtggcctgtttacccagctaggtattgtcttcagacaaaggacgctctggacttcctatacagggaagctgtatttctttgataaagctcttccttccacataactgtgcatggtgaaattcaccctgagtgtcttacagtccctacacacagttctaataaatgaattgttctctttggcagttaggatggcatttgaggaagttttgtaatctaaagctttatgcattattagagagcaataaaaagctgtctgttcaagcctatggtgatctgctatggactccaaagggtggggcccaactgtgcagcagaagaaacagtagtagatcttgtagtggccctgatggctgccattggtaattctggaaaagagaatggtttctggaggatgtggagaacacagaggcaggatgcttacaggattcttgctttcttctaggtgggtggcttggcttgtttttgtgtttgtggaatgagaatattctctgaggcaaatgttaagtgtgtatttctagaagagatgttgataataatccctcatcaatgaacagttctgtgcagtctccagatagtattgtggcaggagggtgaaaataatgccttgataagtcctggatttttttgtattgctattgttctttaattaaatgtgtattaagctccaacaaggcgctatgaagaatgtcaacttacagatgattttcagcatactcagaagatttataaacaccaataaatggaaagtcacagcccccctctgaggtggtaaacatatttgttcttcctacaaatgagaagtgcaataggctgtactcaacccgaccaggactgagggtgagaattgagaactgttgaacagagagaaaagcattttccatcactaggaattggattagaatgtattattaaggaactatgcctaaatgtgcttagagttgtgaggttttaattaaattgttccagttactgttaacatttgggttagaaagaggctgccaacgtatgacactatgtttcagatttagtgtcgaaaataattgggaaagagacagaatacttgatactgaagaatttagatttgttcactctatgggaggtgctagggatgtaccttctaatagatatctcagctatttctacaatcaaagatggtatatgttccctttgaaacccaattcttgcttgtctttgttaacatagcctttccttggaaccaggacttttcgtttacacagtaaccatttccagaccttatttagttggtacagttacagaaggcctgtcacatgcttaagttcctctcctgtcacctggtctccaagttatctcctcaggttgtgatattattcccctgtttcttaagtaaaaaccaaaatgaagagcacatggatttgttaagagtatgtgcctttaaatccttgccatttaaagccagtgggacttagattccaccttaagtgtgaacagcaaacaggagacttaactgagaaagttagttgaaggcaaatatgtctacaaataaaactcatggctgaaagatgggagcggtggaaagtgcaggtggaatgaccagttcaggctttcagttttcctttgtttggtgtctttattcacacagactcagcactgagcccttgccaagagcacagtaggtctttgattatcattgactctcaatagtctgtgaacaaggaagcatttgtcaggaaggactgcactgcagaggcatgggcaccattcagactcaaggaaggatttataagttgagatgagagtagtgagacttgaagactccatcctctaggatggcaaagtcacctgtcatggccacctgtcaatttgtaatgtaccagctaggtgcatgctccagtcatgattgttggactcattgtagaatcatactcattcctgactaaggggagatcagataagtgtttttcttatttgttctcaaactcactttttatcagtggtaaccttggacataaaaataggaatttctgttgggagtgttaatgtaaactatctgagaacttcctaaaatatatgtgattcataccatgtgtttgttcccacatcaacacggaatcccaagatgcaattacccatgcccagtctctgcttcgtcatggggctgtgtttatcctttagctatctgcatttgggagtagggccaagcaccctgtaagatccgcacatgtgcacagtgtgatcgatcacacacgaccctttgaatctgaccttggtgtcgtctctcccaaagcacagccctgttgcacacacagtacattgcactgttcccccagaatcccctgttcttcagctgaacaccttaaatggtcttgtccatccaaggtcaagacttttctccttcgtccatgcagctctgtctgtttttcatgctttctctcttctctctgtttttgatttttttcatttcatgtcttttgtctcatattctttcccacttgaaaacttctaatgagatttgcggataaaaccacagtgggaggactgatcctcccttctttctctgtcctcctctgtgcctcttctccgtcccttctctttcctttaaaggccaccactttctactttgccatctacattcttgtccatcatgccagtacattcttaatatttaataacatttatagaaaagtgaatggaaactatcttacattaggtattggttgttagagagagtggtatcaaagctagggtttttgttgaaattgaaagtctctctttctttgtctctctcactgtctgtctgtctgtctgtctgactgtctatgtgtgtatataatccagaactaagtgattctcgtaggcaaataactgacttgagaaatacataactgactaagttatctccaggaatttgctcatatatccctccccatctctggaacccagatttaaaatagatggtggtatccaaattttggtccccttgcttctgggatgcaatgactactcttatgtcaacttaacatccaagatagagttatctgaaaggagggaaccttaattgaggaaatgcttctatatgacccaggtgtaaggcatttttaaaattagttattcatgggggagggcctatcccattgtggatatgtcaatccctgggcaagtagtcctggattctataatacaatacaccaagcaagccacggaaagcaaaccatgtcctatacatcagattctgcctctagaatactgtctgtcctgcttaagtttctatctggagtttcttcagtgtggaagcacaaacctgataaaccctttcctccacaagttcctttggttatggtgtttcatcaaagcaatggtgaccctaactatgacatggggcaagaactttaccaattttgccatttcccatatcaatggagcttttctttttatgtgattacatctatgacctcattcttgaaaatttaaaaaagctcattcaatctcagcttgactgtagaaaggatctcccctattttccaatccattttgatgtaaaccaaagtataagggcttagcagagagacattttcggctcgagctccagctgtacttcctgtttggatagactgtagtgcttccctcttggtctttggtattctgttcagcatgcacagtaaactccatggatttctaaggctgctaggatatttgctgagatgttgctgaagctttcctaagtgtagctacctctctgttgacaatggtaatgcagagagcctgtgtaggctgggtgctttgggccagattgctgggtaatgacggctgcatgatcaagagatatttctcagagtggaaaaggaaattttggaaagagaaaatggcacctagacctggggtgtttctttggcagctaacccacctgttattgctagcagatatgatttctctagtatttcaacaattcgtcataaaggttttgtccaatgtaggcctccgtgataaaatgtgatgagtgccttaccttgccctctcttaactgcttactggagtccagtctcaccttgttgcttctatttcctttaagtagcaggtgacttttaaagattgggcttcctctagaaaatattgttactgattctacttgaatatgtcaagttgtgtcggcaatgtctgtagttccaagaatcaaaataatgcttaagttaaatggacacagaataatctggtcaggaaacgtgagtataggggaaaagaacaaaagctactacaaattaacttaaaaccctttatacccccatattgcaccatagtgtacagtcttgtgtatagacagagcatcaatttcttcttgcaagagagcagaaagagcaagtccaggctcttggtgaggggcttagaaaggacagtgatttgcccaggtttccactgtgcacgatgacagagctgagctaggaagagatgttcaggctaagcactcctcccatcccatctgtctctgttctcagagttctgagggaagtgggattggacagaagtggtgtctttggtgtaacatgtcgaagcagtttgtcatggtgagacaaacagtttgtcatggtgagacaaactgttggttatgagcttcacagggtagagccactacattgtttccttttcttttacatgagtgtataggattcaaggaactgtcatacaggtctctgtgtctcataattagcacatgactggatgacttacttaaactttgctttttgattgaaagaataagatattggtagatgctcaaagtctccttggaaagcgtattgacaatgattctaagacacctgtatagtccatgtagcactgtgcagtagcctgaagatgggctcttctttccttcatttcgctgttcgtattctaccaatgagactagaaatgagtaagttttgttttcttgagtagctctcttcttaatgttttctcttctagaaggggggataaaaataactttcttgtttatataatggacttctgaaatgatcctttgaagcaaagtataggctttggcagtgaaatgtttcatagtgtgtgcaggggagaggggggcaccttttagttttttagcattgttaacacgttgttacctctttattagaattttactgtctatgaagggatttttcagaagaactattttggtgcccctgtcacagaggcctaacgttttattagccccttgtcccttttcatgataatcattgttatacaacatgcaataattggcacgggacacaacagtttttcctatttggttgggggactttaccatggaaagaactcaagcaaaaaagatttgaaaaccatcatcaacattgtaaatatccaagtcctagaacatgtatgaatgtgacttcacatatatcctaccccagcttatattgacctgttttagagcagaatatacttaaaagttacatctgcaatacagttgttgcaagccaaagcattgtttgctttgttgctaatgtggtcaaagtatttattatgtagatatttactgtctaacacttagaaaatatgaatttattaatctctacaactttatgacatgcttggggatctaagttcaatattttaaacttacaaagctgacaaacattatatctatgtatcaaattctcatagtctgagtctagaatctttataccagggtttgttttgtgtttaaaagtctttgaggggcagttctttaattaaaaagtaataggtcatatattaatcatgtcctcagtttaatatatatgatgatatataatgtatattgaaaatttggtcattaaagtagatatataccaagttttgttgataaggaatatgcattttattttatctttttggatatggccatctttttctccttcatagtactagaattctgggaataatgaattttaataattataagaaaagtaatgtaattgaattcatactgactaaatagacttgaaagaaaataacagggacatttataatcatgctttgcttgtgttattagtttcctggattccctaaaatgaacttcatttctattcttaggttgttgtctgggaaggtattcttttcatagtattgtggcagagaagtgacgtccaggtcattgcatgtcagaacacatttgacattctgtatgacttgcgtaaggagtttcttgagatcttaaagtgggatttatatattaccatataaaacatttaacctaactttctttgagaagtttttggtgtatttcattcccaatattgagaaattacaaacacacctggggtattttagtcccatttctgtgatgtgcctagtcatgtcatgactaagcacgaataatgcttagtattgtatttttatattctgggtgtgatattgcatattgactatgattctaggaaaccaggttcccaaggtgaccttttaaaataatatttttaatttttaaaattataattacatcattttgtgttcttccttccctccctttaaccataaatcctcgttttaatttcttttaaattcaagggtctttttctttaattgttgagatatgaatacacacgtgcattcctctctctctctctctctctctctctctctctgtgtgtgtgtgtgtgcgtgtgtgtgtgtgtgtgtacctttctccttttcttcttttcattagcacagaagaaggcctccaacaacatgactaatcacaaatgcagtagttgctcctgctcccacacttctcactgaaatgaatgctcacaactctgtgcatgcaacgcaagatcaattcatttccactgataaatggtgaatggcctcagtggtatgtagccagtgaagccatgcttggtttaggcaaggcctgtgagtaaacactaaaacgcttgagtggaaggtctctaattggcagattattggcacagttttaagagtagcacctctcatatattgccgtttaatatatgggaagacttttccgagtctagggtacctttacagtagtagtgtgtctgatctgaatctaagactcaagttaatcaacttcattcactttttataagataacctagcccgacaaattggcctgtgctcaatgggaataagcagatcccagataatcttcatgagtgtgtgacctttgattcaattttgagaataaattaacaatagcagatgaaaagattgctcggactgaccagtgctgatacttgaaaacaaatgagaatgtgcatggatgcagtatgtagtatgtgagtatgtaggtgtgaagtctgtagtatgtgaatatgcaagtatgtagtactgccaatatgcggagcttctctggtatgataatatggtatgataataatactgacatatctggccatttgaagatcatgcaggctgcaatcgcataagttagggaggcaacgtcttataaatagttcagctgaagcagcaaatacaattcatagaaatggactgcaagtgggatgaaatattgaatttggaggaaagatctatgagcagaattttatttcataaaaatatgtttaactccttataataatgataaatataagcaatggataaatgaacatgctatttctaccttccttagtgccagtgccccgttttactcttagtcaattatcaatgtttgggctaaaggacagtccaccttgctcagttggttagtatagcttggcttatttctctcacatgccatatgtttctgttgagaacctatctttcatagtctgttttcatattcttgccagggtgaagtcatctccctataattctactattgcaacctaaaattacacttttccccaaatgtagtttgttgagctttagttattttcatatatgtctggggtaatggaaatgactcttctggaagttacattgtgtggacagttcagttatgggagtacagtgtgtggataccatcttagccctggcttttgtcttcttgtcttattcttgtgagctctgcacgggtgagggtatgacacactggcacccttggagtcctttgctaccagcactgtctgtgctgtgtcttctctgtaactctttccatcccttgattgatgcatgggcaagttttaagtcctacagcagctgtagacaagagtagaagcttgagagatctaatgggtgttcatcaaaacaggtccgtgcagtccttagagacaggaggagtggcccacacttagactggccatgtggattggctctcattcctcctgctccttcaacaggagttttggggatcaatttcccagttaacttgcatgtaggccttctgggacagcattgtttctcagggaagccagacttacaccttgggacctttctggctatgactggagagggtggaaaaccgttattacaatggttacttaatttgagtgcttgtgatatctagaaccaacattaatgaaaaacaccaaggactccttctaattgttgtttggcctctggtatgctgtttaaccattagctgacaggcagaaccatagtgagaatgtttgtgaggatgtaggattctttcagctgcatttaggagtgctttgtgaagagcaagagaggacataaatctgaaaattctgaaagtagatgagcctattaagaatagggtttgtgtgggaacccgggcagactccaggggtggagccaagatacaaaagagacaccttgaagggggaaagggtctgtcccttgttcatcatgaggatcaaaatgtaaacacaaaggtatgatatgaggtcatgtatggaagctgggggttgtacctgcagaagccactagaatgaggctgggacttgttggtatattgcatcaacctagtctgacaaggggaaatggggatcagctccacctctcagaagagcataggagactggagccagtggaggtctacaagcttgggctggtcacagttcataattagtcatttcactgtatagctcaggttaatcctatgacttggatctttgtggttagaatcctgtgactcaggccataggcagttagtatattttgtgctacaggaaagtacagaagttgaagaactgattatatcctgtctctttgctggcacccctagggaatacttaatgagtgatgcttacctccagaagaagaattaacaatagttatattatgcctattaatttatagttactggttgctataattagtgctgtttatgaaaatcatggtaattatagcactttacaatttaccaagtatgttcccatccactttcttatctgagtctttaagtaatctctgaccaagttagggctggtgatggtcacttctctttccagatgaagaaactgtagctcagggaagcatttaaccagactcaaatctagtgtcctccccaattcactgtgcgtgtgtggatgcactcctcaaatttctgcttatgataattttagaggctcagacaagaaaggaaattcacttggttctcagtagtcatcctgtggagtggtgtgccctgccttctcacctgatggtagttcagttatgcagaatgttctcctcgctctctgaaatgaaagggatccttctcttttcaatttgagtttcccaaactattgcattgtgggtaaatagctgaccctttgaggggcacattagtatttttataaccttaatacgttagtcatgggccagtaagatggatcactggttaaaagtatttgctgtacaagtctgaagacctgcgttctgtcctcagaatgcacatgaaggcggaaggaagtaatcaattctacagttatcttctgacctccagtgcagggtatgacttgtgcatgcctatgcacatgtgcccacatgagagtacatgtgtgcatacacacacatgaacacacacacagacctctaatactaatataaaattaaaaagttgagtaacactgaatctcagattctgataaaacacatttttttttttaccactgtttcccaagtgtgggctggggcaggtgttctagggtagtctttcagcctttgagatgtatgatagtcaacctgatacccatttgaatgaatgtatacccaggtccacatatttttaatcttttaatttcatttttagatcatatattagagtacttactggttcctattatacctcatgccccttacccaaaaactgttgatacaagaatggttacagaatgaaaatccttataacattgacagtatcattattcatcaataaattaagaaaattcctattgaccattgaccaagttcaggccttgatcaagatgatgggaaatagtgtgtccaaaacaagttccatctgtgcttcatcgatcttaccttattgtagggatgaggaggaccctacccaaatggttaaaaggacaatggttagatagtagctgctaccattagaaagataaacagagtggattgggggaattgaaagaataagtagcatctgcagtatatgccagggggcaaaatcatgaggtaacttctttggataacttgctaacaggtacccgtatttaggaagtagcatggtaatgtgtggtggtatcttaggagctgattcccaatattcaatatggatgtagttgatcttcccagtttgcctgatgtagaccaaggtgtattggggctctccttgtgctgactgcattgggtggactgatacatcagagttcactcaagttgtgaccacaagactatgtaaggctgagagaaagtggtatggtgggcaaagaactcatttgcttctgtttgtaactttattgcctcacccttcttccaaatcctagggccacgtccttgtctatctccttgctttgaactgtaggcaaactattcccttgcttttcccagctctgcccaatagttgttgaaaatggccaaacagtactactgtggtcagttctcctcttattggttctgagtgtgggttccatggaccattgacagatgagtaccattgctccccagctccctcacacattttcactatatgtgcttcctgtacagctctgtgacctgagtcctaagtgacctctttctgcttcatgtgttatgagctatgcttaggctgccactaaccagagacagatctctcgtgcttcatggtgccaagtgtggatttttctattgggatatggtttcccttcttaaccattgcttctccactaaagtaccatcaatgatttctgagtgcagagggcctcaattgtatggatcctaaagtgcaggcattgaggaattaatttctttcacttaaaatttcatcaaaatatctaagtatatggctttagagaaaaacattgcaagtttttttttctgtgttcttttctgtcagaaagtgttaatttcttcctgctcaccttactacaatttgataaaatcttaaaaaaggagagagggaaagggagagggagaaggagagggagaaggagagaggggggggggagaaaggaaacaatagaaaagagcaaatttttacttgagaaatttgaactcataatgttatctatggaagcttactgaatttgaatgtgttttcagcagggaaatcctggaggcaagaccctggaggaaaggcgctctagtctagatgcagagatcgactccttgaccagcatcttggctgatttggagtgcagctcaccctacaagccacgtcccccacaggtaggtacttctcacagtgctgcttgagcagtggtcttcactctatctagaaagtgaagtttcttctgagagcctttcattcttatgtgaacctccttaaagccagtggccctacctcctaatctgacagggccccattgtgtctcataagttatcaatgaagtcacaaccctctggtaccatctcccacatcttagcagacattcactgtcatgctaagaacataactatcagcttatactagttagctaccagtaacttcttaaaggtgcattgtcagcatcatccttccggaggatcccttcctggctaagtataggaagaagggtcaaatctgttgcaggccttctgtgtccccttaacagggttctagatgccaaagttaggcaggtccttttgccagtgtgtggtttgactctgatgatgtttttggttttctgattgacagcacatacacctctgtgtgtttcactggattagctaacaggagccattgtattatgttccctaacaaattacagagccgtcctgcttctgtgctgtcaataattcatcactcatcttcatctaagatcgaagtgtctttgttagacacatccctatccccttcccagtgcatggaatgagactggcaggcaggttgggaacaaaaggcaaaacagaccaacgtcgaactctagtgtatctgtgtaggctccgtctgtcccagcagtgcacatggactccatctcttcttcattggctcagctttgcctgtagagcaggcatggtggcttttgtggtgaactgcacagaaaaggaaagtgcattgttgggagcagagtcataggcctttgcagtagctgtctagtagcgtctttcacagtatgagaaaaactgaggctgctaagacaagcaagcacacaggaagagaatggtagcgttttaagaaggttggcagaatctgtgcagtcttacacgcttgttaagtaagccaaaggctgggtgctattgtgccattggaggcatagagacagcagcctgagacccaggccagggtgggagcacacgcgaggctgtaggaagccactctaccaatagcttgcagtgagtttgacaccatgtttgtgttttgatgttaaactgagattttagcttgtcagttataaagcatagaaagttgttgaaggatctcaagcaggggagagctaaaattcattctgaatggaaatggaggaaacgagaccaactctaaaaagatggagatgatcaacagaaccatttcctagaagtgatgcttatgctatcatctgaacttaagcaagtaaatgccacacacctagtttctcagcaaacaatccagtgactgccaccagactcagttatgttctgcagaatggtttatgggctccttttaagctgggtttttgtttaggctttgttttttactcccaagggcttctttttttcctctcaattgttcttttatggaaaattttttcttttaatattttgattagtttatcttctcctaactcctctgatattctcaccagttcatctcctacccaaatcccccctctctcttcatctctctctgtctctctttctctctccctttcccttccttccttcccctctctcagaaagtaaacagacatctaaagaagtaaaggtaggagaaacatatatagacacaaagacacacacacatagggatcccataaaagcacaacaccagaagtcataatatatatgcaaagattgtgtaaggaatggaaggaagaaggacaggaggaaagaaaggaaggatggataggaaaagtcgagccctagtgaaacattctgagaccagggacctccaaagatgcatggtgtggaaaagactgtgctgggagatttttcctgcatgtcaactttcttctttaggataatgtctacatgtgctgcctataaaatagtgcactttgattggtttcttcagcagtgctcttaccaatttgaagattcttgctgcaagtctacactcatggtcactgacagcttcctgctcatgatgctcaggcacgcgttttctcacgtgactagggtatatgcatcttacctctgagatatagatagtatactggttttcatgggcagagaagccaagacttagccagtaaatggtagtcattttttactactatgtgagtataggtgtacccaaagcttagacttctgtttcattatgtattttataatcagattaaagtctttggtatgtatgtatgtatgtatgtatgtatgtatgtatgtatgtatgtattttaattgttttactgttgaataaaaaaaaaagcaggaaggtataagtaaaattgttccttaagaatcagtttcccattaaaaaggaaaactttcatgaggttaaagtaataactagtatgacctctaagatacatagtttcataattacattgaagtctatgtgctttgtgcctattccattctcgaatcaaagcatagtctagtctattcttttcaattattctaacttaggaaagcaagagttaattaggcgctccagctcatcctactgtattttcttcaacccatgcaactgaagtggatgtgtaagtatttattggctagcataattatatgctgtgagaacaataatcctacacttacatattaaactatgtgccaagagcagatgatgtcttctatagaccacgttgtactatagttagaaggaacctgaaatagccccaaagaatagactttcatacctaactttgatgttttctgttttgaggcaaaacattttaaattcaaaacctggtgacttacctgaccacctcaagtaggctacaaggtctgtagtctgtcacgtctcaagtagtcattgtgtttttcctgtctgtttctgaatcacctttatgtggctactgtgacttatgatctgcagaaaatgatgcctaatgtgcaatgtttgtgcaggacgaggttccagggagcacatttacatggcagctttcacagggtgcctgttcttgacaaattttgccaaagccttttcctcttttttcatagaagtatctcccatcttcaagttgttgttaattctaattacttttttgttgttgtgtctgtttggacaacgtagctttaactctgtatgttggaaatgtaaaggcatgtgtcactatgccctggctctagggaattcctaaacttttaaggcaggcagacagagacatgatctacagtgacagaaagaagcgcctcgccatgctttctactttgccatgtgcctcattacgtgctgaaactattcagagacattttgtaaaaaaaaaaaaaaaaaaaaaaaggaaacaggatgttaatattgggcctttcagagctagtgaggatcgtgccacacaggccttggctccttctgttctcaaaggacactggatttctgaaggacactagagctcacaaattataacagcaatgaaggtacctttgtttgaagcatagtttgtttctaatagtaatataaactatgtgtaccttaaaggagaatgacagattaaaaattccagtgagcttaggagctgtggcactcttactgctggaggctctcccagggaaatgctcagtagggtgagcaacagtgtttctggctatggtgtgtttagatgaaatacctttagtaaatttacatcgtgtgtgtgtgtatgtgtgtgtgtgtgtgtgtgtgtacatatagatcatttatattatatgtctgatatatcaactgtgaaatacttttagcaaccttgacattatatagatcatatatttgtatgaagtataaatatcaacataaaattacttttgtcagcatttccaagaataatatgtcatatatccatgatatacaacaccttttgaatgtttacatggtagatacatatacatatacacagggacacacatacacacacacaatactacaagaaagtaaacaaacaatttagttaagaattaaaacttaaaaacattttatactgcatactagaaaaacattttagaagactaaacattgagaaatggaaaggaattgtaggcaaatggcaggcccaagatgatcatagaatatcagaacttatgtggctcatagatcatgcaactaaatttgtaacatagcagcaaagaggttttatccacccagggaaagggtatggctccagaaggcttacttagcagccagctgaataaccattttcattttttctctgatccataaaagagcacttctctgtgacagcagcagccagccagcatagttcttataaatatctttactttattttcaaaatagtatttttatggcaatttcattgtcttggtgatttatcaaaagattagacatactaaagccgaagtgcaaagtaaccagaaatcgtaagatgatatgctatccttccattttccagtcctagctcttggatgtttgctgtcacctcagtttcagcttaggctcctagttggaaccactctgaattcttgctgatgtgtgtcttttagaaattgagggtcaatcatcacatctttttccttctccaaagaatccatgctaaaatccacctcctgattcttattcttagactgccttctcttcccgcacggtatttattatggttggagatgtcatttaggttacgtttttgttggattatattaatgttctactgaaactgaacatttaacaaccttttttcaatcataatccattttaaaagatctaaagggatttcactactgtcatttagactagtgtaacattacaaaactacaaactgagttatttgtgattgagaaagagggagaagattagagagaaagacagacaggactagagttgctagagaaagcattcaccctgtttctatctgatatttctcctcatactctgataaaagtgataggatagaggaattgcttttattttaataatacttttcccttgaccctggtcctgatcctgtagttctcctttattcatggcagctgattctcattatgaggtgacacttggtgagctcttggatgaggagctctttaaagctctttaaagctcttggatgagagctgtggtttaagggctggagttttcatctgtaccttctatgctctgagatagggagaagacctgtggttgactagatcatgcccctgatgaaggctatagaaattctaaagatggagttcagagaacgtctcagttgttgaagtgactgcccttagctgtccactagcagaagttctgcacttacggccgttgtagacctagctcagaactcttgtgtatacctttacatttgtgccctttacgatggcctctaatgttcattgcccagtgcatggagatgtttactatttccttcagccactctagcaaatgatccactttaatcatttgctgggaccaccaagttggagataagtcacgaagaaacaacctggtgctcagcacgtgcaattggcgtgagcatgcacagcttatggagcgtagtgtctgcagtgaaccaaggtcctctgaattcaattgaattcttgcatattcatctggtgtcagatgggaaatggatatcaaagtaaagatttatgtgaggcatacattcagagaacacaagtacattttctcttgtcaagtaatagggaagagttggagagcttttagacaccaaggttataatgggtctaccattggctgctttgtctccagtctgtaaagctagaacactaccctttcacaactgtgaggtacacatcctgagagaactcccttgacataaactagtctccagcaccaatctagggttgctttcattgctgtatttaaaggttattagcacatgtttggggcttgctttcaaacacggggttttaaaggtgataccaactctttatgaagactgcttgtcctgaaaaataccaactcatcctttctaggacagaaagttgctcaaacttctctctggctgtccattgtcttctttatctgtagcctcagccctctcacactgggtgcatttcatagagcagcagattatgatgcagactgagaaaccatttcaggggtgtagacactgcgctaaaggatgtttattaggaattcatgtggcctgaggtattaagtacaataatcagggtggagctatgtggggccatgggtagtctcttctcttctgatcccaagttctagcttgccaaagccaggagcagctgcaggagagatttattagtaattaaaagtttaatatttcatattattcacttcagcctaaacatgccgactactgggagttgagagctcccgcatgcttatactgtatgaggagcatggagtcttgcagacacaggcttttactttggagacttgtgatacgaacatggtattttctgttgaagcagggattgggatagtaccatatccatacttcttacattttcttgtgaaccataggggagcacaccttgatttgttgagaatggatttgtctatatattgacatgaaatgctttagaaatgctatgtggaagatattagctgaaataaaataagatgtgaaaaatagccctgtagaagaaaaattgatgtacattttgcagtgcccatgtttagaggatctgggttattttgaactagtctgtacctgccagaagacctagttaaataacaatggagtgggggcggacaagcggttagctgactcagagttgcatgctatgggtttgatgacgggcaattaatttttagatcgcatataattgcacctctataacatttatatcttttctttctttgtaaaaaaggcgatgtttatgtttgtgtcatatgtgatcaatatagtcaaacttagctgttacaattccccatgaatgccatcaaatgtaacattgagaataaaaagttaccaccacccaatctacctcgtgttgtaccctgacagacatgaataccagtttaaagtattcagtctaagccatctccttggacagtaatgtggttgggggaacagatagctgtgacaagtgtcacagcacccactcaactgaagtccaggaggcagtgttcttgctgtggcacctcacctgtggtctcagagttgccttttcctgcttgttagaccttgatgagtccttggccaagaacaagtattccactaccccaaatcactcaatccagtcatacgttcttgagttcctattttataacagcatgtcagtggacacaattagccctatgtgcatgcagaagctcacatcacatttgcaagactaaagagtactcctgtcaggactgccttctctattcctcactttctctctcactatttaaatgtctattttggtagtagtcttcctctgaatcaacagttcttttccttttccttttttttttaaacagcaaataagcaatgtaaagcaaatacaattgtgccttatcatgtaagattattagacataaccacagaaaataagtagcattcatgtatgtgtgtgtgtgtgtgtgtgtgtgtgtgtgtgtgtgtgtgtgtgtgtgtgtgtgtgttttaagagaaaaggttgtgtctctaattgtgtacagtcctgttgtgtgcatttagacacacttttctttatttggtttgtagccaaagtaaagtataatgatggtttctctggactgatgattggagctgctttttaatcactcaccttacatatcattattatacgtggtgaataagtctctggatctccaaacaactcatcacgttagggtttaactgctaaagttgtttttcatgatgtaggacatttaccaggaaaaccaaacatttgtttcagttgatacagtaattaataatatgaaatttaagtttgctatgttttgtcacttgaacatacctatttcctcacagttctaatgagctgattttgctttggaataaaagatcaaattgaacacatagtgccaatatgcactacagccttagtatgattatcctttcagttattgtctttacgggtagatggaggaaaactttctgtgtacttgtgaaagccctgtttagtaccagagaagtcaactggctgcgcttcagtatattaagtcacaaagaactccagtgaaaaataaagtccccctacctcttacctcataggatatgcatcactgtgtctgtgtaaataattacgcccccttaagtttgaattacccaccccccaaaaattgtgataaattccagaagacctcaaggcaagatcaagattatcattatctcaacataaaataacattcaaattcatgcttgttcaataaaccaagcaaagttgtcttcagctgggccatctcctccaaggaaatacggtagaaatcctgtctcaggctgaggtggaattcgtgcatcaaagtcccatctgtttcttactttaccataataaagatataattgcactataaaaatatatccaggtgaatggtggctctataagaacaactgaatgacaaccactgattaatgtgaactttctagttttctttaacattaacttctgtcatttgaaggttgtgggtgttttgagaagatgatggactataattcagtattatgcctattctcttattattggactgataaaagaaataaatgtatatccttgtgtgtgtgtgtgacacacagagagagagagagacagagagacagacagagagagagagagagagagagagagagagagagattttctgtaagccctttcacaaggcatcactcacctacatttttgctgtgctctttattagttctttgaagatttcatgtgagttgattgtgctcacacccttccccaaatcttccaagatttctctttcctacccagctctttgtcttcttcctcctttcaagactactttgtacatctaaattctcttgtccactgaaatatgatactcttaagagtaaactaacccttgctttccagcagctaataattaccagtaactcttcagctaaggtaggaacttagtgtccagctcccctctccctgatagaatttggtttggcttcagcttgcacgtgccttgtgtgtgctggcataaccactgtgagtttatattttcaacttcccttccatatccagaagagacttttccctttggccagctactagctctgactctgatatccattctttccccactcccttctgcaataaactctgcaccttttttggagtgagtgtgatatttctttcatttatggaggacattctatagtcctctgttctttgtacattaacccattgtagggggcagtgttcattatcatctagtataaatggaaactctgttaaggagggctgacagacagattaatctatagatatgataagtaattaagttgtttcactgctgtgtctttataagaacaacagtttaggttttctcctagaggtagtgaattgtgtagccatgctgtgtcctagcctagtaatgataggagtgtatggatttcatctcatagactggcatttcaatccaatcagaaaatgatcagtaactcacatgttttttgtgcaactatttggctttttaagtggaagtgaactttacatatgtatataggcctgtgaaaaagtacatcctgtagtcttcttgtaaaaagataagtgaatcataactggatttttgtatacatagatgataagcagtaagttcattaaatgacatcatagagaaaataaaatatatggcttacagtgaagagaaggatttgctgctttgattaattgaagaatataatgttgtatagttcataaatttcttaaagtcacactatcagctgtttatatggtaactggaaatttttctaattctattttgttatgtactgtacatggggaactggtgaagatattatatattatttgctgtttggggtgctaggctctttattagactccccatctgtgcctttccaatgaagtagcatacacattagtcaccatttacgtgatattttctgggcagacaaaaccagaaaataaggttggtgttaatgttgtttccagaagcatcaaggataaatttctatttcatgggatcctaattttagagctcactctctcatccactggactacattaaacagaattccaatttttagctttgtgtatgaggaagtgaatttcatcgatattgtggatgtgctgtcataggaagaataatgcttctctgtttgcagcagtactaaaagaaattccttgaagtatagtcagaaggaaggatatggacagagcagaacttttcatggccatcacctttctaccattattcagtaggtgaagtgggggaggtgttgtataaaagaccctggtgaagactttgagaatcatacccttgagagaggacctgagatttaagactatggacattgttcacctactcatgtaatgattgcatgattaactctttatctctttttatttggttattgattaagcataaacccactgttcagttgctgaagtaaaataggtcctaatcacatagaaagacagacaaccttccttgttcgtgtgattgaacattttagatgttgggcttttagttgggtaaatagcttcaaacaaggaaacaaacaaacaataactcaatactttcagaatcatggatggcttcttttagggtttgataagctcatcttaaaattcagttgcattttcaatgaccttggaaatgcaagacagtttaagataaaggaggaggagtactagaatagtaacaccatctaatttcaaattttattacaaatctagaggaaccaggcaatgtgatccaggcctatggtaagtatatgtattaggatcacagatatggaagtccagaaataatccattatgctaatgttgattgatttttttaacatacttttgacatatttataagtttaaaggatagtttttcagcaaaccatgttgtagtagctaggatccatatctaaaaggcttcacatcctatataaaatttaatggaaagtagattattaacataaatgcaaatcttgaaactataagactcctaaaagaaaacctaggaacactgcttgtgatctttgactaatgactggcttcttacatgttgctcatagaacatgagtaattaagataatgcagagaagccagacttcatgggaattaagcatttctgttcatcagatgccttacttagagctttatttctgtgaagggacgacatgagcatagaactctattgaagaaaacatttaagtgtagctgacttaccgctcagagattcagtccattatcatcagggtgggaagcataacagaatgcaggcagacatggtgctggagaagaagctgagatatctacctgcagcaagaagagagagtgacaaggggcttggcctgagtatctaaaacctcaaagcccaccctcagtgacacggtttcttcaactacctattccaacaaggccacacctcctaatagtgtcactccctggtgagcaagcattcaaatctgtgagtctatgaggtccattattattaaaaaaaaaaaaaaaaaaaaccaatatgacaccatcatataattgaacaatgaatagaacagaagtgactacttatatatcatacatatgaaagagtttgcattcaagatgtattcaattgttatttctcagtaaagataataattaaatggacaaaagatttaaacaaacttttctgaagaatttactggatgatatgaatctggtaccagtgcaaggacataagttcagacaacagatggaaaaccagtcatgactgacagtgagatttcagggtttctcaagtctactccacagcttcaagaactctctttcttagaattgtttgtttcctgcttcaaagcatggaagcacaaagatccttgattttgttccaggactctggtcgactatttttggcctaaggcaattacctccttcccttaatcagggccttgcaacttgccttgatgctgttgtacgtgtatcacttattccggttctcatagacagagactgccaatgatctcagaagatctccctactgaggagcagtaattcatcaacacagaaaagggtttcagatgaaacaggaaccattacacaagacacaggttttcattcctttaagtcttttggcttgacatagtctctaaacaccattatttaagagagttgtcctctctctttgccataaccctttaattcagttcctcatgctgcagtgatggctatccatacattttttgtttttttttttataactgtaatttcagggtgttatgaatcataatatcagtgtcagtgttttcccatgatcttaggtgactgttgtgaaaaggttgtttgaaacctcccaaagaagtcacgacccacaggtttagaagagctgatttaagatgttttagggctggctaagataaccaagtggctaattactaaccctcactaaatctcagtattgttcactgcacactttacattgaaatactctagacatttcatgtctgaatgtttatttctttcacccagtatttaaaaaaaaattgggcattgttttgagcttttgttatttcactaaggtaatcctgtaggtgctactgtagttaatgggattcattgtataccaccagagatagatgtctgaaacttaagggccagtcatcacctttaaggtggagtgtgtgtgtgtgtgtgtgtgtgtgtgtatcccaggctagcttggaaatcactttgtagttcaggcaggctctgaatttacagagatctctttgcctcttcctcttcagtgctggagttaaagacatatgatgaattaaatctagttgtatacagttattgaaatgtatcaaaataattgaaatgatggattctatacttcatactagatacaaccagcatactttatcttctaaccttacctctttcaccttttaaattctacctggataagttacttaaaacttttttgcctcagctttcttctttctgtgaagggataatcgtcggatggcaatgaggacaatattagtcaaaatagtagtttataatgagttacaatgtgcaaagcacttaaaacagtgttcggcatatagttagcactatatacattagcaaatcttattgggagctcggtgcctatttttaaattgttattgcttttctgtagagatattgatagataaatttagtttgtggcattctatccaagtctctgaaatggtttatccattcatttgagctgaccatcatccttagatttttcaaggacaatacagctgtctgtaggctttgcccaaaaccctttggctttgtcggcggtttctaatggatggtctcaaaagccagagcttgtaccatcttctgacaaatgagtcaccccatctgttcttgcggattacaaagtaatttttctgttcagtgaatgaagttcacattatgactcatggatttgaaatttgccttaagttagtaaccattgatctattgttatgtgttaatttttctatatttacccagccagagactaaaccacgtaaagcaatggctaaagtctgtttatcacaatgcctttatcaggctgttaagcaaggttggctagtctctacccactttctctttcaatgctctagagtggggtctaatactaggtatttctacgaatgctttcaaagcagtgctattgtctatgccagggtttgtttttgaatatttgaaaaagtatatatcaagacatgtcttccaatccactatacagcagtcaatgacaaccattggtttatgccttcatcttacagtggcgataactaatacgagagaaccatcttttcctgggtacatggaaccataactgtatatttaacaaaataaaaggtgaaaaattataaacgtgtaataacttggtaaaggtttagccagctccaaagtgacaggctgtaaattagaaagcagatatttcattttgagcctgtagttctaattcctcccccagttcactgctggtgtgtctccttcagcatcccaggccatgtctatgccagtcatttagcattgtcctgctcccctctaactttcttcttgacagcagcatggggaaagcagtacttgcagcacttgtatttccttagggagagatggctctgagcaagttctcagagatgctagatccgtacactggtgatgctgtacaaatacttggaggcctagagagggaagtaaaacactaacatctctctgttctcatacagattcacagggcacataatgattgtgcctgtagcataatatgcttaaactaatctagggatatttatggaagtcagctgagtaaaaaaagtttggtgaaatcaaagagaatgggtgaaatggctcatatttagagattagtgaccttgtggaaaagtctgttctttctcacaactgcctgcgttgtattccactcgatgataccttcaggcagttaactttttggtcgtgacctattaattaattaattaattaattaacacaaaagtacagtccacaagtagggaaagccatagttcattgagtgcttgttttaatttctaagtttatttttcttttagtgaaagaccactaatgacatcatttttcagccacttcgtatcttattcagaggattccatttaaaaatcaaagaacacagttaacagttgcccttcccaatattataatgcacttgtaacagaagagtatgtttaagcttgtgacagataattgtagggctggaggcatatacatagcaatggattaactgtactgcattctggaatcattacatcataacctgatcaaacagactgtgagcactggaaatgtttggtttaggtgaagctcaggcagtatagggcaaatgtcctgaggcaggcctgggaagatgatatggactttctgtaaagtcatcccgcttctgccttcctgtgtgccttctatacagtgatgactcaatccccagcatctcaggaatcagaaagtatgtacaatattaagttactgtgcaatcctctacccatccactgcacaaatacctcaatgcccgcaattcttcaaggcaggtactaacaaagttatgcacatacacacagaaaaatcaaaccaatcgggggggtcactaggccccaggatcaccctttcttctggcattcctgttttgtgaagctgctagacttgttcataacgatattatataatattcctcatgacatacaaatgctcaagtgcacacggaaaccactataactacatggtctgcttgcttttagtttttatgagctagttgttgaataatctgatatatgctgatactatatcttagaaatgtggaaaaactcacctgcattctcaaaaagtccattacagaatgcagtgcttaaacccctttcttccagttttgtgtttctgtcctcttagtcctccacgacttacaactatatttgcattaacgtactattggaagagagtcaatatataaactcgctcatctggaacctatatagctgaagtgtggaatcagtttcaggatccagctgtgtaactctttactcttgtgctatgagaacctcctagatatgctactggaaatttcttatcacaatcctgttcttagtgtgaaactacaaaaacagttttcattattgaattgttgaacacctcaggaaatattattattattgctactgctattattattattattattattattattattattattagtagtagtagtagtagtagtagtagtagtatatttacaattaagctgttgctctaccgcccggtcctccctccacagttcttcatcccattcctcatctccattgtctctgataggatgctcccataccaccatgcctcccctccctggggccaaaagtctttcaaggattaggcacatcttctcccactgaggccagacgaggaagtcctctgctatatatgtgccagtggccttggaccagctcatgtatgctcctagttggtggatcagtgttatctgggagctgctaggagtcctggttagttgagactcttggtgttcctgtgtttttgccctcccattcagcttctttagtccttcccctaattcaacaacagggtccctgacttcagtcaggtttaatgtaagtatatgtgtctgtctcagtcagctgttggtagggcctctcagaggacagccatgctaggttcctgtctgtgagcataccatagcatcatgaatagtgtcaggccttggtatctccacttgccatggatccctagttgggctgatctggactgcctttccctgtgtcttctccattttgtccctgtagttcttttagagaggaacacttctaggtcagaagttttgactaagtgttgaggccctgtctttctactggaggtggactcttcaaattctttctccccactgttgggcatttcatctaaggtcactactattgagtcctgagagtctctcacctcccaggtctctggtactttctagaggacctcctcacctcccactttctgaggctacatatttccattcattctgctcaccctctgtgtttctctcttgcccccctaccttatcctgttcctcttttcccctccccctactctctcctccccagatcccttcctccctgtatccctcgtgattttcttcccccttctaagcgggattgaaatatccttacttgggccttcctgcttattaaacttcttattgtttgtaggttgtatcctaggtatcctgtacttttttggctaataaccactatcaaagagtgcataccatgcttgtcctttcagttctatattattgtgggactgtgaaaggcaccctattttctggttgagctagatttaaaccccagtaaccgagcagattaatctgcaagggacggaaggaactttgccacgtgcttccagacactatgctcctgacacgagaccccagccccataattctgtagccatcagtcatgtagggcaatgccccaggctcctagtactccgtctggagtccaccaccatagttacctgggaatatccaggtaggatggccccctctaaaaggggctgtttgccccctcctttctctcttactctcttcccctttccccttacccccaggctagagcctgccctcgtgcccccactctgttctcagctgttctgtaacatctagcgagtgtctgtggtgtccaagagtgagaacctaccgtcccttgcccccgtgcaggcctggggaccccaagtgaactcgagcagttctgcaggaacctaagactgtgcctccctacccccagagtggggtgctgcagcttctcacagcccaacacccatctggaagcaatgtggggtgcactcattcagacttcctggcctggtgtgcctcacccagtggcctgaaccttgggccagattcgggaccccatttctaagccacaggttatcacactcaggtcggtattttttctttccatccacttgcctacaaaactcatgatgccctcattcttaatatttgaatagtattccattgtgtaaatgaaccacattttctgcatccattctttgtttgagggacatctaggttgtttccagcctctggctgttagagataatgctgctatgaacatcatggagcatgtgtgtctgttaagatatggtagagcatcatttggttatatgcccaagagcaatatatctgggtctttatgtaggcctacttccaattttctgatgaaccaacagattgattacttaagaggagaaatttttgttttgagtcatggttcaagttttgtccattgtttgctggttgctcttaggctagcagtatagtaggccattgtagtgcaagatcagggaagaagagaagtgcttacctcttgtaaactaagagacagagagagagatagaaagatgggcttagatgagatgaatatgtctctaggttgcctgcttccagagacctctctccacacagtcccctcttctcactagatccttctacactttttgctatgaactcatcaataatccattaatgagtttagcatcctaatgacatactcccctgaacagtaccaaggggccgtgagccaacaagaccctttaatatccagcagtaattgaaaggtgccgcattttatatggaatccgctatagcattgccactatgcctataaactcaccattttgtgccactgttgacaaaattactacctagtgtgtcaggttcctttcctaaggtcttagacaaaacatcctatgcagatttcattttgtgggaaagacaaacagcctgctatatttctgcaaccaaaaccagagtgagcagaaggtgtctcacaccttctaatgggctcctgtggacattgggaaagtgttcttgatgttggattgatggtgtttttactcactgagtaaatcaattattatgtaggaattcaagtgcccattctttttatccatgaattggttcactgagcctttccttatcgttcttggtttgctttgctgcattgaataaagataatacatttttaaactcttgtaatgaagaagaccaaagatagaaaagaaagaatcattaacgatgaaattgtcagtcaggatataccttatgctagaaaaatcagaagagatttgtatctaaataacgggaacgggcataagaagaagctgataatggtagagagtgcggatggctctggtttgcaatcatctccaggactatatgagctgggaagtaattttgaaggtcttaagaatgaagtctcttaccaagggatgctctaggatatgtatttgactaaaattcctcaaagataattgtactttattggaatcttaatggaacccctacccattaacatacttcatactccacaacttcattagcaaaactcacctgttagaaatcactatgtatgctaattttcaaaagcagtattcagtttaaggcagttgctagcaatgccatgacggggtttgaaaatccaaacatgtcttttaatattagcaccagggcgaaggccttaatccttgttatttgttagctggagtctcaataaagcaagactttagtagtttgttagctcataggcgcttcaggttagtgagctgactggaagagctacctaccgattagtggcagcaccagaagtccctcaggaggaagtctactcctttcactaccagaaggaaacagcatttatttgctgccaagccccgaatgtgtgccttagatgaactgaaatttatgtcaccagtggcttactgcacccccaagcattagctgatgccagtgtatttcgttggtctaagtgtcccccagtgagcgtcggggaactttctgcatttagagaaggaaattgagttgtgtgtcattttcaaggtaactgcaggaacttctatatagaaaggaagtattcaaattatataccaatggagagagaccaagtggtctttaaaagaaaataaaacctaataataaactgggttaattataaaccatccactgtataaaaataatgttaatggtttgatttttctttcaacttaagatttatttgaaaatgtcatattaaaaactaggctgtgcaaaatgaaccttctatttttataatactccacacaagtaagggatatttgttggtgtgtgtgttatttgcttttctattgttctgataaaacaccatgaccaaagcaacttataaaagaaagtggttaattgatcttatggattaatagagtccaggatggaatagcaaagacaaagtgtgatggaacagttgagagctcatatcttgagctacaagaaggcaaataaagcaatggaggtatgttaaagggccttttgcagtcttgaaagccactcccaatgagtgacagacctcctctaacaaacaaatacctcagaaacctttgccaacagttctaccaactggagatcaagtgttcaaacatatgagcccaggaaggctgttctaatgcgtactacgacagtattttgggggagctgagttagatagtgatgcctttgacagtcattttttatcaaggatataatttgtgtatggacctggcttttattccctattgaagcgtaagaattcagtattcctggctagagggatcagaaggaacgagacaacagaagccatctctcctaaccatgagcagcttagcttggtcttaggaatagggcatgagacgtgaaaaatggtaaatgtacagactcaaaacctgtgctatcatcttcttgcaaatgagttgaacgaatttgtgcttgttattaaagaattagcctataaagcaaagcattgtgttgtgtccataagactttgccttcaatgattttagggccccatctttcaaaaaaggaatttgttcaacagtttgtacagtttttctacctctatttccttttcttttgtctgaattattctgagaatctttgctgaacatgcttgtggtaaatctgggctgatttccaccttagagcagtttcagtatagcctgggccagtcaccagcatgggataaacttaaggtagtgagaagtcttgtgcatattgatattggagtcatgtacattgctgatttaaatgatgcctgatagacccatgggcagtacatatggagttctctgagaatagatagatgctcttgacccaggagaaaagcctggccagtagggtgaatttggtatctgggtgagtttccagcaatacaccagaaactcgattacataaaagaacattatttttcttacctttacttttatttagttttggggtttacaagtttagtctctgaacacttcatctctttttgaaatgtaccattttagaagagtataaagctgcttttctgggcttatgatgggtaaaataacaacctagtaatagtcaaattgtaacttctagatcttgtggacaaatttctttatttgtttagtctcaatgggctaaaatgaatagagaaagtttatatcctttctcgtttgagcttctagagcctgcctgcattcctttgtttatatcctcatccactgtctggaaagcctgcaataaatcagctctttgactatgctttcttccatatggttccatctgattagacagggagtannnnnnnnnnnnnnnnnnnnnnnnnnnnnntattctggcaaataaagaaatttgtccacaagatctagaagttacaatttgactattactaggttgttattttacccatcataagcccagaaaagcagctttatactcttctaaaatggtgcatttcaaaaagagatgaagtgttcagacaggaagtaggctttttcctttaggtaatacatcctgagtttatgttgatagtaacagggaattcattcatttagtgcagacatatgcagtctgttgtgtaatatctcattaaggtcagtagcaggtccttgctagccaacagtgatttgtagcggtttccacgggaaatgaagtacagtggttacctgttcttggaacacatttcagtatcttgtatgttgtaaatgttcacatcattattttattctttctccttgctttggttttgccctgatgggaatactactcaaggtctaaagcctttctgaattttgttgttgttggttgttattagtatgttttattactgtaacaaaagacctggagctaaaataaaaattcttggaggttgacattcaagcaatatggctctgttaacagccaagtttttctgcccttacttcaaggcaaatggcatcatgggaagagtgtcctcatatgcatatatcagaaggcaaggtttgcctccatgagcattcatttcataatctgcttttttcacaagatccaccttctaaagattcccagctcaagagtatcacatttaccaagcttccagtttatagaccatggtagtgttcactaagacataggccaatcatattatcgacctgtgaaaagttgccctagctttttcaagccgcttgtagcctgcccaagaacagcacgattatgtgcctcagttacagtgcagcccacgttgtggtgcttcctggagctgatgtacagtgactgagccagcatagaccttcagatattcaccccaggagcagtacccattctccctggaattgtgaacatatttaggaagtctaatcatcacctctgtttcctggtgcctttaatgtaagaataggtgattaacgtgtatgcttgtctaagactgacttgtcatacatatgagctggagaacagaaatagatggaaagatttttgtgatagattatggaagagaagatgtattgttaagtcaagtccagttacactgttgagttgcagagcagatcagctaaacaggatgttctcttgtaactctcctgaggtgggctcaacctcaaaagagaaggtgtgagtgtggtgtgccctgccggagcctctaccgagtgagtcacttatgtgaaaatgtcttgacatacatagaattgtagagcccacactgtatctgatcacagaaatgttactgcataatagcaagctggctttgatctccatgggattgcaggctgggggatgaggaggggtggcttttgaaaggtcacctctactactcaggagaacacagagtatcaatcccttatatctgcgagctggtgtagcaagcattggaagtgtgtgcattaaaggaaaactgccatgtatcttcatgtgtgaatggggtgctttttttttttctggaagagcttagcatcctgactactttcccttctatgttgtagttgatgatatctcacacccactggtgtgtgaagaggaagaacctgctatgcctactttctgtgttagtgatgtggcataatgttttctggaaatgccacacaatttcaaatgtgactcctttctaaacttgcgaatagagttgacaacagtgaaatatgtcctgtaaacaaaccccgagacactatcttttgaatgagtggtagttgaatttataccaaatcccagaagtaggaagtcccacatgtgtggagttctctctgctgcccgaggcccacaaggggcagtgccgggaacaaagcctgcatcacctacttactctcattccagtccagcacagctgagtccaagttttatattctattactcacaatccaaatcgatggtaacatataatattttacctttattgagtaaaactgcaactctcttctaaaggtgattgcattgctatgtgactttttatgctattaaattcttctactcacatcttatttctggaattgcaagagaagtaaccgaaggactcatttatctctttttatgaggtacttagtggacattgttgaatgttttctggatggtgagggtacaatcacaaataaagtgaaatgtacgtccttaaagggttcattttcctgtgggagaggattcaaaagcagacaattatgtactaaagtctaactaagtggtagagagaaagttgaaggtaaaacatagaggggatgggatggtctggtcattgcgtttttttctggggtttctggggagacacttaagatgaggtagcattggagcacagctacctaggttgtattgaaacaagctattagatgcatgttaaaggatgttccagacaggcacgtttcaattttttgttattttaggggatagaggagaaaagacggcacagattctagccagcaatggcatgggtcagattggaaagcagcctggattggctgctgcactctgtgaatcaagatgctaggtatcagtgagaaagaaagcagctcctgatcatggcacagggctctggactctgggtcttccttagagggagctggggaacatctggaggctttgatgagaagtgttctagtcatggtggcctcctgctggaaaacagacaacaggcagtaatgcttcaaactacctagatgtgaaagctggcaggactctatcaatgagacaggttgtagacaggaagatccaaaggtttgcaagtctaggactgatggcctaatcaacaagatggtgggcagatgggatgtgagtagtaaccacttactgaggttccagcagacagaaagagcaggcatttggtttccatttttagaggtgctttcattttgacatttattttagacttttatttgtttgtggtagggtgttggatgtgtgtgtttgtggcttgtgtgtgcacatatgcacacagacaccgtcgtagcttattgggtatctcctcatatctttctctatgttgttttactttgtgcatgtacaggctttgctttcttgcttgtacttatgtctgcacactatgtgcctgcctggtgcctacagagttcagaagattgcattggatcttctgggactgaattctcagttgtgagccactgtgtgggtactgggattggaacctagggcctctgcaagagcagcacttaaccattgagctctactcttaaccattgagcgtcttttcaacctttgtcatcattagtttttgagacaggtgtgtcatttgaacttgaagttcacttcttttgagtggtaggctcagaactcctgaaatccaaatgtctttgtttccaagtgctgggcctttgctgggggtctgaatacaggtttcttgctttaaaagcaagttcttttatctaatgagccatattcttagctttttctttcttttttttttatataatgggggaaagggagaaaagatgatcaagaatttgtctttgtatatgttctgtttgtcctgttagaatctcagtttctactgaataggtgtatattcgaggctcaaagtcaatctttcctcttgatatctcattaggagtcagcagaatgaacttcagaactttgccacttaaagactaaaatctgagacaatattttaatgcaatggagacaaccgaagaaatgatcttggaggcaaagaatatgcctgtgggaggaggccccaagcacagtggattctagaagctaggaagaacatttctgaagacgatccagtcacttgtattgtatgatcaaaagcctaaagattgaaatttgaagcatacagttcagacctttggtggagtttaagatggcatgggcattctctgtgctcttcttcaatgtttattcacttttatcattttttgatttgtatggatgagcctgaggtgctaaatgatcattcagtgcagtgggccacagtgttagatcccagggcagggccctgcttcaacacatgctgttgtctgaacttctgtgacctaattaacttttctctgttttaaaaaatagactacattcagtaaattgccaggctatagttattttgccatttttacctctggtttttggtttgcttggttttgttttgtttggttctttgaaattcaaaaaatcatcagatcctactagaaaagcctatactcaacaaaactggaaaatctggattaaatggacaattttctactcagataccaggtacctaagttaaatcaggatcagataaaccatctaaacagttcaataacccctaatgaagtagcagcagtcattaaaagtttcccaacccaaaaaaaaaaaaaaaaaaaaaaaaaaaaaaggacaaacaaacaaacaaaaaacaaaaaaacaaaaaaaacccaagagcagatggttttaatggaaaattctataattctatcagaccttcaaagaagacctaatatcaattcccttcaaaatattccacaaaataaaaatagaaagaatactacccaatttgttctatgaagccacaattatgcttatacctaaaccacacaaagacccaacaaagaaagagaacttcagaccaatttcccttctgaatattgatgcaaaagtagttaataagattttcacaaatcaaatccaagaacacatcaaaacaatcattcatcatgatcaagtaggcttcattccaggaatgcagagatggtccaatatatggaaatccatcaatgtatcccactgtataaacaaactcaaaaaaaaaaaaaaaagccacatgatcatctcattagatgccaagaaagcatttgacaaaatctaacacctgttcaggatgaaagtcttggaaagatcaggaatccaaggtccatacctaaacatattaaaagcaatatggcaacatcaaactaaatggagagaaacttgaagcaatcccactaaaatcagggactagacaaggctgcccattttctccctacctattcaatatagtacttgaaatcctagagccattagacaccaaatggaagtcaaagggatacaaatagaaaaggaagatgtcaaaatatcactatttgccttttccggtgatatgatattatacttaagtgatcccaaaacttccaacagaggactcactcctaaaccttataaacaacttcagcaaagtggctgaatataaaattaactcaaatatatcagtagccttccttactcaaaggataaacaggctgagaaaaaaattagggaaacaacacccttcacaatagccacaaataatataaaataccttgttgtctcaagtgatagttgattaaaatcctgtttactgaagatcaaaagttgactgtaaaagataacagggctatgaaaattgtgtttgagtatattctgtctactgtatatatgaccatgtttatatcaatagcagtacttctcttttgtaactaaaatggaaggaagatgtagttttgatttcaaaagtctattaaataatgatctcatactatggatagggcgataatataaagacatgaaaccaagataactaaattctacgtctactctgttctatactaatctacttaggagaccttgacatattcttgcctctgtctatgccacactatctcagatgcaacacaaagcggtgatttaattaattacagtatctcaggttcccagtgtaggagatgggaattctggggtgagatcaaggagtgttttcttctgatggcatgtagcttggtctccatcttataagtggcccttatcatggaaggaggcatctcattgttcccacattcagaatgtatgattccataaggctgctccatgatggtattaaccgagtcctaaatgtggctgtatcccttatggcttcttcagggtctgattactgtgtaagaggatcagaagtgcacagggaaatgctctggatcaaggggtcagtggacagtaggatggttatgactcatggaatgcagtaaagtctgaagacagagcatacagtacacgctcagtaagacaagcctttcagagtggtttttctcctttttatattttcatgatcatagagtcaactattttacccaaaactgaatgacaaggcctcaatttagcccctctgtataaacccctccagttacatttgccaatggttggttattctttttctacatcagtgccaggaagagcagtatttttactttaaaaaaaaaaggtaccaaccatcatccagcttctcattagagaaaagaaaaacacctcttacataaacccactttagaaactatgaatgtagcactgttccgcagaccattttcttctttgcctgctggctgtccatagctgctttcatgacctcctcctctcaggccctgagacctttctgtctgctggcctgcttgttgaatagcacccaccaggggcaaacagaaagtacccttgttctctctcttgtacctagacttaaattcttatcgtaccactcaaggcagtgggattgctggtggagtgggggaggatacttcatatctctagatcctagtttccctgatatgcaagacagaacttctgctttggggatttttttgtttgtttgtttgtttgaggtcagagttaggggtgagaatgtatggaggaagtctcatagtcctcccagtgacacctagtcgatgcattttccctgccctatttggtctaaagacgcctcttgactctctgaattatggtaccaccaaagtactttccaagtcactaatgagacagcaaaaggggtctgcaataatcacttgagttgcttccaatctactgaggcagttgattccatggcattctctgtcacactgtggtgctagttggtttgtatgttcattatacttctgtggcttcattgtcttctactgaatgtaccatagtagtatgcatctaaaatgagatcctgcagacctgccctcaaaccctgtctctgacattaacctactatttggcctatgtcagctcttatgtcagcttcttcatcttccaatggcagtcctatgaattaggtctctccagatctatgtagattgttcaggaccattcactcaggcttgagatgttccaaaaaggaagtccctttcgtttctttccttcctttctaagaagaagaagttatgtaaaagtaacctttattcacttgataaattgtcatctttgaggcttactgctaaatacagtcaccctttctatttctttctgaaatctggctagctggttcaactcagctgttgtggctcaaactccaagctgactgattcaatctggcttctttcagcttctcactgaattgcttggcctcaaactaactggcaatttgttatagttatttggctctttctcattctctggcttcaactgcctctgttgatgtgcagggactgaggaccaaactggactccaccgtactccctgcactgcacttactgcacccctactgcactccacttcaccatattcactgcactcaccccactccactcactgcatccccgctgcactgtactccacttcactgtactcacagcactccactgtatgcactgcactgcaccacattcagtgcactccactgtactcactgcattgaatctcactacactcaccattcccatgctgccctgcactccatccccactcactgcacccccactgcattctgctttactgtgctcattatattgcattgcactcactgtaccctcgctgtacagcactcactgcattgcaccccagtagaccccgaagcactgcactgcattgctgcactgaacagagcccaaagacactttcagtttcctgtgctgctcttaaatagctttttttcctgagagttgggcatattctatctcttcctcattctatcagatctttgtctgattcatcactttgtctgctccttaattgatcctcattgcttgggattacaggtgagtacaaaaggcatgtttgtattccagccagagggattaaagaggctcatctgtattccagatgaatcatatagacctacatctttggatgtgatccttcgcaagagcataggttctctacctagagtatgtggtttccccataatgtttagtgtctggctaatgtagaagtcctacctttaaggactaagtttcctacttgataaacataatttggtgcatttaactagtaattgcagtttgcaaattgtcatttatctgttgcctctgaagttcctctggagacaagggcattcttatccatgtttagatgtaaagaaatcagttaagagttgaaatcattttttccatatatcttaatcaatgctggggagcctggattttacacaggctattttctcagacttgaaccctactagaactcaaagacaataaaagatgaaagtgtgtcacttcctaaggaaacctgcattttcttacctgaaaatgaagtagaatctttcactccctccttaaatctgtgagaaagtctgcttttctgtcattctctaacacaaagtttgtttctctcggttcctaatctgtcattttaaccacgtgggctgggagttaaaggctgcacttgtccttggtgaggatacacttgtttcctgttgttctgcatctgtcaaaccccaactgcttatgtagctttcctatcccattgctcattgtaaatattctggagatgattcaaagtgcatagaatatagactggacaagtagatttgtgtatttgagaattagcggagagagttcacgcattccagcaccattcacgctcttgagtgtcacctggggtcacaagttgccatccttcttctgggatgaagttgtctatgagatggcactctgtgttctttcttgaacttctgcactgtggaatccctgtcagtgatcagcccttagaggagcacactccgcccttcttcatcagtgccaaggaggaaagaagacagttttcatatacagaataacaagcagtattttgggtgtgtgttttaatgagctaccaataacaaaataaaacttcagctgaagaattgacagcctggatctgtaatctgcctgacctgacaattacaggaacttattaccacgtcagcctgccagatggatctccttgaaatgtaatgtgctctacttctgaattcaacacgcacttccttttctccccctttgtgtttgttgagtttcgggaagaagcagctttacttgaactaaacccactcatttcaagtgtgtttaatgacagcaatatgtggcagataaaataaaatcctacggccttgtttgatgtttgttttaatttcagaccctagtaaaagaatacagaggagataaaccgtatggctcaaatggtggagttgaaaacaaatgatctattatcataacttagcagtttctctcccagagcatttgggaggtcaggagatctgaggagtagttataaaagttgttgaggtttacatggtagttggcaatatacagagtagttttctgttacgcggctgcagctccatgctggcttgccagaaaggcacatcctactctgactcaagtggactgagccatgtcaagtcctaattctgagtggcagagtttacctcatccctgttccagtcagtttagtgattcctcgtgtgctctgtcaggaccactcattgatcccttatgtgatgtattagtgcactttgtgaatatcctgttttttagctttattaaaacatatgtttgtatgacatcctcaatactttttacattagagtatttgaaaataaatagagaacagaaaagtctatttctcacaccccacctgttcccacaaactctactcactgaggtagtaataagtggccatttgtaatggattaatatgttcataatagacataatacatactgttgagtatgtaaaatgccgctattgtctacattctgattcactctttcccatctatctttgtcataaggaatctggatgaaagttttaatgcttgtccagaacctcttaattcaaactataatattatttaatgtatcatctttctggtgtcatcttctcctagttgtctaaaatgtaaaggggaacatcgttgcttgtctgtttctgtgtagctgtgaatttggtgttggattatagcatcaccaacagtgcagtcctccagttagctcattttatctacccaggctgctactcagtcgcatgcttgggaatgtcgtgttcagaccaatccaggcacttctctaaacagatggttgtggcaaaggaggttaccttccaaagcactgtgatcccaatagaaaaactgtctgtggaagaggggtagagcattattgtaatagttttgtttatttaaaagtcatcactccagatagaacaaggtgcttatacagtagaaatatctatcataattaaaaaatgttaatgcatcacttctatgaacaatactctgaactaattctttggtattgaagaagtgttgaacctaatcagactttaaaaatatacgcttgagatgaaacccaccttgggcttcttacggctcagcaaaagtgagctgagtcagatgacccacacttggggccacatgggtggcccaggcaagaagtgagcacaaatgagctccagcccagcaccttggcacctggacagcacgctagcctgagatgacccccacgttagcaaccaacagtcggttgctgagcaggcccatgcgacattccatgcccaagaggacccctacctggtgctataatccatagcactcctgagactactcctgaaaaaaccccagacactccagacaccactaagaggagcaagtaactggtggagaaatggaagagaaggagaaacagaaagatcttagaattggaggcttgagagcagtgaagagcagacagatgtaactaaaccctgatgccacctggaaccatagtggagttgtgacctgtgctgccaccaggattcatatccgggtccacggctttatagcagcaggagtctattaccaccaaaggccagagggacatctctgatctggtatgccaaccgagaacatgttgatgtcttagggctgtgaagaactgacctcacatttcactgcaaatcctgggagaactaggcctggggccatgtaagcaggagagctgctccttcctcctagccagctgaggtacttgagagagtcagctctacactaccccctgtccccaggaagcacagtcaagctggccctggttgtggtagttgtgagtgatttgatcccattcattggagcaggagagctagctctgcctttactgtctgtgacacaggatgggcccttcatgccatctcagggaagtagagcttgccccagtaggatgttgcatgagagctgtcaggctgaccacctcggatacctctcagtcccatatccagggctttgaattggcactttccagtgtctaccctattgatgaactcacagaatgggttgaaggatttagtcctacagatccaaaaccataagaactccatgacacggggcaacaacaggacatctgagaggcgtctcagtgagcttccagtattgccagtgtagcagaagtcagaggcctcaaaccagaccaatgactcattgcaatgaacatttgcaagcaaagaagtgtggacaaaatggtacactgtgggacacactgtgacccactacaacgtacacacaagatagttattttctattgggggggggcaggtcaggatataagggttgaaggtgagtccgaggtgagggagcaatgagtggaatgatgtgaaattacaaagaaccattaaaaagtgaaacacacacacttgaattctcagtatgaggtatcaagttctagaaagtgacctcctctcccaagccaccctgattacttcatccttctagatgtttatattggaggtaggaactctcattccatccctctatttcatattttattcactaataaatctattcattgttaaaaccatcagaaactatatgattcagaatcctgtttgtctacattttattagaataaagaaatgtttatctggtttattttagttaagtctggccagggctgtagaggtgaagatgatgttggatggtgaacatttatcgatttcctctttgtctaaagaagggaaaagaacaaagtattagagcacctggtctcatggaggtttggtataagattgaagacccaacatagccaattttgttatctcagataaacttccaaggtttccatgctgagtggtccctactggactaggatttagtaagctccctcactcctctttccttctttctattggtagttctctttattttgcttgtggagataaggaaactttccctctagggccgtctggcttcttcatactatctccagcttacccggttcaacactgttcctggttatttttctctggatacttacactcagatgccagaagcactaaggccattattttagctggttcctccccagtacaaattgggaaggtagtcctcctccaacacagtccatagttatctggtcaggttttgctgtagtctccaatccaattacttgtgactagagttcagaatcacctattacacggctgtggctatatatttatttaaataaacagtgtcccgaggttcttctcttgaatagaatcatgggtgtggaggaaactttacattttgcatgctccttcatcatagttagactccaaaattggttaaattgagtgttttgaagatttaagagtcaggtaaacaaaatactttccgaaacctacattcaatgtctcatttaataatagaaatttctgccaacttagttctttttgagctttggattttctataataaaaaggggaggacagcaaagataaatttcctctgcctttgttctctggaaaagcaagccttctggaagtgaaggccctgacagggtgtgaagagaagggaggcagtgagaagcaaggtttagagaaggcacttagagtcaagaacaggataggacagattttcttcaacagtgtattcctggacagaggaggggcacatcacagactctgattgttatttaggagactaagcaaaggaaaaggagagtctgctgcatagggaacagtgttctatgtggatcgggaaggctggtgagtgagacacccaggcagtgtagatggacacttggaaacaaggaatgcacacatctgctaaatgctggtgctgagtcccatgagaggatgtcataatcagatctgtcctgagtctcctctctttctcaatgctctgaaccaattcaaagcacgatggcactgtctctaatttaagggtaacagaaaacagtatgaaatacagatgaacaaattttagcagaatgttcattgttgtgacttcagaaaatagaacacataggtctccacctatgtttataaatagagacttcagacagatggtgtcaatgtgtaaggctgtcactatcagaaacacagggatgtggccttgagcccaaggggaaaactactgctttatttctacatatgtagccttgccttccttacagtagcacaagtgccctgaaattctctcatggcataagattgcctcttgtttattttagaatttagggaaacagagaggagcacgatataggctggagtcagtatctgcctgccaggggctgaaccgcggctgccctgtttcctctcagatctactaagaggtaattgtcacttctcctgtgaacaatgggggaagcatagacgggatgattctttattgtaaagatccaagaagtttccttctggaacttaatcatagtagtatgtgagaggacagtgtagatatctaacttcatgtaatctcttctgaaggctaaaacaaaatgggagtgtgaatataacttggggtgcagattagcccctcaggatgtgaggctggtgaagtgctgcgctctgctgagtggctctcagtggtcagagggccagggaaaggaggagttgagaagtcagggtgaagcagatcgtagacatgtttcctccttggttgtatgccttaactagctgtatagcacagagaatggacactcctagtttcctactgcttctcctcttggcctgtagatcccattactgtttagattgcacttttggtttattgcaactactgggtaactttttcatactgtctactggaaggacaatattgttagctcatcatcttttactacaaaggtcatggagcctggaagacagtatcattgtcagtcttgtcctgttcactgcagtattatgcacacatgctaaacagtctaaaggtgagtgctgttaggtagtggcaaatctatggttcttgaccaaaatagcctctaagatgagattatgatttttaagagatcacgacaggggcctgcctttccaataaaattcacatcttaatagcttctctaagggataacaaaataagttcctccttttactaatgataaaagcactgctcaaaggagcttagtggaggttcatatcctgagaccctagcaaggaagtcttttgacattttattctctctgttaagtgggaatcccatatgggtagaatatgtgcttctagacacatgcatatctggatatatgtgacaagaaaacttttgtgtccatgcgcaacattccttcaaagcggcgatatactttgaaatatgtgactcaaacacacacacacacacacacacacacacacacacacacacacacacatatatttatatatatataaaacaattttttgaaaaatggtgtgcattaccacagcaattaacacattagtgctttgattactttttaaaagctttatatataatttttatttaattaaaatataattatattgcttttcttctccttttcctcccctcaagtcctacccccatattacccatttctaaatgtaccccctattttgaccattgtttttacttttacgtgtaaatgaatacattttagatacagcctgcagagtccgttcagttttgcttgcatgtatattagaccattggtattggataatcaacaaagaggtaagcccttttctccatgtagcagttgttaattgcttggagttttcgtctagtggccggtccctgtggcttctcccattgggatgtcaattgttactcttatgtatacatgttgttaacatttcattggtccagctctgttattgctgcaagacacagtcccacatcaggcttcctggttctctgactattaaatttcaagctgttttttaaaattcttgatagtgatctttgcttttttttttttaataaaacataaaaaatccataatgtctcctcctaatttaaggaatttaaataataaaaaaataaaacatcaggtgtaaaataaagaaacattcaggcattaatgtttcaaaaggaactttctaccatacttcaagtttgttgttttttaaacatttgcttttatcaaatacatagaaatccctttactgagaagcattggctccttctcagtgtggaccgatttccttgtcacagagcgcaatttactttatgtcctgtgaaatgatggtgcacatggggcttcagagtgacaccaagggcttaggaatgaagggcctttgaaagaatctgtgtgtgagtagtgtggttgtacaatagacaggactgacttttgtcccctctggtagtaattgtataaagcatcttctgccttacattgtcagtacccaagctatctcatgtttggatgaggagacactggagtgccacaccctgctgctgcttctcagcttattgtgtgcatattctcaaggcaatgtaaaatatgcgtctcctaatgtatatgttagaattctcacatataatttagaatgccatatatctcgattttcaggcattcaggagacagttttgataagtttgagacaactctttctgatataagactattttgaaaaagtgcatcttttaaaactgccatttttttaaaaaaagtatattgctagcactttgtcttttgaactgtcaggactctaaccactgtgcagtgaatagaagtaactctgactctgactcattctaatttcccctgtttttgttacattttaaatgtacttattctgtttgctcgtgactaagtgaagtggcaaacatgaagctcagaggacaacttgtcatggcgtaccatgtctgtggcaaaagtcagactcaggctgtcaggcttggccgcatgcacaatagtcatttctcttggcaactctactcttggtgccttaatggaattcccaaaaagttgtagctctcaagctgcatgagtctcttttacatttttctaagcacaattaccatgttctcttacaaatttacctctctggtcctttatttccacatcttacaaatggagctgtttgtagatcctatctcatatggttgttaggaatattgaatatgtaatactgtgtccttattctttgaggtatctactttttatttataaattaattctgttaaatttgtgtatatgaatggtttgcctacccatatgtctgtacacaacatgtgttcctggtgcctttcgaggccagaggagtgcatcaatctcctggaactggaattacaggtggtctgtgagttgccattgggttctaggaatcaaaccctggtcaagtataagaggaacaagtgcttttaactacttagccatctcttgaaatcccagcatctactttttaatgtcagtttctgagagattgaaacgaattagataaggtagcaccatcatttctttcttcatgttaaaaacacagatgcattcatatactctcaagcatcatgtgtagtgtttgtggttcttatcacaatgcctaccacaatggagtataactgctattactggtgacgtgtaagccaccatatttatagctgaaaagcacctatacctatctttttttttattactgtactgtcaagcagatagtcttataattcctgctctttattttagaaaacctagaggactttccatagagctcacaactaaaatatctagattgtggtggtttttttttcccctgtatcttctgtactgttcacctaggtctcagatttccctggttttataatgtcacatagtattactaatatctacttgtgtttcatacttcaatgtcagttttagagtactttttaaagtttcaaaccttctaaatccaaatttctaatgctactactcctcaagtgaatattctttataccccatggaaggatttcattagtgaaatcattgtggtttgtcaactcctataattctttgtattacttcttttgacacttgctctttggaaatttcacttctgccttgaaataagacatttcacatcataccaaggcatttctgtttctcttctaatgaatataactcgctggaaagacggctcaaacattaaaagtatgggctgcttttcctgaggacacaggttgtattccccgtactcgcacgatatctcacgactgatgttaaccccagaagcagatctaatgtcctcttcttgactgcacatgcatcaaaaaggcacaccgtacacaggcataacacatacaattagaaaaattaaaacaattggtgacctatattttccacatataggctttaacaccatcatcaggacttagactttgctcatatccctactaagtttcagagattacagggtttatgttaggaggtaatgatgatgcaaaggagaaggctgcctttgatagtctattgggattagttccctccccttgaggaagcagttggagtaaatcttgtagctatacatatttgcggtattactactattttacctatggaaggacttgatataaattagtcctttgcaggaagcagaactatagttattcttgcatagtactaagcataattgggaacctggacagccaggctcaagagtagattcaaacacaaaagaagatttgagaaattaaactatagggagataatttaataactaaggcttttgtttattcgtttggttgtattttcagggtgcaatactttttacttttacttctgtaaatcaaatgagcttttaagacttgatcaatacattaaattaacaaggatttattgaggacctgccacgagctagagacattgtatgtgctagacgtaaaacccaacttgtaatggcatttacactaacaatgttctgtgccatgataaagcaagtgccgagggacagttgcagttcctttgtgttcacgttggaagctctggaaggtaaatgttggcaagctgaggaggtctttgagaagtctcttctaaaagattatggtgacgtttgtagtctggaagtatgtggaatggagaaggaagtgcttttctgggaaaaagtgtgctgagactcaaagtagttcaagatatctgtaggcctacagtagctttgtgggtagagtctgtcttccctgcgggtatgtgtgactgtgcccactatgaggtcacagaaaggactagctacaggttatatcctggtggataggtcagagagtgtgccacagttaacctagacagtgggctcatgccaagttggctcaaggttccatagttttaagcgtaagatgtgtataaaagattggtgttcccagctttttgaagaatttgaagggcttagaaaatggagtaagtggaaagaaagaatatgtctgaaagaatgcattggtgatggttcagtgcagtgcagtgactttgtgtattgtgcaccctgtcctgtaggctactggggaaagtaggggcatgcctgaagaggagcactggaacactgaaggtttgtgataacaacttagtttggattagagaggtaacttgtgatgtgcttaaactgtagaggctttgcgttgtgaatgaaaggcgaatgtgtcttccttacggacatgagccataataatccaggtagaatgtgagacaaagtcctctgatttagcacttctgcagctgaagctaacttgttcttacattaggaatacttaaataaattttccaataataccttatgtttttcaagaatgttcaatgacttttgtcagttaaatctcttgggaagaatatggtagattatcatttctcaatagtttacagttagggaaattgtaacagaaggatttaacccaaagttctgattaggtagacagatatggtctttgagccaagacagtatggctcagatggttaaacatgaattggcaactcaatatatactttaaaatactgatactctctgcatactagggaacagtgatactaggcaaaggcatatttgcacagacacacagacacacacactcagacacacatatagacacagacacacacacacacacacacacactttgcttttcaacaagtcgtgaattataatgtggtgatagattcatgctatgcttacctcattctagttataaaaacatttagaaaaatacttatttactctagttcttacaccagccctaaaggcctttatctgtagtagtcagctttgaaatgatttcagtttaatttcagttttatttttccattgctgtaatctaataaccatactaattcaagagtttactgtaatgtgaacttctgattctaatctggatgaaattagtatacctgcttcatcgtttagcgtacagaagtaagcagagtgttccgtcctttgttaggtgattaagaatatccgagtaagcatgcccaaggcctcttgagttctctccattttatggttaaggcagttaggtagagagaattcctgtgtgaccttttgcaacatttttgagattataattgtttcatttccttctttcttttcctttttccaaaaccttcttgtgctctgctccctggttcaaacttacagcctctttatgcttttgttgttcgtggtgggggtgggttttttgtgtgcatgtattcctaaatacataaataccacttgttcactttgtatgatatcaattgcatatgtatcttcagaatcctgtgtagtcttgttatgtttgttaaagtgcctcttttcgtggcttttgtttgtttgtttttagtttttctagaagccactgatatttttatatttactatctttaaaatgaaatatttgccattttaagatttaatctttaaaatttaaagtaaaataatattctccgtaaatagtagagaagcaattgcccagtatgaagattgtgtgctgcggaggtctcattggacagttggtctcaggtagggagcatcagacgggacactgaatagtcactgcagggcctgagtcgctgagcctgcttggcagcacagagatctggaacgccttaaaataaaaatcgcaaatgcaacagatttaatcaatcctagtatttttctctcttattctcccagtcctaagttaaaaataaaattcggctgccttattttcctacattctagctagtaggattagctggagctctcaacaggaaagcaatagatagagtagacaccattgtgtggtgggtgaaagcccggtagagataattacacagtcacacccactatattacccttcaaagaaactgagcctaatattctcctcctaagcaatttaaccaacttctaaaaaaaagtataagatattatttagagaatgaaatagctactgtatataatcaggagggagaattatagcaaattattacactcatttgataagtacataaagagctacattcaaagctttgtattgagcctccttggtaattgttcatttctgctaactgtcctgtacaagggcagctgtagaagagctagaaaagaagggtatgtgttacacaggttctgccctgctgcagactcagtcccatcccgtgctccacgggatgaagctcatgttggcaccagatgtcaaaagtgatgacttttctttcttttttgcatttccaaggaaaatgttcatgtctagtctcagaaaataaaagtgcaataaatttgttttactatcttgtttgcatgcacatgtgtgtatattttaggcatgattgtgacaaagctttattctctatatgtatacagcactccaaaacaccattgttttgcaaaggtaggagtgtatgtataacttcacaggataagaacatctccaaatcccccaaattgtttactcacttgaccaacaagctgtcaataatattgggggttatttatttttgattttctttaaacagaataaatacatgtataaatattgacacttcaaagattgaggagttacatttgtgtttgctatgatttttttttctccaccaagcccaacaaaaacaaaaaagttgaactaattgctattaagagaagcttcccaacataggttttaagccagatagcccttacaagctgttgttaagatgtcacatgcccatggaggaatactgtccctcactggtcagcagtgttcaacaaatgtctttatctctagatgattcatggaaaaaggcatgaaagtatggagtataagactgtattgcctacccagccagttgtgggagtgagccttggcatccttgaggcagcagagaacagtacccctcacatgcttatacttcagcaattataagctctttctctcttggagtttcttcccatttccaactgattgctannnnnnnnnnnnnnnnnnnnnnnnnnnnnnnnnnnnnnnnnnnnnnnnnnnnnnnnnnnnnnnnnnnnnnnnnnnnnnnnnnnnnnnnnnnnnnnnnnnnnnnnnnnnnnnnnnnnnnnnnnnnnnnnnnnnnnnatagtcctggtgacagagttcttgtaattgttcctgctggccttagtgacagtgttatagagaaccatagaattactgtgactcttgataaaaacttaactcaaaagactaatctctaaatgcaaagaattctttagaccaccaagaaagccacatgttgctttgtttttgcatttattcatcacaagaaagtgacatgcaatttactaaaaccaacatgagttggtttcatgtatatttcaaaccatgtctttcaacaagaatataataaaaatttaatgaagaaacagtcatgatttaaatggtactgattttgcttctagaactgtaatagctaagagtacattttatagtaagcagtgcctttcattatcactcaaatgataagttatttagtagagattaatattggtaggtacattaacaaggaaggggtttttgggccttcgactcaaagtgagtagttctacaaaaaaaagtttgggagttatcagaagtctgaagaacttgaattgtagcaatatcaatatgatttgcctcaaatatattttatatatattctactatcttgagctgaaattcttgtcagacaaatgtttatttcctttttttgttgttgtttttttttgttttgttttgttttgtttttttggttgtttttttcgagacagggtttctctgtgtatccctggttgtcctggaacttactttgtagaccaggcaggcctcgaactcagaaatctgcctgcctctgcctcctgagtgctgggacaaatgtttatttctttaccaatttttttactggattatgaaatttaacaacaggcagaagtcatgctgtaaactaaagtagggagcctgagtcagagcccaagtgactctagtcataaaagctctctacatctgcctacagcagactgcatccttttctgtcatagcttgctcatcagacattgagaaaggaccttgccacattgtctcagtagccaccatttcaaagagttgatctctgtctcaagcaaaagtacactatttggaatttgcagtggtttgggctacttatgtatagtaatttcctctttggttcacagctcattggttgcaaatatctatgtggctctgcctacccataaagatgtcaggaacctagaattatttagaatgaagcatccatagtttctaccttgttaatgttaacaataggtagcagcctaggacatttcctctacgtgtgtactatcataatgtccgaacatggctcacagaatcaactaagtagcattcatagggctcccagagaagagaggccccttggtcttgcaaattttatatgccccagtacaggggaatgctagtggcaagaagtgggagtgggtgggtaggggagcagggcgggggcagggggagtgtataggggactttcgggatagcacttgaaatgtaaatgaagaaaatatctaatacaaatttaaaaaaaaagaggggtggctccccgagagggaagcagcaatcacgaagcctgtgctggtctgtgccagatcctcttcatatatgctatggagaggatgtctgactctttagagtgttcttaggtcccttcccccttactgagttgcctcacccagccttgatgcaaggatttgtgtctatttttattttatttgttatgtgctgttcagctgatattatccttgggcagcctgctctttgctgaagggaaacagagaaggttggatctgggggagtaggacatggctaggaggtgtggagggagtgtgagtgcagtcaggatatattgaaaacaaaaacagaaaaagaaaagatattttaaaaatatctttttccatcattttaaaaatgaaataagaaatcaagaatggatgcatagtgcccttcaagcatcataatgcactacactaggcacgaagagaaaccagggtccaactaccatgcccgggagttgtacatttatgcaaagttttatgcttcactatagactatggtttttcaaaaacgactttagtaactatttgcaaatgctttgaacccccttcctacccactgcttaaaggttggggaggaaagctggtctataggacaatggaggtgtggacccatttagaagtaattctttgggtgcttcccatcttcattgttaggataccagcagtccagtttagtagtggcaggataccagcagtccagttcaaaaagtgtcaccaaatgcaattcagccgtggtggcatgttccagcattaacagccaagcctccactaagtcagcatgagtcagcaggagggaccaggagaagttctctgccatgcctctctcaataaagtgaagatcagcgaagatacaagaccaatgaagctttgcacagtaagcaatgcaagtgtcccatcactgtctgttgggtcctacttatactctcttcaaacatcacatgtcttcccatgagtctacatcatatgacacaaccagaaatttcctcttaaattcactttacaatggaccagattttgtctcaattttggtttgtttgttcatatttcaaggctggtagtcgatctagagccttagaaatgttaggcatgctactgagctgtgtctaaatatacagaggttctttttaattctttttctggccttcatttttaaccataaaaagaaacaaatacagttgaaggttttctggaaaatataacaatgagctatgtgattctcacagtcttctaagaaagtctatttgtcttgatcctagaacaaacacttaggaggttgaaatgtgtgactcttcacttgatctgagccagaggccgagaagcactaaccttgctttattctttgtctcatcctctgatcttactttatttaggacagtggtcagtggtaaagaactctcataataggtgaagctacccagatttccatttcaatgttcaatttgaaggaatttctaacacaagtaaatgtagaaagattataatgtttgcaatgacagctgaggtggcctctgtaacccttactttacggaatgtatagggtcatctgacctcttgtcaagcagagttgtggatagtgacacattccttgactctgcaagacaggactaacagagcagcagccagtgatcacctggtcacaattctgaggaagtgttgagagaaatggggagggcagtattaaagaagatctcttggctgagatagaaatgtccaatgtttcagagaagcctttgccctgagatgaaaaactgagaggatctggtcccttccaactcttctgttggaaaagggaaagccttatgttcttaatgtgcttgaaaccaccgtgctcccatctaaaaatttagtattttcttctagtgagtcaggtactaaacagatgcccagggtctacaataggtcctcagtgggcaaagaagtctctccagcccctgatgcccagaaagcttcatctcagctgtatcaaaagtaagtctgcaagcttcgttaggcccatgtagcagcttccaaaggtccctaggccacattacatcccaagctggaataaaaggcctatgtagtagctgcctgccttcctcacgaatctcttgcagcctttaattaaccagtgttcctcaagtgctttgggctccctgtttgggtagatgtgactgaaatgcaaagtacctttcctgccttatttattgctccagcgagcacgctatatgctggcagcatttatcttcattttaattttatctcccacaaatataggcattaatttaaatcacatacagaacataacagtttttatagaggcaaacttattccagcgtgctgcattttaatatcgcactttaccatcttttctcacttgatgcaagaatagtatctcttcctgcttcagcgtttaatctcaggacaacagaaactttgactgtggatattctttcttactctcaaactttatctgcctcaccgcctggctgttgctgactgcaagttgtgtgtgttttgagcactggtagaagtttcttccattctatatccctttgccttcctaattcttgatctgggggtggagagtggaggataaagggtcttacagctacaggtgagcccaccagtacttccggtaccttttctaatagtgacagacagctgagaggccccaatcctataatacatatttcaaagaagctcttgagcatcatccatgccccctctgtccttttattcaaatgagggttttctgtcttactcatcgggactcacgaagccatcttatgccacttgagtcttccctgagggaatgtgtactcggtgggctcctgtgtttgactaagaaacattctagttagctgtcataccctcagcaaggattctttccccatccttaatttgttgcttgaaaagttgcagccttcctcagttaagttctacagaactgccccaatagtcatgctgtccccagaagtcagggcctctcaggcagcaacatgagcctcagcaaagaagaccaggatttctgagcctcctcgggctctctctatccaggggccttcctcctagtaatgtgtaccaaagagaatggctaacttgttttcctttctgcaggccgttggatcgctagccttgtcttttggattgtttgctgatttttacatttagtctgcttttaaaaatgtactagcaactctggagttacctgttttattccctgttctatctcttgttcgttttgtagatgcagaaatgaggtcctgagaagtttattttccaaatcacagaggcagcacgtggcaggcctaggatgtgtggactctgtccaccctaactaatgtacttttggaaaagctcttttcagcctaaaatcttgacctcttgtttgttgctgactcttcccaagccgttcatttttgtgctctcaggtggattttatctgtggtaagaacatggttaccctggaaactcactcgctagagcagcaatccaattatagcaccatcaccagggtttattaaactagtgttgctaatgacgtagacttttgattgaaagatgctgggaattggattcttaccatgtctcaacccatgtggtatcacattaatttatacttctaatacaaacagaaaacatattctttatctgatgggtttggtttagaggctgaactgagtatatccatttggcccattggtttctgccctgtgtggagctgcctactcaggaaaagaggttgaggatcctcttttctctcctccatctgcgtctatccccagcccaaaggactaatggcactggccttgcttggatctgctgaggctacagatccctgggcagttttatttcttttcatgctttcagttgaaggttatatttgattcaggagggccatttttctctcatacactttagaccttcagagacttcccatgcaccaagaattttcttgggttcagacggataggttgactttaaattatgtgagctgaacaatcaggtctatgtggacagagttacctggtagtaccagtttgcaagaaactgcttcctgtgccaatggtttgtgagcttacacctgaagcatgtggcaggcctgaatacattgagccctttacatctctataacaaggcaacatcacctgctacctgataatggccatcaggttctattaattattcctcaccaattgtaaacatggagctagaggcaaggtcttggtaacctgcagggatattcagggatgtgtttggacatagtaaagcttgtcaatgtattgctgtccaacatctgactctcacatctcagaaaagaatcagaaacactgcctcgaagcccttgaagctgttacaggtgtccagagccattatcatcctgcacactgcatctttagcagtgatttgtgtaaaatgctgggaactgggaaaggagaagtgaggcggcctctccctgtggcctggagagtaatggtgctgtttgtcatcactgaacagacttccagacacggtatccaggttggtaaataggatcacacaccttcagagaacagtctgctttctgtgttagcattctactctccataacttgagatcctcattcaggggcttaggatgtaactccctgcctcggttcaattcccagcattccctgccagattgagagattgctaactgtctttcttatgttacccacttggcttaagttttctatctgtataatatttcgtcagcttttactttctaatacagcccatctgtaattgttgaaacttgaactaaagatttaaattctgttatttttctgattgtggcaaatcttctattacttgaatgaaatgaggactaacatgcaatacacacacacacacacaaacacacacacacacacacacacacacacatatatatatccttccttgtaaatgtctctgtggcatccgacttgtattcacatttgagtatacatgtttgtattacacaataatgtgtttaaaacatgagaaggcaatgcttactaatacttgtaagacttgggagcataggatcctttctctgtacctatacctaacgattctatattgtgccatttgccatgtgtttggttgccattctgcgtgtatagtttttatggatatatttcataaatttctaaataagtgttgtgttaatgggtgtaaaaatatgcctgagaagagcagtctatgaagaggagtttaagttcttcatgggttgattctattgcttgggacctgttatgatggcagaataatatcatagagagcacatggaaaaataactgcttgcttcatatttatgaaatgaaactagagatggagcctaaggcccagcatgcccgaaccagtgcctgctctcaagctataacctcattctgtatgctctgctgtccagtggctcgcctagcagcgccatccttaggagcgtgctgaatatatgcagtgctttgggacattctagatccaaaccatagcatattgtagatgtattaaatatgcaatttagcatatttattaattttataagaatcattatgtgtgcctttatatatatatatatatatatacccattatacacatgtatatacatatttagatatatgcagttcgtatggctatatttataaagatataaactataattttattcctctctaggtctttcccttcctctctccccaggtctctctctgcctccttacctctctactcctctctctctcctccttttccttccttcctttttctcttccttccttccttctttcctgcctgcctgcctgcctgcctgcctgccttcctgccttcctgcctgcctgcctgcctgccttcctgccttcctgccttccttccttccttcacctacccacctatctaccatccacctgtctacctatctaccgaatgacccaatcattttccaccaaccatccactcagctgcctagcagcttaaccatctatccacccattcttacacatatgcacccatctaccctttgcatgcatgcatatatccactcatctacccaaccatccatttgcccattcaggcagcattgaatgacaacctaccatgtgcttaaagnnnnnnnnnnnnnnnnnnnnnnnnnnnnnnnnnnnnnnnnnnnnnnnnnnnnnnnnnnnnnnnnnnnnnnnnnnnnnnnnnnnnnnnnnnnnnnnnnnnnnnnnnnnnnnnnnnnnnnnnnnnnnnnnnnnnnnnnnnnnnnnnnnnnnnnnnnnnnnnnnnnnnnnnnnnnnnnnnnnnnnnnnnnnnnnnnnnnnnnnnnnnnnnnnnnnnnnnnnnnnnnnnnnnnnnnnnnnnnnnnnnnnnnnnnnnnnnnnnnnnnnnnnnnnnnnnnnnnnnnnnnnnnnnnnnnnnnnnnnnnnnnnnnnnnnnnnnnnnnnnnnnnnnnnnnnnnnnnnnnnnnnnnnnnnnnnnnnnnnnnnnnnnnnnnnnnnnnnnnnnnnnnnnnnnnnnnnnnnnnnnnnnnnnnnnnnnnnnnnnnnnnnnnnnnnnnnnnnnnnnnnnnnnnnnnnnnnnnnnnnnnnnnnnnnnnnnnnnnnnnnggcttgtttcttctcagtcagggatgttgctcaccagtaccttaagctattttttcttctcattttctctaaatatcgtctatggtgtgaggtttttttttttttttttttaacttatttccttcctgggactctttctgatagatttaaatacagctcctgcagccccttcatacactttacctgctttgatcagtccatgctgcagcagtccaggctagctctgcagccacttgtagtgggtcacggtgtagcagagtataccacagctacctgagccttcaatgcctgcagcacaggttcagcattggggtatgtttgggattaagtagatgttccttccagggctcactgaagcttccattactatcatgaatgatcttccctctctctcagttccagcccagatggagtcttgacttttcataatttattcagtgacatgcacttcctgtgtctaatagtcaatcacttaccaaagggggagaggtgataagagagtaagaataattttgtcatgattcataggcacttggccttcactgagtattaccaaaaagcagacaaggcaggctctgctaaccagcattcctacatggattcttgtggcctgagcagtctctaagccatgccaaaagcatccctgaagtatttacaaggaatatatttctgtggatggggatgtactctaagcctttttgtgcagaaatatgtagaggaaagaacaaaaggaggaaaataggtaggacgcctgcatttgaaacctggttctcaccagtctcagccctaagatgtcacagcgcgctcttaaatcctttactctctttgtaagtatttcaatgcggaaaaaaaaaaagtatatttgtcaggagtctgtgatcaagaaaaaaagttgggaaaactaaagcaattaataaaaaatggaaaaaaatgtcaattagtcaggatctaattttattattctaaatattatggagtttaaaaaaaacagaaggaggtaagtgcttagctttaaaagtttttgtcaaccatagtgctactatgtagccattggctagaaaatgacaattgtgggtttttttttttaagcactgtcctgatatactgtcctgaagaatgatgctgttgaaacaaagtactgttctcaataaatttcttgtgtgtgtctgtgtgtgtgtgtatatatatatatatgtatatatatatgtatatatatgtatatataatatatattatatatatattatatataaacactatgtactcataaagttaatgtgtgtgtgtgtgttcaaaacaatttgcctgatttggggaggaattttgtttttgaacttgctcccctttgttctgtggcacttggagattcatgcccccaccttgttgaagctggtgggagatacattcctacattcttaggaggaagtcatggttctttaaaaatatctggcctatttttcttacatggtgaaaaatgttaatgtagtaggagagcatattagtcttgggacaccagtatatttgttatgatttgttttctacccaaagtcaaagatctacagaagccctcataatgtcccagaggttttgtcaaagaaatagaaccagcctgaggtatgtattgggattagctgtgaaggatatctgtggactgactaggaaaacagaagtccacacagtagggtgttaaaagcagcaggctggctgacaactggttcattcaggtcttcccagaccatcacttccttgaagccagttgattggattttaatgaaatctagatgcctccaattcctgtttggtcccagggacagtaagcaaaaaatggtgatcttccaacctgagatgaaagagaaacattgcttgtccaagagtgactgcctgttctcagtctttgtggggttggctgttgcctcttctccttagccttattcttacattctgcttttcgatgatagcaattgaactaaaagattatcttttttaaaatctttaataactttttaatttaaatagaattacctcattttcttttccctcttcttctcccaacttctcccagatagctaccctccagctactttcatgacccattatcaaattgatcacgcctttttatttgattattactcttgcatacacacacaagcatatatatgaaatcaagactatatggatacatcttgctgagtccatatattgtattttttctgtgtatagagtttcatggctaaccacttttattgaagggctcactctgcgaggtactaatcctccctctgctagcagcctatagatttagccttggtgtagaatcctttgaaagtttccctcttctacatggccattagagcccttgtcgtggtatttgactcttagagtctttctaacccctcttcctccaagttcctggagtcatagatgcaggagttgtgatgtaagtgttccacactgttatcattgttatcctatgataacattgtctcctttacttctctgaccacacagcatatagcttgctctactgtctgcatccagtccttttagagcatatcagtacccttttgatgggctcttgattattgctccctcattgctgtgtttctacccagctacagtcaacatagcctaaatcttgtaattgcttgtccatattttaactctgtactcataaagttaacatcatatgaacatcacactcctgtgtttcttccaatctatctctctctctctctctctctctctctctctctctctctttctctcccctcaacttcttgagcatgtctacctccactcaatgtctgtatttcttttcttgtccagccaggaatctgcagctctgggcttctggcccttcttctcatcctccttttgtaggcctctttcagagtttcacagcaggcctgcccagtaccaatcctgaggctccttcagtcctcagtgaccacttaaggctattacatgccacacccttcctttactttcctccttcctgagcagtcccacttaggaatcaccttagctgttcctcttgtgcctctcaaatgtgctttccctttgagtcagaacatcctttgtaaggcctattggtgacctcagctaccagtgttgtcatggtgttataggactatgctctacttcatttcttgcacttcaaatgcttcttctaagcttccccgtgtcgaaagaaagccagtctctctccagagtctgttcttatgtgttggttaacataatgtcactgactagccagctcccttagcaagacatttggataatttttctaggcttcactgtcccagacagaatctcctttcctaaatattttctgtattgcttacttctctctgtcttcaccatgggtcagagatttcagatcactgtaggctcccatggaccatgggtatatttgttacctgaaacaaaggaggaaggatttattttgccacatcacttcacagattatctgctcacagtgctgtaggcctgaactgggtcagagcatcatggcaactggaaggcatggtggggcaatgcttatcagaggaagtctgggaaggggggaggggtgcagggttgaaggacaggtcagtttccctaacaccccatgcaacctatttcttgctgctaggccctatctcttagttgtacatccagctatgaaccaaaagatcaatccttgaatcaatagcatttttgtgatcttgtcatctctcatgactggtaagctaagctttcagcacagagctttctggggtgaacactgcatatgaattgtacctttctaaagatgcaatccttataaccagttgtttatacccagctccatcctgttcatgtaccaatctgttctgcccgagcagattcctgtatgcctcctcttcactttatcttagcacaggagtacactacaataatcagggaagcagactctgaagtcaatagaacccagtttggatttcacttgtgtcctaggagtacatgaggaatagcccatagtgtctctcttaggcaggatgtctttgtggattcttcctctcctgccacaaacacactgggctatgctgtgaattcacatgctcatctctgtgcaaggaaccctggttatgccccagcctttcatggctgtcatcatagataccttaaagctgttcagcaaactcctcttcctagctcattgtcaggaccttgctgttttcttccgtatctttgctcttacacgtacgaagcactcacgttccatcttgtgggtattttctttcccgcttttaaggatcattctcacggcacccactgtaagttccaaagaacccttgcctattgaccctgctctcttgtcatatgttgtggaatgctttggccatgctaggcattagtgaatgtctgagaactgttcataacgtggctgtctcacttactgcatgtggattttcatacgctgaccacagctttcattttgtagaagaaaacaaaatataaggctcttgtttctgtggtggctccttgagtagctgctgcttctgcatggctgtttgtgcaagcaaatcaagtggcagtttacgaggagggacagccccaggccgattcccttctcttggggaactcaaaatggtatggtttgtctttcctcttcaaatcttgatctctgcaaacctagtcctttcccctaacctccatatagttgtatctcttttacatggagaaggagaattctaacctcctgcctcaggtatttacagaagtagaacttgggtaggggcgggcaagcacacgtgtgacagaagtttcagcattcatgaggagccactgtactttactgttaagcttcgggggattttttttttttaaacagttctacatggggaaagtcggttgacgatttttaaaaggaagcgtgccctttttcattagctccttttacctcatgctgagtcatggatgagagagcatttgtaggcagctgagatgcaggaagaataatcctgtcacttacacttgcaggttgttatgctttccagaaaactctttcagtgggttgcaaaagtgattaatctcccccttgaagctgacgaagaggctctctgataacaggaaattgaaggggtgggatttctttagagaacagggtactctttccagttttagattagaaaaatctattttggattggagcgagcatgtgtggggtgggggtgggggtggggagggttccgagtgtgcttgtgtgcctgcctgaatctgatcatgacctgaaaggatgaaaggaatttctggtgggatggtgcctttcgtggactggtttggctaattgttcatgttgcctttaaaccatggctttctgcatctcattctcttgtttattttacactccatgtttgagtttttacgtcatagtcccagatctcttgagaagacatcctttctaatatgagaagtagtaaagatacactgctgccttggttaaactcggtgggtcccaaaaatcaaagaaaagaccttaatctgggaagtgttctgtggtgaatagggactgtaagtcaggggtgggagtgagaatcattagaatgcattttatacagctattgaaatgtcaaagaacaaactgtattatttttcaaaagatgggctatgtttctcctgttgaataaattgtgccctcagtgagaaattttgttcctgtggtgtttctgcaacatataacttggacataagtaagtggttaatataactgaaatgcagtataccttcttagagcattaaatttttttcttcataattttgttttaaaagtcacttttcctgtgaggactagcaaacaattgcttagtcttttactggatactccattaatttacctccaacttaaaaagataattaaaaaaaaagataataaaaagaacctagcacagagcctttttgccttgggctgttttgtttgttttaaagttgggctatgttgccatgctagccaagaactcctaggcttggccgctctgttcttttccttcagactctgtggtactataggcatctgtctccatgctcatgcttggcctctggttttataaagggtctgagatttaagatgagttcctctgggttcttaacatgcatttgctctgttgcccccagagctttctgcttctcagcaggccattgtaatcgggctgtgtcaggctgccttccttccccactccctgcacccctcattctgaaggttgctcccagccagccccttgagaactgagtgcattcactcactgtgaagaggtgagggaggattttctctcaactctgtctgcactgcccctaagctcccataaagggaagacaagccaatgtccttcagcagaatggaactgctttgggaattcagggcttcttttagacctaaagttaactatccataccacttttaccctgaggcttcatatctaggttttgaattctgaagtagaaagtgtctaaaccatttacagttgaaaccttgctaattctcagtgcatagccacaaggatagagtggggaaagaaaaggagagaaaacgaatggccaagatgattgtattaaatgttttcagtgtatcatatgtaaacacattggtatatttgcatctgaatatttatataggtgtttgtactgctggcaagcaccatttaagtgacactattggacattctctgtgtccatattatgggagttgtaaggttcatatgtggtagcatctaccgtaaaggatacagtgtttgggagatggtccagttagggcaagaggaaatgtgaaggcatgtgatattttaagtagaacaaggtgattgcaaccaacaggtgtctgtatacaggtctatttaaagtttttatagcctcaatagaacaacttttataccagtaggcagtggagcgttgtcacggtattatttattattgccatggagattaactgtcttaatttaaattgcctacagtgtttttaagttggagacattttgatttgatatttttaagagagaaaggttctatacatattatggaagagcctttttcatagctaaatgccaacagcaaaatttaaaccaaaaagtactcatgaagcaatggtaacgagaaaggattgtggtttagtaaaggagaggactccctgcaaggaacagtgcttgtgccataaggatgatgtgctgctgtggagagaggtctcattaatccatagggacgactgtgcttcacccatgtgagaaaactttagggtctacatagaacacagcttgctgttgaagtcatgaatgccataatggtctacattttgaaaagtgaaacagttgttgtgagggggtcctgaaaccagcccctctctttctaacacctgtctcttaactgcctgcttagaggacgaaccacagaatgctgggcagtgtaatatatggcattcccagtttgttccctcatcctagataatttcagcaaaatagaaggagctataaatattgcaaagatagttgaatcactggaagagtggtgcacaggaggccatcgagagtaattgtttatttccattaccgtactctgtctgcaaaccagaggaccagatgctaaattctgctagataatgcatctttaattaaatattttatttgcaatacaattaataatgtgatctgttactttaaccttattaagaaattaacataattttcatataataggctcataaaaaggcaatgtgctttgaaacagcctttgctaaagcagttatgtgcattgtgcctgttgagttctgaatttagatgaattgattgtgggcaggaattacctggtacagtggactggtaactgtaaatccgaaagagatctagtattaatgttttctttagaatgagctaggcttctcagtcctccttcagaggctcagagagtaattcccatacttgctttgtgcttctgccctcctctgactctttttagaaactcagtgtaatacaaacagtgataattccaagtacacagtacactgggcgctgatgcctcctaatgaatgggaggtcatgcttctggttttgtgtcattcttgatgttgttttaatttttcgaaatgtgttaacatgataattaaatttctctagctgtcctgtgaagaaagaattttaaattgcgctacatgttgaaagaacatttagtgttaaaaaataatatctgttaaactgagatcatctgttggttcagaacaatgtctatagctatgacaatggcgctttaataaattaacatttaccaagctgtccttttaaagactgtttgaaatgtcacccccaccttcagctgaacagaaataatttgcatcagaagtgtgtgtgcccttaactcttaatgaagtaaggagtccctctcttcagagggtaattgctgtcccagtgaagtgtttatctcagcactgtcttgtgcttgcccttcctttaccctgtgatgtgtcccttaattgtatcagattagttctcgagtaaaattaaaggcagcccttaccctcacaactggtcctgctgtaattgcatagtcttcattcagtactgcagaggtgtggctgacagcatagagttgaattcccaaactctagcatatgaaccaacactatccatgtctttggacaacttgcaccaaacttgccaaactttatttctttgtagagataaaaatagggtcttgatcacctttctgtaaagtgtaaaggattttgataagacttggcatagtatgtatcctccgttgttaaagtttatcacatttgcatgttctccaaagataccttctgcttttctctgtgactctgaccacactgtgggctgaaaacaaggttccttccctcatctccagagtaggtgtgtgcacactggcaggaaaccatcccaacagatggatctcagaaagcccatcttaccttctggatagagaacaatccatctgaaactttaatatactaatggatttctctatgccacttaacattctgagttgtattttgcgggtatttaaaagtattctgtgtcacttttgttgccatataggctctcaaggccaggaatctctgtgccgaatttcccccaactccaaaactccccatacttaattataaactgttatccttatttgataaggttggaaagggctcattttatatacattcatattcttatttgatatacattcatgaatatgtgggttttattttaattttatttagtttttaattttaattgaaatataagggcatcacttcctccttctgtccttcttactctaatcatcccatgtccgagttttgtattcctgtggtttcatggtttacccttttgcattggatcttatggggataatacctaagaaacaccaattctccttcttttaagtatcataagttgcctgtagttctttgtctacaggtgaggctatgtgaggtttcccccatatacattagtatgactattagtgttgtgatttcttccattttcttcaggccaccatattgttaaggtatcatgggtatagcttgcctgtcttctctaggagacaatagcatatctcctggtcctccgacttttataatctctttgacttctcttctataattttccttgagctatagtctaacaaaaaaatctcaccatctgtcatatgaaaccttagcccaagttgttgcccatggtactccaagtgactcccagaacaatgtaggctatttttggccttggttgcctctcagaggttgaagttaagttcgttttgttgaagacaacacacacttgagccagagaacttgtaagactcagcctgtctctaactaaaagcttccttaagatcgagcttttatattaccagaaggtgctgagcaagatgctatggcaccagtgccatccagttgtgatccaccatggacagcgtggcaaagtatcctgaaaaggacagggatggtgatcttggaaatcaccaacggcagtctaattggacttagggctcacacaagaacagggcgattgtgcctgacatcagaccagtgaggtcatcagagactatcaccacttaacttgatcagcatagtccctaactacattatgaagctcaaccttatacccacaaagaagactaactctgaccctgcatcaaataatctcccctttgcagcagttggatacaaacaaacacctataactggtcaaaaacactatggaagtcatagagtgccaagcccgaagcaataacacagctcttctacttctgttattaatgtggtctcttcgtcttacgttacaacttgacttctgggtggctggtgagatgacttagagggtacagtccttgatgaataagcatgcagacctgaggttgagtccatagaacccctgtaaatagccagtcttgcacatgggcgtacaggcacatggatcctagggattatatgtagtctagctaaaatgctgcatctgagatgtgttgagagaccttaagtttcagaaagatagaggaattcatgcacagaaccatacacacacacatttgggtaagcatatttgcacatacacttacagacataatatttccccttccaaaacacacatcacagaccacattttcttggagtaggaggatacaaaataagaaatatatatagccataatttatgcagtaggtaagttactttggttgtctttcctccatagcttagctgtaaattctgcaagaaaatgacaaattacttgtttaaaggtaaatgaaagtgaatcccaacatatgtgcgaccatctttatcggaagcaacttgatagctacatttataggaatttggcttatgtacatggatactacatatacaaacagcataaaaaaaacctttcctgtagaattttgctggtaatgtttaaataagcattgcttgttattgagcaatagctatatgcttataatctaaaaatctcaagcttatatatctgtaaaaatgttgtgctctaaaatgaagttttaataccatttataaaagttgtgttttttctataacttgaaactttctctgaggcttcaagtttttttaaagaaaaaaacatacatacattaaaactattcagttcactgtaaataaatagataagcttcacaaagtattctgtgtaatgctgtattttaaaatgtagactcattgaaaagtcataactttaaagttgtgtaaaaattatttatatcacagtttgaaaggatgaaaatttttgctactttacaaagcattatcaggcttcattttctttttgttattgtagttgatattttagaggtttttttcctccatgtactatgagcaatgtctcttttcttgtacattacgcgacactgttgtacataagcaaaaacaatttctttaggtttttagtactaaaaggctcccttaattgatagtagtacctgtaataccccttatgtagctaagtatatttcaaaaggaatctgataaacatatgactgttatatgatagtatttgaaggttgtgttgctctttaatatatacatacacacagagagtgaacgagcaagagagatgttgtatattacatgtatgtgtgattgtgtgtatgtgttcatttgtgcttctgcatagtcatttagcacatccagagtgtgaagcaagagctggccactggtggggaaattcagtgggatgacaggactatggcaagctagaggactccttcacctcaggcttatggtgcatgtgtaatctcctgttactagatccttagagctgcattctgttaactagacccatggcctctaagagcatcatgtatgaagttccataccactgaaatcttgtatgtattaaacaaatgtagtttcatacctggtattgatcttctctgatatttctacttactaagtgctcagataggaattccctcaatcagacaagtcagcgtaagcttacctctaaattcttatcaggaataaaagtgttcaggttatacagacacctgtgtgttcctttgagtgaactgcctagctgtgttgttaaggcatatgcatagatactgcattgcttggatttctctcagtgaaagatactttaccagagatccgtggactactgattgtgtcatttaatttgctaacctgtatttaggcctcctcttctgtcctggaattattcctgattcctttttcccttttttttttttcttctgatgctccagcttaatatttttcttaacaaagacatttaaacatatgtgttcaacttctgtcaaatctgccacactagtggatctcatttgctctgaacctgtgcatatgaggaaataatcattgcatgatgtgaaaaatgtcagtttggatgttctcagcatctttgctatttattgccccaggttcttctcctttagcatgtcttcctttctttccttgattttctgatctttctggtgtatatgacataggactccagaggaactttctacattatagctgatgctatatacaacttcaaaagcagttgactccctgataatggatcttttaaggagagcgattattggggaagcagaaacaagaagaaagcaataccagtaataaactctgtaatacatgactgctcttagatgtttctccccaaatatcactgtttggggattagaaacccttggaaccaatattagtgggtttaatagtgaaatatttagcctgtgtctgtcttaatgtacattgggagttgatagaagtgtttctgcattgcatcagaaataaggttgatggtaatttgacattttgtaggaagtgtgttcctagcattttgatatgctattgaaccttttcattctttgtttctagaaacatccttttaagaaaaatgaaacataattcatagctctgcaaaaaatatcattatggttctcatatgcttgaaacactggaaatgattgccctagaccgaacatatctgttaatgccagttgacgtcttacttagaacaatataaatagctttttatagatataaacaacaatataacaatataaacaacttttttcaagagttgtaaaatttgtggatctattatctaatgttaaatgaaacataaaatataaaactttatataaatggggtttatatatataaacactgacatacatccctaccacacacattcatgcatacatcatacataaaaacagaagaccagagaaagtctagggggaaagatgaataaaaggttgttatcactaaagattttattgatctgtttgctggtgcttttaatagccagactgccaacattaaagtgaattttattatttaagaaaatctcaaatagaattgttttctagtctttcaatggtctttaaggagaaatcgtgtgttaagctctcccattgctctttttgctgactttttcccctggcatagtagaggaagaaattctcctgtaaagagtatggatctactatgctcctatgataccaggcatcattgggtggtcctttctcttggctttccttttcatccctgctgtggttctttttccagtccttgtagcaaacattggcatagttgttgctgtgtgtggtgcttttgtatttctgtcaagctccaggtaaagtttacctacagagaggaacaaattagagagtatcaagcaaatgaggacggaatttatgcctgagtatattcattcattttaccaattatttattcctttctctgagatgctttgatgtttaattttatctgcaccttgtgctaatgtgctgtaaggatcataaggtagaaagaagaacattggaacagggtcctactcataaatttcacagttagaataatatctcaggatttgaaagtgaaatgttcaacacataagttcttgtacttttaaaaatgtattcctcatctggtagcactgtttggggatgtatttgaatctctgagttatgggtcctggcatgccatggtaggccacagggatggtaatacctactactggttttggcctcagttgtctaccaaatgttcatcacttttggaatcccatcacattctgctgctatgggtgcacatataacatgctttctcctacacaatggatggaatcttccaaaactgtaagccaacactgtcttttctctttatgtagggtcaatgagggattctcgtcactgcaaatacaactgtaactaatacaaattccagcttttgaacatgaaactatatataaacaccccgcttaagtacacttatctgagaaacatggaggaatatgttaatgtttgaaattatttgttgtgtaaaattaagaagcatttttaattagaattttgagaaggagccaagttataagacaggagcatgcttaaagccatttgccaagtcagcatagaatggaagcctgtcctttgcttctgagttgagtgtgctttggctgagggtatctggcatgtatttagaggctaagtggcttggcctgcaagcagaccaacttctgggaatctgagacattaccattggttttctgttccttttttgaatacctgtgagctccctgaggccaagagtgacaggctgcatccctgacatttagaaggtggcagggaatggtaacccaaaaggggaattctaaagtcacataatgtatttctttgctctgtggtagttgtgctctctgaaggaaatatgtggtgatatgattggctttccctgtacctggctattttggtttttttacatatttatgataattttataataagaaaattagggaagaaaaaaacagaatgtctggatttccacttgccactgtcatgacccaaagattttgttttgttgtctttcttggtactggattttagtcatggtgtttgtacaagtttatattcttttgctttcttatgatgttatagcatataggaaataaacattttatagccagtgtagtttgaagtttgggaaagcaaattttgaaaatatagtcaaatgaggaattttttaaaaatattctctttcaaaggatcttaggtaccagaatttatctgtgataaaaggtgtccctcagaaactttaaggtatcaagaatctttcagatttaacaaatcatttatttttataaagagaaaattgaaaccctaaaattaccatgagtgcatttgtcaggctctgtattttcttagattgttccaagttaaaagtgtgtccagagacattatgtctggatttgctattgttcattattttaaaaagggatagaaaggagatgagccaattcttcatttcacctccttttctttggagaaattaaaaattgacttcaattgttcatgtccccattggtttaaactacctctcaccttgcgattgatctgttgataagggccaaatccccactccctttttctccaccacactttgttacttgggtcatggtcaacagtatggcagcataccctgctaaccatctttggattcctggataacagtgggcatcagtcatatgaagaccatgaatcatcttaattcttcaagttctgtagtatttactacagcacagagtctaaattgtcaaataggcttcatcagagaagtttcagaaaaaagaggtaaaatagccaagggggtttggaggacctttccagcaaggactggttttctgatctgttttgttgatgttgttgttgtttaagaataatgtttgtatattaccaatcatgtggtcgagtcctgtttgcctctgagattatgatgaaggcagactgattattcacacactatatacaggtagagactactactgcttgcacttttcatcaatttcttttacttcagtgattgacaggcataaaaggcccttccttccagatccttctgccctccctctcccttttcaagtcacgttacgacagacagtatctcatctacatggtcactccagggtttccacatggtcactgcaggattgcctgggcctttgctggacctgcttatttatactttactgttgtttcttctggtagacatgggaaagtgacttctttccaggatggcagatgtgcctggcgcactcttgctgaaatcatgtgtgctgtggttgagagaaaaattacggtttttccgtgattgttgaagcacagaaccatctaagtgattgtacagagtgagtgtgtgagcagttttgccacacttgctcacagtgggctttcctggcttgttttatgaggatgaaggggtgtggacaggcttgctgaatagagctcctcagtgtccctaatagtcgctctttatgaaaccattttcctcttcctcctactctgtgtcaggagtcctccttccatgggcactgtgccccctcagtctggcctttttatccatctagagcaaagggacaagacacttgtttcttagaacaaacaggttaacagaaaaacaaaacagaacaaaacaaaacaaaaacaacttactttgctattgaatatataatggagttgatagatttgatagattcaaatcatattaatacagtgatcatttttaaattagtgggtttttttttctctgtgagaaaaaaaactgaacaaatatcttgtgactctactatgagtataacatactcttttatagtttcaacaagggtctgaatatatagtgtcagtgtctgaaaattaccccctattcctcttttgctttgattttggcacccaaattcctttggaaatatgggagggggtgaggtgggtctgtttatttcctcagagcatgactactcgttcacttgcatggacatagcaactcaccctgtgcctctgattcttgataggcttccacattgctgcctgttatctgagcccagatgtctgcttttgatggaagcatatacagaacttgttgccttctttcaattgttagatggtctggtcatttaaagtgatggtagggcctttgctcttctgattctggagatgtgaggttcactatctttccatgagtcagttttgcaaaaccttattttcttaaagatccttggtagagatgtgtgaccttgaccttctgtttgcctctaatgtgtcatgctcctgtgaagaagagcatgtggtttagtcatgcacagataaattacctttatctcctccttcaggaaaacctctctctaataaactgtttccagtgaccctttcaaactctgccttcagtggctctcatggctgacctctaatacaataaaacatgcacttccagaaaaccctggagggcttgggttttccagccagaagaaaccacactgtttcatcatcttttctttgagtacactaaaatgctcagttctcttattatagaagattaagcagcatgctactgttggtttaaaaaaaattcagattgccaaattacttaccatatagagcaagaaatgcagaattcgcacagaattcatatactcagattctttaaaaattaaactgagtcacagcagtgttcattatacctaatatccttagatcaatgtctacgttgttggcctagcaaatgaggtataaggtagagaagaatttgatatagttaactaccagcagtagtttatttgattggtttctcatggaatttgtcattgatacattattgaaatgacattgaatctctaaacaggattttatagacatctgttcctaaggtcataagacagaatgctaagcttaaaggaccaagtgttgatcccctgaagtcagggagaaagtgccttttaagtaataatggcaaaagtcttggacgagggatgccctaaaggattatcctctgtgacatgagtgtattagcagagggtaccttgaccagtcatgagaaataaggattggcttccctgaagcctcattttgttccaaacctaaatgatgactaagtattctttacaggacaacattgtaggacgctgagtcccttgtcacaccagaggtaatacagcaagagcatctgtgcagatcttccagggaaagataggggtttttgcaattttctgcattcagtatatagttttgtaatatagaacaataaaaaaattcagttcctctcaaataatccatatatttggagtcagtgagatgactcctgcagccaagcataagcaacctagtttaatccaaagagcccacacggttgaaggggagtactgatttccacaagctgttctctcctcaccaagtgtaccctgtggcctgtggacacacatgcacacaatgtgggtgtggggtgacagagcaattgctattacaaataagaaatgcagatgtaaacgtgaggttatttatttccgactgttagtcactggtgatagtggaccagacttgcatatccagagattcatattgagaataaggaagagaggcacacaaaaatatcaagtacagagatctgtgtattctatcacattactgctctacaaggtatctttcttcaaacataactggttttcatatttttgtcaatgcacataaactctcctttcttcacatattcctgatccatgtcctgtctcttaagctttacagaattccccattgtctttttgtcatgatttccccagactcctctgcattttttattcacataaacaatgatctatcaatattttccagctctcctggcaaggttgccccctgaaagcatcctgctggtgttttttgctgcagctcatggaaaaatggacctttctgttctcatcctgaattggtttttttatattttcttggcctgattggagaaccatgttaggccatgggggatgaaggcgcaggtgacagaattgcttgctacccagtaggctcttttccgattagacccctagagtcttgcactctcagattgaatagacgctcctgttgatggtgctctgtcttttacatacacatgtgtgctagggacagtcgactgtacagtgtgcatatttattccagtaggatatgtggagacttcccaagttcaaactgttttgcaagttgttcaggataagtaggagccactctttaaaatgttggctctctggactagcaggatgcttgctctacaaatgtgagtatataggtctcacctgtctgtttaattatcagggaggaaaaaacgaacaatttcaagatagtacctgagtgttcccacttgattttatttctgagaaacaacgtgacgtgcatgcactggtgccatccttagtcaggggagctgcctgtcttcacagtattttatacccactcagaagtgttgtgagaattaattaaatggaaaagcttctaagaccaactgctctagagtgccacatcagaccatactgttgctgctatttctgcttcagaagttattaagaatagcccatcactagctggagtatgtgtttgcagagcacagcactgtgaaatgaacaagtgtggatgtgctgaacagaagtaggatatttatgcctgcatctctgacaggaaagctgtagaggtattgaaaggcatatatgtatgtctgatgtgtggtgtatgcgtggggactcggtgtgtgtatatgtgtgtacccgtgcacgtactttgagtattagtcctgtccccatattgggagtgatcttttgaatccagggcaccagttgaaagcacgtgatttgattctgacagaaacttttgcagttgttttaacttatcattaagaaaccagctatgaggttgctttccctgtaattcacagaacactggaaagagaggctgggcttctctcaagtgtgttgcctaaagtaaaacttgaattgattaaaatgtattaaacctttgtttttgctgggtttcttcatttattgtttttatacatggaaattaaaatgttataacggttcactattcatttttgttatgctggtttttacttcagctttatattaagcatagatttgtttatatttacagatgaaaaatatgtgttgcacggatcagatatgcggatagataacattaatattcctgatcaaaaatataataagtaattgtttcaggatttaggtatataaaatatgctatgctacctccttcagtattatacttgtttagggatagatctttcagtgcttatacgatatatcaatggtgttgtatctatagacagatgggtccattgtttcttagcttaatcttaaaatatgaaattattcccatgcttttatattttttattcactgatatattgattgattgatttatagtatagaacataaaatttactacctcaacagagttcacttcatgtataatatttagtgtaaaactccatttttggtttctccttgtttacaacaaccaagactcttgatggaaactttaagtcagaaagggaatgttggctctccagtttgcaggctagcagtcagcttgtatgatccagcagctggggcaggcatgagcttgtcagctctctacagttcaaggcttctgctgtttcctagaccctggcagggagtaccattgtcctcctgttccacttatgtacttacttctcagaggagaagaatggtttctggaactaaaaaagtcatagtctacaaaggccttttgaggcattggtggtggtggtggtggtggttttggtggtatgtgtgtttattttaatttagtcgcatttttcatcaaaaggttgtatggcttgctgttagttggtttgggttttgattgttttgtttaatcttaagacaaaggtctctttctgtaggccagacttgaccttacctcataattctttgcttgagttcactgggtttgggaatcacaggcaggcatccatcaccaatcctggctcagaagagtcttgaagacatcacactccagttgtagacaatctgggcttagctaaccccagcatgcagaatgtacatagccatagctcctgcctcggtggtaactgtcagagctgtgtatgaagtgcatttgacagatgttcacatgaagttagtgttgtataaatgcttgttataatacattgattaatttccagtgagtactttaatttctgtttactgccacacaggggaaacatggatagccacaaatggaaaacatcatgtttgtcaaatagtgtgcgacacttatcgtgaaatgtggttgaaagggcaatacaccttgtccccattgttaaacagtcaactatcagtctgtacatattttcctgtttcttgactatgtggaaatatcatcgtgtaacttcaaccgtgttgtatagatggctgatcccacagtttatttgccacggaacagttagatttgggcattttcaatgtcgttgcattccttgattgatatataatttggggagttgagctttctgctgctggttagatgtggatctttaatactttttaccaaatttccattctaaacaggatcattttggattcatgtataaacctcatgacagtcttcatatcctcttgaataaggatggatttaccagtatcactacctcccttgtcttacagtagcaatatcaattaggagtgcctgacatggagctaaattacaataaatgcctccttaattagaaaaaggagttctatttgcttgactatacatgcaatatattattttaatgtgttagttattggttactctttaatttttgtttctttattgttttgttttattttgttttaggcagggtttctccatgtagctctggctatctgggaactcgctgtctaggccagggtggctttgaactcagagttcctcctctctctgcctccatagtactgggattagaaatgtgttctaccacctaccagccttttttatatataaacatgtttttagtatgagccccaaactggcctgaaaatcactctggctcttgggttgcctctgaatttgttgtaatcctgctgcttcgactttttacctccataccccaatgaatgcatttaaaattaccctttgaactgtttccccagaacacatgaattgagaacttacatttaaaaaaccattattaaaaggaaaataaatagctcagtttgcgggcatatgccctgtgatcctagcactcagaagtctgacataagttcaaggccagcctcagctatttggtgagactcccatctaaaacaaacaaacagcacagcaaatgcttctcagaaagagaaccatgttataatttgtgtcttagaggcattagagactgagggcgccactggaattaagcatgtatccagtgtgtccatgcatttgttgtctgttctgtgaggaaaaatacaggtctgatgttgcagttttcttaaggggacaacaattcattcactgatcaatgtctttctaaatttctgctgtggactatgatattgtaaactatttagggtgtcttgttgagtaaaagtgactggcccccttcccttgagaaagcaaacacgtatacaaatgataataaagaacaggagagtttggagctgagacgaaaggatggaccatctagcgactgccatacccggggatccatcccataatcagcctccaaacgtgacaccattgcatttgacagcaagattttgctgaaaggaccctgatatagctgtctcttgtgaggctatgctggggcctggcaaacacagaagtggatgctcacagtcagctattggatggaacacagggcccccaatggaggagctagagaaagcacccaaggagctaaaggggtctgcaaccttataggtggaagaacaatgtgaactaaccagtacccctggagctcctgtctctagctgcatatgtagcagaagatggcctagtcagccatcattgggaagagaggccccttggtcttacaaattttatatgcctcagtatgggggaatgccagggccaagaagtgggagtgggtaggtagggtcttagaggacttttgggatagcatttgaaatgtaaatgaagaaaatacctaattaaaaaaataataataaaaaagagcaaaaaataaagaaagaacagaagaaatgagatatactcagagagagagagagagttcaggtcaagttattttgaacttaagaactagacagttaatctgagagaggattcgggccaacgtttctttaagaacctgatacttgtttaaccaaaatcaatgtctgaaatgtgagagaacttggtaccttggatatggatgagagcttgtatgtggcatgtcggtcagacaagaaatgaagtggcataggacattatccttactaacttcgtgaagacttttaaatgacaaagtaatgagactgtatacgtgtgagggagaaatccctccagctacagggaatgattttctaggggtggaccaaacgtctgagggagctggagaagagcaagagctttcttagtagatattgcgaaatgtggacatatctgacgtaggacactccctgagtcgtagccacattcagtgtttaaacagtaacaagggaacgtctcaccagatcaacatctgttatggaaagctttttgttttctataacatacggaaaatatgttttcctaaaaaacatataaggcattcaagtcaatagatgaaaagagtaaattgaacatgcaagtctagggttcagaatacagataaactctggagagagaaactgttaagaacttttgtgatattgatcatgtttcgagctgtagctatggacctaaagagagaaggtgcagaaaagagattatgtagcagattaagggctcatgggcagcatggtgattattttcattgttactaatttatgttaagattagataattatttgtaatgacatgaaattctgtttaatccagatatgtagatttctgtacccttagactgaataagtgataaagatgaaaacattctcaggggtagtagattaatgtctcattttcagtggttctcagctggaatggatgtacctagtgaccagggggagattggaaagtgatagtcacctattggtcatcttatttgtttgtttgtttgtttgtttgtttgtttgtttattatgaggcagggtttctctgtatagtcctgggtgtcctggaacttactctgtagaccaggctggccttgaacttaaaatctgcctgcctctgcctcccatgtgctgggattaaaggcgtgtgctaccactgcctggcttgtcatcatccttattatggggcactatcaacattgaatgagccagaagtcaacatgtctattgtaagccttaagggcacaggtagtgctccttgagaagatgtcactagctgttggccacagctcttcctctgggccactgacaggatgatgcctgggtctctctgtgttctctcctccccaactctcccttctctgtgttaaataactatgtctactcaccagtccaatccactttaaagtagaagatagttctctctgttcaggttgcaaatctcttttctgagtctggtggctcaccttccttagcctctatgtgaagcctttatggatgagttcttcaacaatacttgctcgagcatgtcccttttattgttctttggtcctgctttggggaatcctaatttaaggccatcttccccaacttatcatttgtctcaaatatattttcctgggaaacttgtaattctaaaataacaagacttaattttaacttcctaatttcattgtctgttaagttacaagattctattgaatttggaatttttgtttaattttatactgtcattttaggaggcaaacttgttatttatttttttaaaccaagcatcttggatgttgctatataggtgaagaatctctttcctttcaggctgaaggtagccatcataatttccaatagaagtgtgtgtgtgtgtgtgtgtgtgtgtgtgtgtgtgtgtgtgtgtgtgtgttttaattattaaaacacatactatacatattcatagatatatgcccagttaaataagaccttgatattatgtaacagaccacattgaaaagtaaatcaaacctagaaaaatcaattgtaacattagacaatgtaacatgtacagaggtgaaactgattgcagaagggatcagctctgctttctttgatgattcatccacaaaaaaacatagaactcacactttgaatgtctcacagactcaactatgaatgtatatagtgcctgagtaactagcctaatagaaagcactttccctatgatagctgtgaagccatgccccaggaccaatgtttaaaaccacaccatttgaaaagtgataccaacaataattgcatttagaaagtgaattagtgtagccctcacttcttagaaataattttcctcttaataagcacagatacacatacacgcacaagcacatccttgaatgatagttgttacagggctccaactccagaggcattatatccatattggaaataccattagatctctcctatatgcaaaaccccagtttcaatttttatgcacatttgcatgtatgtaggtgtaactgagggtattggtaatgtaggtaatgtagggtttcaggaaaggagttgagagggtaatagactgtgcttgacatcacagtggaaaggactcaggagttgaaggatacaaatgggaagggggagaagtgggaaaggaacaccatccaatgctgagcgtgtatggaaatgccaaatggaatccattactttgctaagcacttaaaaagaaaaccattcctaggcaagctctcccactcttcccttatttctgctgtgtgttctgttgcgtgtacactggcacgtgtttgtatatttttataagtgttgttaaaactagtatattttggtgtatacgattttcttccaaagttttacatattttatctgattggacatgaaaggaaaaagagcaggcatcattattttaaagtgtatatatttatgttcttcctagttaaggaaaactgtgccaatgcttatctggtccacatattcagttaattgaggagtcatgttgctgaatattttctgtttattggattatttgatagttccaagaatatatttttgacatttcattttattttttgattttgttggaattcttgaatttttgtcatgatttaacattttcattttgaaaatcgagcacatttaaatatcacacttatctatacatacatgtatgtgtgattttctgggagtcaaatctttttatgtgctacttttctgctgttcgttttcaagcctcttcagtgtatattaatgaagctctgttgtgctacatgggaggaaggtagatccctttaccctcggacacaagggagaatcaaggcaaataagacaagacaagggttcatctcttaatgctatctattaggagcagggcatcaccttcccttttgcttgtgtctggaaagcttcatgtttttctttctattgtgacaaaactttcactgtataacacattattgatgatagtgagcgaactgttaaacagtgagccttcacagcttatcttgcttgactgcaagcaaatcaactgaccgggaactccctatttaatattcccatttgtgctggttagttttatgtcagaaactaacataactaaaatgaagtgaaaggagggagtctcagttgacgaaaaatgcctccgtaagactatgttggaagcagacctgtagggcatcttctcaattagtgattgatggctggaggggatagcccgttgctagtattgccatccctgggctggtagtcctgggttctattaaaaagcagtctgagcaagacatgtggagcacgcacgtaaggagcatccttccatggcctctgtatcagctcctaccttgcttgagttcttgttctgactccccacgtgatggacagagtgatgtgggggtataaaccaaacaatcctcttcctccccagtttacttgggtcctagtatttcctgcaaataacagaagccctgtcctatccgctcttggccactataatcccaattcttgattttgtgagtcttaactaatttcattcaccatttcatgtaaaatatgatacttatattatatttatattgttgtaactaggttggttttttatgaactaatgtcttcagggttcattcatgttgctatatgatgtagatttccttttagaggaacaaattatattgcattgtaagcacattttctttatctgtcaccatcgatggacatctaagttctttcttgttgtaaatgtggtacagtgaagaagggaactctaatctctctttgaaatccgcagttcagtaatactggatgctaggttgtatgttctcttttaccgtattcaagaactttcccactgttcgcctttgactctgtagctttgccttcccaacaacagtgtgagacactttgctgtttttggcagtgctggtcttccaggtctccttgcttaatatcaatgattcccacaaggatacgattcctcatttggattttgtgtccatttctctattataggtgatgaggaccaatgttcttaatgttttatcttttgtatatcttctttagaaagtattattattgtcattttaaaaacctaaacttattttaaaagtatctttgttttatgtttattcttatgggcagttttctgcatatttgtgtgtgtacaagtataccctgtgtgttcctggtgtccatggatgccagtagtgggtatcagataccctggaactagagttataggtaattgggagcagcctttagcatcctaggaactaaacccgagtcctctgaatgagaaataagtgctctaaccacatagccatatctgtaggcctttttttttttgtctctgtttacttctttgttgtaaggctttcttagatctttgaggattagcccattactggacatgtgatcatctgtttctattcagtgcttgccttaacagctattcattatgatgtcataatgctcttgctgtggagagcgtttcaaaatgatgtcattgatcttgctgtgcagagcttttcaatatgaaatcattgctcttgttgtatagagcatttcagtatgatatcattgctatttccttacctctatctttttgttgttgctacattgttttgattactaaaatttacaacatatttttaaattagcaatgtaacttccctgtgttctttcttttcatgaccagtttagccaaccactgtttgtgatcttttctgtttccatttgagtctgaaatagataagtgttctatttctgcattttgataggtgtcactctagatatgaaggctgttttgaatgttctaggctcttctagtccacagacacattctccgtttacttttatttatttatgtaactcctttcatcactgtctttgttttccgtctttaggtagtttatgccttgattaagcttactcctgctgtaacagtcttgtggatgctagtacaagtgaatttgttcccttacctttttaaattcagtcgtttaccggtacggcgcagagcaactgacttttgggttagtgaacttcgtaagggaaggatcttcccttatttgtattttacaccttaatacacaagcaataattaaccatactccctatctactcattttattttcttttatttctgatcatctttgtcattttctcttctattttagggctctgctagttcaatagcctctcctccagtttctactcctgtcacaggacataagagaatggtcattccacagcagccacccctgacagcaaccaagaagtccgcaacaaaaccacagcctgcaccccaggctgcacccatcccagtgactccaattggaacactcaaaccccagcctcagccagttccagcctcctatactacggcatccacatcttcaaggcccacctttaatgtgcaagtgaagtcagctcagcccagcccacattacatggctggtccatcctctggacaaatatatggtccagggcctcgtggctataacaaccagccagttcctgtatcgggacagtgtcctcctcctccaacctgtgttggtaccgactatgcatatattccaccatctggacatccgcctgagtctggatatgggtatacctccaaccaaggacgctattatgaaccttactatgcagcaggtcctagctatgggggccgaagtgaaggtgatactgcttatgggcaacaggttcaacctaatacctggaagcgggaagctgcgtatgcccctcctgcaagcgggaatcagaaccatcctggcatgtatccagtcagtggccccaagaagacctatatcacagaccctgtttcagcgccctgtgcaccaccactgcagccaaaggtaagaaatctactaacataacaatagggaaaaggaaatgacttttctttagagagcagtcctatttgcacaggaccagtaccactactcttcagcatccagtgcagccaattgctcagtaaggaaggattttctttccaaaagctgaaaaaacactttctagaaagtctgatctaagggcggaatcaaaaataacatatcttctccccattatattttgttctttatagcaaacctttctgtgtagtgcagaaatgtcttcatatatgctgcacttgcatggaacctggatatgtttgcagtagctcaagttatgtcaggtacaagaaattccatgatctgtacaagagaggtgtctaaggccatcatatgagctattaaacattcaaagcccgtgttaaggtggtaagaattcaagcaacattggtaccacagtggctgctatggtcaaacaagtagccaaggcctccaggtacagatgtggtccagtggatctaagaggtaggctacttccctttgggaagaagcagagaccttgggacttgttcattggcccttgtttttcagatcacaaattctcgtagaagggtcttacccttcagtctttaaccctattaagaatgtttagcaatcttttgtgaatggaagttctcggtgtatatagactccttttcattgagtatgccatgactatttctgactgcataagttatactatactctgtactcatcacaactcaggttttccctactcctgagacaacacatgaattccctcagcatgaaatgaaaaaacaaacaagaatgactgtacaaagggttaaatgaggaaactgggagccttcaggccctgggttagaaccaaattcccttttccatttagtaagagctgtgaagatgccagagttcaggaacctttgtttgccctgaagcagaatggtaatttgaagtggtggattgagtagaagattagacctttctcaatcatttccaaattttgatcagattgccagttttataacagattgttctcatactcaactttggaacaacaaccaaaaaaataaagtcctttctgatatgtgctggcactggctcattggtcttagatgaaagtcactcttatatcattgtgctccaagcaattgtcatattccttaaggtctaaactttctaagtggtgcctgtgataggctagaggaatccacaaacctcagctatggcacttatatcaaagggggctaaccttgatcagttttgaatataaggcttacacacacacacacacacacacacacacacacacacacacacacactcaaggtaagtggattttgtaacatgaataaagcctcctaaaaaggaaatttcttcaagggctaagaagatggttctgtgggtaaagtctaaggaacacatctttgaatcttcaaacccactgaaaagctagctgtgcatcttggtcctcctgcagtcctaccaagaaggaagcagagaccaagagagacagcctagacagactagcaacagtataataagttccagtttagctatagagagcacatgttgagaccctgcctttatctatgaggaatgtactgtggtgtatagaaagtctgtgcccatgtaactttgctgtgtagtttaacctttcaaaacaaacacaaaacccagcttttatttggggcacagtatatacgtgcatgtagcatgcatatgtatttgcatgcatgtttccatgcttgaacatggcatgtgaggttgatttctggtgtctttctccataactgtacaccttatgtatagaggcccactagacagctaagagacattactcctagaaagagctaatatcagaatggtttgagagtgctgttctaccattgaggaatcagagaaaacaaaagtgcttctacaagcaaggcatggtttgaccctggatattataaatcccagttgtgcatttgaaactgtcgatagaaaaggctgggcccttgatccactgatgttgatgtgactttacctacctacttatgccatggaaaattttattaactactcaccagaaggtgccaaacttttgtttgcttattatttgaggaagttaattactcatcacttatttaaaaactgaactatttgtttttcaacagaatcacatattttcacatcctatgcaatttgcaaattaaaaatgaaaggccagccatgtacttctcattgtgattatgaagagggtagtttgagtttggtattcagccatgtgtctgtgctgtgggaagggaaagggactgaggagcaccgtggcatcttcagtctgtgctctgggcatctgctgatggagaatgggccctagctcagagcagaatgctgctgactctaacgcacctgtggggagaggcctttgttctcaccattgtgtctgtttggctcaaggatgtgattggaaccatcagaaatgagctcccagtgcctctctgcattcttctttaatatcctttaattggtttgaagaaaaactcgacttctttgtcacactttcagctatggtaaagaagagtgtcattttctaattaattagggaatgcaaagagttggagatttccatagcctgaataattgccgagggagagctattcactatccctgttggttttggtttgttttatttatgaagacactaatggaaaagatgcttttgcatctttaagcggtgacctttctgtacattgaggatttcagaacatttgacatttaaactactcggggggttggggggtgtttgttagtttgtgtgtttctctcctgtgttttagaccaatgattttaatttacctacactgtataccatagaaaagagaaagagaatggaagaagaaatataagagaaagaagagggaagaaagagaaataaagtcataacatggaggccgacaggtcaagattggatttgtatgtcctcacaatgtgctcagcatttagtttgcgtactacagagaccacagtgtacactctgtactaactgagcctagttccttgggaaacagttataagcaagcctttgcacagaaaaaacattcccttctcatcacaagtctgcttgaagatacactaggatctttttctccgtggtaatttatacaagcaaactttaactttgtctgtgggggcggttattttacaggtgtgtttcctgcagcattccgataaggtagcaaggattaatgcatgccaaggtcttgaaaaatgaatgccagggtcttgaagacattgtgattcttaagcatattctgataaagtgactttggcacccacttcctggtcatacctcagccctcatgtagggacagatatttgccacagtgtgtgaagacacggtgtgtgtaccctagaaacgttgtgggattcattctcctagtgtaacacatatgttaaattctaaaatcagtaatctattcaagtgactttgagatgccctccaggatgatgcagccttaaagaatgtcaaaccatccctcagctcatcttacacagagggtatagctaccagagcgcaatagactattgctttttcatttagattcagggcttgtaagatactaagtagctcagaaaggaaaagaaaaagtatggaaagaattcccagacctacaatttctataaagcataaggaaatatttcaaaatggcatagtagcattccatatatcccagtggaaacaatatgtgtacatttcttcaacttcttacagtggcatgcatgaagtgtactgcaaggaattgctggtatgctaaagagaggcatccctattgaaatccttgtgttagttgcctttccttcctaagagcaggggaacagtaaggtagcattgagagcaggcaggataggctgctaccatcagatagtgcatggtggtgagaatggagacaataacttgaggccagtgagagtcacatcagtgactcatctttgggcaccggccagtttatagtacaccttgtgactcttaggaatccatgagtattagttgaacacaggcctaagcttccctttgcctcgttcataaatcacttgccttgtatcatactgtaaactcctggaaagccgtatcaaatattctgaagattctctctgttctctgggcctgaatcttggcatctttgagtgtctgcatggcatgcgctgcatatccgtgctgtttcagatggacattccatggcctaggctatgtgcagacagcagctcacacatctatgagtgaggtcagcagctggacaggaagaggggaagtaccccttaaatcccaataaccagccttcctcttctctagcatacaggaccctaaaaaatgacacaatggccatacttcaggtttgaaagatggacttaattatatgtttagcaagcaaaagttaaaaggagagaagatgggaaaccaagtgaacaaattatcaaattaggggttcaaaatatctgacaaaaattccctggggaaacccctttaagacagccagctggagttcccagtagagagcccaggacacagctgagtgtcacagcagaaaaagaacaaatgacagtagggagagaagatcatcaaacactggcttccacacacccagcaggaatatcgcaagctaaggcaggaggctggagtaccgggggagccaggtgaagagcagtgtcccctttgattgcattcccagtccctgggccccacagagactttcttttgtagatccccttatggaaatgcttttccttctaacttttctccagaacactgacatcatgagctagttctcccatctccactactgcccccctggtcacagaggaggggcctcaggccatggcacacaaggggcctgggaatacttggccacaagcatgcttaggtctgaaactgagggcaacactggttcatttgtcactgttcttttctttgtattctcagctgcacccctaaagttgtgtttgtgtgtgtgtgtgtgtgtgtgtgtgtgtctgtctgtctgtctgtgtgttctgagacctgagttcatctcagttgtagagctctttccccatgtgttttccagctctggtggggacggggggactgggggggggtgggtaagtgttaaagggtttccctaggtatattgttgccactcttaccagggatgagggagaggagcctctgacttccgctgtggtgtcttcagtcttccggttttagccattcttatgttacttagtcctgtctcattgtggtttaaatttacatttttcttttgattactcatgtgtttaacacatgtgctggcctttcatatttatttgtcttaagcatcatcaaatattttccaattttaattgtaatatcatgtgaataaaaaagaataaatattagctcttgaagaaagagtaaatctaggtgatgacataggagtcatgaagctattgtttctatcgttttaaccttgtcacttgttcttatagttttgttgttttctttgtttgcatgttcgtagtatgatttgtaatgaaagtgtaaatatgggtctcccttctcgctgggggagctggccactggcttttgaggacaaagggagcagagatggggagcagggttcagacggccgtgaataggaccgatggacttccagagccctgtgcagtaagacagttctactgtattgttctaggaataaaatagaccagggcataggggtacaatgcaagtcgggataatatagcacctaattgtcatggagacaggaagccagagtcgccctgtgtgctgaatgatgctcctcagcacaaggccattcttcagataaggccaggcagctgtgttcaggaacgccgtgtagacaaagtcgggcagagaaagggaaaccccgctgaggcagggagccctcctttctccaccaagctcagagagtcatcttgtcattaatagcagggttcttcaacctttaaactccagtgggaagctctacaactacagacatgactgttctaactgatgctcttaaaagaactataggtccttcaccattccaaggcagcccacaccgacccacaatattaagtgttactatcaaacgccctgtgctagtaccttaagaatggtttatgaacattatttttcatctaaacgttttatgtattgcaatgttttcaaaaaactaaatgacatcagattttgtgtattgacataaaaacacatttcaaattattaattttatccacttatttcgttttaattctatgtcaaaacaaagcccttccttactgacatgcatctttggaattttgtttccttcttggccaaggtgtgtcttaatactgctcagtttcagaggcgagtcgagacgctatagttttcttcttagaaaacagaaatgtgggctggcgagatggctcagtaggtaagagcacccgacggctcttccgaaggtccggagttcaaatcccagcaaccacatggtggctcacaaccatctgtaacaagatctgacgccctcttctggagtgtctgaagacagctacagtgtacttacatataataaataaataaatcttaaaaaaaaaaaaaaaaagaaaacagaaatgtgccctttattgatcagtggagaacatataaactaaataacttaagtaaaaactattaggatttttctcacagtaagagaactttttggtgagtgagacagacaaagacagtgtcaataagacaaggtctcaccaggctggccttgaacttgcagaggttcttttgcctcagggttccaaatgctaggatttatagggggacctgctgtgcccggttaagacagctggctttagctcctgtaattccaaagtgccattgttccaagaaggaagacttactggttattttggatcattgatttttctaaaagatggaaaatccaacttttataaatactcttagcaaataatatggtgtttgctctatttcctacttggaatttaaggaatgttctttagaaaatatggtactttttcttttttttgaattaattaatttttttgatggcgagtatttaaaatttaactgtataaaattacatgtaacttttaaaaagcatcctgtatagagtgtattaagcatgtttgtgtgcagtgagcatttacagcatgctcagcatgaacttttctagtgtcttgctaaccctaaacacagaagagatgctaagtcactccctgaggcctgcccaggcttctttcctcttgaagcttgcctacattcctgggtgtctttgtttatgtaattagctcattgtacagttgtccaaacataaagtattctgtagacccagtgctttagacacttatatttagagtgagatttttgggacctaacacaatattctgtcaagatgtaaggagctgaaactgtaccctatatataaaatgaagctaacaggtcctagttttattgagttttataaatgcttgactctatctcttgtcttgtgtctatgggctatggaggagtcaaagtgtaaagtgtgtgttggaatctttgtattcttcctttattactcttcatggtccatacatgtattctttaacatcagattgaatagaattacctttggtaatgtcttaatgttccatccttaaaatatcaaagatcatcagcttactgagaaaaccctgatttttgacacaggattttgaaggtttactttggcttgttaagcatcttagcagagagatgcttccaaaacaaaacttgatcacttcaggaccaggacttgaacgagaaggaaaaaaaaaaaaagacttgggtttgacaatgcccttcagagatatgtctctgaactgaaagactttccaataggccccagcctttaaaagttccctcacccctgaatagcatcaaactaagttccaaacctataataagcagcctttaaagagcttacgtttagtaaatgtagttagtaactaatctgtcacctttagtgcttataccgattattgacactgaaccatagattgtcttatataactgtatcattagcctgttatattcaaataccaaccagttattttgtatataaatagttctttactttctaattactgaataatatctcacaggtttgctaaatcatatttaccctttaacgagttgatagcattggaagtttgcaactttctgtgtgtatttctggggcaggtctttccagctgtctggtactcatacccagcagtagaattaccttacggcctcctggagtggtttccagtggcccaacgtgtccacacaagaagtatacagagctggagagaacactcagccattaaaggctaggctcacaaccaaaaatataagaaatatacaagggccatgcttctctacactggtcaaactccatttgattttgaaaattctttactgttttagttaattcactgctttttggtgaggtcttgctatgcaactcaggtagacctcaaacttgtggtcctcctgcctctgcctcccaagcactgggcttatcgctttgatctaaatcctgttgtggggttttgtgttcaggtaaaaatgcctgttcttccagagcagggagggtatgcatgccctcttaactctgctacaatcagagcctagcatgagtcaggcactcctgaccaatcaataaggcaatcataaatgaaatggtatctattgattgtcatggattcgcgagttgctcacatggctttgtaatatacatttttaatgaatgtcctgtgttttaattgtagttctattctaggtctggttttctcctcagatcctacattgtatcctaacagattaatcttgagctggacagtctgctttagtcactgaagtgaattgcccagctctgaattattgcagtttttctgcctttagccctggttcacttgagatgttttcctcctgggctgacatgatgaaacttaattcatacttaagggtcagtatggaaatattacttcccatacttcccccagtcaagcctgcccctcctacacacagttctcaagtcttcaacacggttggcttttctcttctaaaagctcagatctgaaacctgaagccagttttcactattctttttctcattgtgtgtatatatttattccttaaaacaatagatgaaatgggcaactgctatgtactctaatgcctgtaggctgccatgccctatcacttcacctgaatcataattgattcttactccttttttacttctgtacttgtctgtttttatcccatctttccacagagtgatgttattggagccctgctagcttattgctatcttagcttcctagtgacagttagcttccctctaacagtatcccaggagtaaatataaataagcagaactgtgcttgtaagtctctgtccacttacaactctcaagatggcactctagtctgcagcagtcactttatgttcagccatgcactgaaatccaggccgtggctttgcctccgtcttcttagaaccgcatccccatttatccacatggctccttgttctgcttcatgtaggacatcactcatatggtacttagtatcatcaccccatcaataatatcccccaaagactctatccacttttactttttccttttcccctataatatttatcactgctgaatactgtttattcatgtatatatgtatgtgtatatgtgcatttgtgatgtttatatataatttatgcatatatacagtgtcatgtatatataatttctgtgtatatatacaaatgtgtgtacatgtttgtatatgtgcttgtgtatatgctggccagaggtcaaccttgggtagtggtcttcaggagatatcatattgcttttgtgtgacagtctttcgatgggtcctacggcttgcatattttgctagaatggacagctagcaagcccgcagggattctcctttcctgtcctaggcttcaccagctctcacatgccatgcttgtccaagtgtgctgagtatctaactactgtgcccaggtatgtgcagcaacgcttcactgaccgaaccatctccctggtccctgttcagtatttcaatcatttattctttgttcttttcctcagaaatgtgtcatgagagcatgatttttttggtgtttaactgctacctaggaaattgtgacttaaatatagcaagttctcaataaaaaatgtgtttctaacaaaaggataagcaagtcttgatttcaaaatcactattcctgaaagtgatttatacagacatctggcacatgtcctaacagtgtcttctgataagtgggaaaggcccgaagccctgatgtcaccttacctgatgcccacttcctagaggcgttgcctgcgttttcatgccttgtccttcactgcgagttcttgccgtaactccatgtgctgtctgcttggccttgaatttccaagacagaaacaagttgtgccctccagtttggtgacaaaatgtagaggtgctgtttattataaaatgttcttcaacgtgacaaattgttctcagactttgctgggcttaggctaaaaatagggcctgggatttttaaatgatagacaatcttgttgactgtctcgaagctctgtggattaatagctgccaatattgattgtttttgtcagacccattgctaagagcttatatggattgactcttgctatctcattaacatgctcactagatatgattttccttctcctgaatacaagactgacagagatcaagtactttacccgattgtgttttatgagctctcataaatataaacagagatgagcattaaaacaaaggtgccgatttgatcatgtgtcaagaggcacattgcaagatcgtgcctggaaaaaaatgaacatctaactgtgggttttttttttgtgtgtgtgtgtgtgtgccaggattacacaggaaatgatgaaatttctctttcagctcatattctagtcttaatattaattttattatagagagacagtaagacaatgataagcagttatccctgctctgattcatgataaactgtctagttatcctgactctcctttgcccttgaccctttgccttcttcaagtcagacagactcctggactgaatttgccttggtgatacttttcatggctgtggtgtcaggagttaaggattaaagtgacccactgagggagagtctttgaagaaatgacatttggaccaatgctgaaaggatagggtgtattagttctatgttgggaatgaaaactgtcacaggcaaaagaaacaagggtgacttcaggtcccctgggcttggcgtttacagggacagaaggagggaggtgaagctttgccattagaggagaatagagtaaaatggcggggccatgccccacccccaaccccagcactctgcacagttttcttgaggggacagtttaactgggaagggcccttagcatgcacgcagcagtgtgctcagtgagctcagactggaggttaggtggggtgaaaggaagaaaaagaaccaagttagcacaggcattttctctgcctaacttctcctcagcatggtggactgaagctatgaaactatgagctgaggaagtccttcccactcaggttgcgtttgccagatattttttgatgcatttatttaaaaaaaaaaaaagaatcccctttgtatggatttggcaagctctcaggattcgagcatctgctcacttgttccccttcctgattcatgaatggctcctcaccctagaatccccacttttgaaggaactaggtcttttctaccagagtcagatatgattgagtgtagatcatgctaagcaagaaacctgagtaccgaggggagtacctctcagggacagtgctgaagagcccccggatgtgctagggcgtttccatgggatgctctcttctactgtgggcctttggtcgctctgcaagtgtgtgtggattctacttagaccttgaatttttactttgtagcatattgagactcagggaaattagaccaaagactttacccttccttacctattacatttttactgaaaaaaaaaaagaatgaaagaaagaaaagaagaagaagaagaagcggaaactgctcactaatgtgcagtgattctgaaatcagtccacttttgacttcaggaaaccctcgtgcattaagctactgagggtccaacttaatatgacgatgatgaatgatggccaggcaggcttattagttctttgtctaacagaggacatcaggaaatccatttttcttgctcagtggttttcagccttcctaatgctgtgatccttcaatacagctccccatgttgtggtggccccaaccataaaattatttctgttgctgctttgtaactgtaatttgtctactgttatgaattgtaatgtagatatctgatatgtgattcccctccctatgaaaagggtcaccacccaaagtttgagaaccactggtctagtctgcctttaccaggcagttaagatttgtgtgttgcgtaagattggtgggttgtgggacagaggaaacagaatggcagagagaagaaagttggtggtcacctggaagcccagggcggagtactgctgagctgcagcctgtgtcctgaatcacagcatcgccaagtgagcagcaacaacttgtgacaaagccccaaatgaccacaaacacttatttttttccaaaagtataaccctgctttgtgcctttacattaatctttttgtatatttaaagaataaattataaacagatgagaaaaatgaaatgttaaaatgtggtgtgatagccagcccatttatatttgaaatttagagtcagttgagcaaaatgaatgttgcatttactaatcacatttcctattgatacaaaacaaatctgccttgaaagagaattaaataaatgattaactacccaaagccaccatttctggaacctttgaatggaacatggagttactttcctataggagaagcacgagtgagggagccttggctagggatggtggaaagtgttgggtgggaaagcgtgtatgtgcgaagctgatcacatgacaaggccgggctgcttacccttctgtggcatctctgagttctctgaaagactgctctctgagtcagacaccagcattctttccctcctcccctcgctctattatcctccctccttctctcatatttccacaaatacttattttcaaaaaaaaatagccaggtatggtattgtataagtgtaatcccattactcaggaggcagaagcagacaaatctctgaattctaggccagcttggtctccatcaagagttccaggtcagccagaactacacagtgagaccctatcccagaaagaaaaacagaggtggggggagaggcgccatctttagcaagcggagggagtcgttggtgtctgattctaatcttagcagtaagatttctgactcaagcacagacagaatcagggttgaggttttcctattcaaagatagaaccagggtggaagggataatttaattggtccagtagttgttgaaagtataaggaccaaagttcaattcccagcaccaacataaaagacaggcatggcagtgtaagcctctattcccattgctgtgcaggcagagacaggagtgggcaagccaatgtgtaactgaggcctagctgctgactctgagaggtcaagtctcagaaagtagtgtgatcagtagaggatgacacctgacattgtcctctagtttaaacacacaaatgcatgcacacaagcacattcaagcatgtttagacacatgcacacacatattaagcattcacatatacacacatatgcacacacagcagaattctatatttctcttttgattattaacaaattacatggtcctaaagaattcctggaaattgaaacatagttttctcagggaaattctagaacacaacaattatctcaaatgttatttcagtgataaactcatgacactttagattctcagacaacatgtaagtgttgaccctgtttttctaagaagccatcttgtccattcacaagcaacttgagaccctggagaatgactctccaaggcctcgcagcataggagacattgcagaataactctgaaacctcccaggttgagagagcagctaaatgttcagattggttcatcattttcattgatgaaatagctgcagattttgtgtgatatgagcttgtaccctttatgtctcttcctcttcagtgaagcttgaattgaggtgtcgtatggccaggctactataagaaataccacagcctgctggaccgttacacagcagacattcactttctcacacacctagaggttgacaagcctgagatcaaggtttttcgaatcataacttagtgcctctcaacattttcatacatattgtgactacacctttcctgaccaccttcccacacatcttagcattgcaaatgctttctgtagaaaaaaatcaaagtgacttagtgtttcttctagtaatgttgatttttaaaatgggttagtattgtcattattaaaattttgtaaaatttccttgcagaatatccaagatttattaatgccatataaaatttaagattatccttaaatgggaggaaatttctatcaagtttcttcgacttgtgaggttagaaatttataccattagcagaggtgcagaaacttgtgcattgcactctgtgtggctcacattgaatgaattatgtggtgctgtacttataactactgagcactttctaggttagaaacctgaactctttacatgtcacagacacggtcctccatgtacactctgtgaatatgcatgtaaatttgaccacagttctaatcttattctctccatcttcactctgcctgctgtctccttctgcagcatactccctctgttgggtgttacaaaacacattcttatcacatgacttttgactctatgggtcaatgaacccaatgacagcagaaccaggaatagtcaaaacagtctaggaactcatccctgtgacataagtggcagacacgaactgacatttgcattgtcagcaaaccatattaaagtagcttgttatattcagctaaatatgcctgagccagcaaaatagctcagtgaataaaagtgacttgccaccaagactggcaacctgagttcaattcctgcgacaagatggtggaaggaaaagactgattgccacaaattgttctctgatctccatgtgtgcaatttggcacatttgagtgtgttagccctctctgtgtctatctctctgtctctgtctctctgtctgcctctctctttctctcttacacacatacatatacacataaatgcacatacttagacatatgcaccaaataaaaaatacattgaaagaagaaaacacatctccgtcatgttccctattaaactcacacattcacatgaacatgtgaccaaatgcaatggaaaggccctcatggctatacttctcagcccacactcggtactttataagcaaccatagtgcccccttccccatgtttccattcctttcttgtccatccatgtctgcttaaggggtttgtgcttctctgggaacgcacttcgaagccattccttctctgactactcctccctgctcgctcttattgcttcattacacttcggaggtattttgatttttagtgcacacaatattgcataccccatttgagggctgaggcacatattctggtgttggctacagaggggagggcgtgaataatgacagtctgtgagagaggctgcagatgtcatgctcactcagctgagtggtcagagaagacttctctaggcagttccctttattctgatctaaagggagtctggatgatatcttggagacttggaagaggtgaatgctgccccacactgttgtgccagatgtcacagtacttcttgaggacttactctgcagttgtaccagtttcattctcttgtctaagacaattgcaggacaaatgagaggggacacccgtcacttgtgacacctcattgcctcgattgctatgcccctgctttcaatgcttgagaatatccagtctgatacctgttctgagggctctcttttagttctttaacaacctgaagaaacttctcccaagacttcgtgcctaagcactgagaccatagaaaagaatacttatcagccccctagtaatctcttcccattttctccctccagtgctgaccgtgcctcagaatctgtgctttttcctattccccatttgcctgatctattgactcatccaccccctcagtcagcctgtagcagagctttccctggcacggagggagggcagtctagcagtgtatctcatttgcatgcatcccaggcaagccattggctcagcattacccagtgtgaccggaaccaatagagacatttgaatatttatactttgcataattattcctgctcagaccagtctgtttgtattttaatttttatgaatgagatatatgcaactgccagcttattgaattttgagccagttagggcaggggaggacaggaatgtatagaggctccggtgtctgataatacaaggaccacccaccaatttaaacagaagccattgaggtcaaggcccactctactgttaagtacaatccattgcagtggctctgcaagtgttcccgagttgataatgtcatggtttctacagctgttctcactctagtttgatgagaaaagataagcataggcagtcttatgggtgactgtctcatcaaagtgtagtggtagagaagcaagcctgtaaccctattagcatacccctcctgtgggaatggctatctctacactgagtcattcaaaggagttatgggcaagaccatcccaatccaggtcatctacttaaatggaaaggatgctctccgtttaaacatgagatttcgtatgattttgcttcccacggtaaccttttttctgaacagcttaccccagtgatgtagatgtattaaaaccaaattagattgggtgaggaccagtacgccagcacaaagaatctgccaaccctttgacaggggcaggtatgtagagtgataaaatgtacaagtaaaaggacagaaatgtaagtgaaaaatgtaatgtgcatatcattgctgtatgtttgccgctctgtcttgcagatctatctttggtgggtgcatccttgaagatggtagactgtaacactttttctggttgctttttttattttggtcttgagcattaatttgaaggtttttgactttttttttttttttttttgacactgtttctctgtgtaacagtcctagctgtcctggcatcctggaacccactctgtagatcaggctggcctccaactcaccgaaatctgactgtctctgcctctcaaatatcttgattaaaggtgtacaccaccatgcctggccagcgtttagcctttggatcccatattttgcatggttcctcacacagcttactgactctgtggtggaaatgtcaaataagcttcctagtttgattagtctagaagagaacactacccacttcaaccacgatatagcttcagaggacctacgcaaaggctggatagaagtgctccatataaaatacatggtcatatagtccataataaaaagccagtaccaggaaacacttaatgcttcagattcagctccattttagatttgaatccattttctcaggaattcaagaggccatcctgaaatttttttagtcattcttaacattatcactgaagagataacgcttatgtacagtatgctttttatcccttactttcctgatttcgtccatggacactcatagccacttatatgctggtcgttttccttatgtggtagataaaaagcagaagatgtggagccagccatcaaagatggtgggaaaagaaatatgtggagaaattaacttttggatcatttacataagaactcctaggtgtgggagataggatagactagagcagaggcagtaatattcccttagattctgccacctcgagcagtgcttggtgctccttccacccaacctatgacatacagagcactgagtcagaaatcatctgtgtctgttgttgaaggcatcctagatccaagtgttctctctgcttaggttagagattctgagtgagttgagtccactgacaactggatggagaaagagcaagcatgtgccatctctaagcttgcaggaacagcctcatccctacactctgagctattagggaggcttggtttttcgtgctgtttctagtccattgtacgggcactataggggagtgtggttacagcggtgtcagcactgagctttgcgtttgtctctaatcccctttcattggaattgtagactataactctcataagacagcttgttctcgagagctcaccaggacgtttggttctactcttcccacaaataatgtgagaacaggctttgccagattattttgacgtgcccagacagggtgttctgaaccatgtagagttatgtgtacaagcacaagggaaatacagataattttgtatgagtatcaaagaggctctgtctctttgcagggtggggtgaggttggaaattgccccagcaaatcagcattctatttaccagatccagaagttctgtgttttgtaacttgttacagtgagaaatgagacgatatcctggggtgtggagaaatgatgtagtcttcacttgaaatgatgaacattcatttcctcatgtctctcaaaagacacaataggttcttagtaagtgttgaagtgaatgctaattcctgacttgagttcagaactaaagagatttcagtggccaggctggtgctggtggggcagagagagaaggcaggtgggggttggtgggaagagaggggacacttgtctaggatacaggaaagctacttcaagtgtggaatggggattgcataggaagttgcctttaagtgaagatcctgtttttgtttaagtggttgtttggatggctggttggttgtttgcttggtttgtttgttgggtggttgggatggtagatttgttgtgttttttaggctcagtatatcttcagagccacttgttataccgaggatctggaagagactcagaaatgaaagctgaatattttatagtgttaggaatagactgttatgctgaaaatcacagacacgcaaagaatttaagtcagacctacctctgggatacaggtatgccccttctaacttaagtcgttggcataggatgaccagccaatgcatgttgccattggctttccatgtatttcttatatgctattctattttcttctgacatgtattagtcaaaataacagaaccctgccaaggcaggagaagaaactctgacctcaaggaaagaacagaattgttttctataccataataaagactaataacagatttttagaatcacacttcccacacataaatttctgggatttgtgttattcctgagcaagtaagctatattgtggtgttcttgaagtatttgcccatactgttaacattatatatacataggcttctgctcattacagtttattctaaatgagtaatctggtgtgagttttccacaactcaaggatctccagagatgagggcatgtttgtggtgggtttgtcccagcaggtgacatctaaggaagtaattaagggccacattgctgatttgcagcacacagagctatgcctttcccttagatgagaatcagtgtggggataaaggaagactctcacagtgcagtcggtgtgacctgtttttaaataaacatcgtcatattccacagtcaattatctccaaagtacattgtgttctctagccagataagagagggggaggagagagagaggagacactgtctgttggaagtggttaaagaaaagggcacatgatttgaagtgtacattattcttttgtcctctgaataattttatataattttgaggaatggaagattatacagcattcctgtctaatttcgtaaatatcaaattgtagtctttggggagagagacgagcacaggtgggaaaacaaactgaggcatgttgtgttcaacacagagttaatagaccttgaaacaccaaaggacaaacaagtccttagttagccctactgaatggaagtggcctaatagtagcagcagtgtaagcatcccattgtattgtggcttcattatatgttctgtgagactctgctgtgccagtagcaacatcctttcttgtacgaacccagcaagggttccaattctaggaaccataaccattatttttgtttataccatacagctctcccaggagagtaaatagtgttttggcttgtatttcttttatccattctgttcttttcacttatgaaaagatcagaattgtagaaaactatgtgttggaggtataatcattaaaaagcttgggttcgatcaagctggtgttggccacaatgaggacaagtatttacatggaatcggtaatcagtgggggaatgttttgtttttatttgtctttgtgttttaccccactttgaggtaaaattggaagcaaaggaactttcagatgcccaaagtacacacagactctgttaattcacatggggaccacacagtctttcacaagagctgtgacacttggctgttctgatagaaaccttttttgtgtggcttgaggtttgaatccagagctcttccatcctcaccctctctcctaattggataccagttggggtggccttgattgttctttctccagaggcctcgtcccgtcagaagtaaaccacgcccttgctttacagcagttaaccctgatcattattgctaacactagcccatgcttccttccctattcattagccggagaagtgcttaaactaaatctgacatcactgctatcctcttagagtgttacccctgtgttataccagaaggttggctgtggaataccaatggtaaggaaccatccttctcatcataccaacccgtccgcagaaattatttatttcccattttagatactggaaagtgactcattgtgccctggaaatattatcactgtagtaattttcttatgtggctcagtttaatgttagagaaatggctagttacaaatccagacactataaagattgagctaaatattctaaaaataggatgtttggttaacgttcggtagtcaacaactttcctccagccacacacagtgcagggtgaagaaatgggatcaatgtcctcctgcagtcttcggtaaagtaactcagtaggagagtgatatgtttgaagtatgttggacccatctttgagggctgttgtgtggcatgaatcaatttttaactgaaaagattagtatctggaaggatatttcatgcttgtagttaatagatggcataaaaacctgcacctggaatttagcttgttgtaataaaattaaaatatcagaaaaaactgatgggtttttgaccactgaagatattctctagtttaggtatgaaaattagttatgaatggggaagaggaaaattgttatctcaactgcacttatttcttctaattttttttgatagagatagatgttgattgccatttaggttaagattttgtagaagaagaaatcaaaagatcagaaaattaaggtatatccagggttaatatggccgcattgtggcaaactctcctgagtttatttgctagactcttcatttttattctatttatccagagaccagaccattttagtatcttagaccgacatctcatctcttcatcctcatgatgctgtcagattccattaaataaacattacagtattaacaacaggatccagaataacctgagactagcatctttgggaatgctgggaaatatcaccttgattaggttaattgaggtgggagaaccaggaccagccctgaaagtaagaggcaccatccactgggcttggttcttgaactgcatgagagagagagagagagagagagagagagagagagagagagagagagagagagagagagggagggagggggagggggggggaggagagagatatgagtgcttgagctcagcaattctctgctccccagttgatgcagtgtgaccagctgcctcatgctcctctggctggaacttcccttctgtgatgcactgtaatctcagactgtgaactacaaaccctttctcctcttagttgttttcgtcacagtatttatcacagccatggaaaagataactaacacaggtgtccgaccttggagtcttgtcccactagcggatcatctaggaaagctgtgctatgtggcatgcgtatgttgtaaaagcctgaaaaggaattccccagatactttcattagaaaagtagtcagttgtgaattcctccaaaagaaaccagattccttaaatacattttttggtacagtattaaaagcctaggagtttataattaaagcttcaactctttatttatttccatagcttgggattctaagcatattgcagaacatatctgaactattgctccaaaccactcaaaatttgtaccaaattaagtgcttattcatgcactgggctctgtgtttacacacacacacacacacacacacacacacacacacacacacacagagagagagagagagagagagagagagagaagagaagagaagagaagagaagagaagagaagagaagaagagaagagaagaggagagagagaaaaacgcaaacagaaaatagtgccaaggcagagagagtgtttaatatttatagtaagataggatactcttactaggtatatatagaggaaaagttccaatttgatttttgagcaaatggaagccaggagaggagaataaaaattcaccttcatggttggcaagaatgaaaggtgtaggtaccagaaaaggctctggtcaaagaggactatggaaaattgattaacaaatcccaccttgcagaagacaatgtgttacaagactcacatgttctatagagatttggagagggtgggcctctgaacacagaaatgacttacgctgggaattaacattcttctaggtttggtggaaccactgaacttagtggcttctcggtgtaacaaagcattctcaactctgctagcatataccttaacaaaagttcagtcatctccccgggagtattttatattttattccaagttgatacttcttaaatgtttctaaaatagaatttgtggttgagcattgcaaaatgctatatatgtataatgtggaataaaaaattttcagagttttgttatgagaaaggaatcataaaggaaactttctatgctcagtgaaaatagtaagctattgagcacatttataactcagtaagtgatagttctcttgaaccttatgctcagtggaagtagccattactaggtaactattagtttatgggatttaaaattaccatggaaacaaggcctgtgggcttctctgtgaggaactttctagataaggtaaatggaggctgaaagacccatcctaattgtgggcagcagtattgcaataggctggtcctggattgagcaagaaggagcaggcagcacaaacatgctcagttcctgatttagaataaaatgtgaccaactgtctgtagctctagctgtcaggactgcccaccaagatggactgtaccctcaaactgtaccaaaagaagcccttctcccttgagtagcttttgtcaggataccttactacagcgttaggaagtggtaaatacagaacaggaacagagaaaggtcaaaaacatttcagttagacagtactgggttcaaaatatgactgtgctttctattaactatgtacctctgagttgaccaactctcttaatttcagctttcatatttgcaaaaggatagagtggcaccttcagaatggaatatagtaaagaataaacaataaatatatttacacacaaaatccactactggcaagtagtgtagcatgtgcagtggttcctttaatgctccgaacatcatcctaaaactcgtggtgtgatacccagtgtcttccaaagcaaaccactccagccttagacgtttaggtttagaacttccccctaaagcacagtggaatagtaaagaaaaaaaaaaaaaagaaagaaagaaagaaaggaaaagaaaagaaaagaagataccattttctgtatgactttctttagaaatatttcagaagaaattttcaaatccttgcagtctttgcctcacttacatggccattccacagcatcatctattttccattgacagttctgagagccatatgtactcaatggctctccccttgacttgtggctttaccagttcagcaagttgaagtttactaggagccaagtcccaataggatctgagccttagaagcacagtgacatctttgctaacttgcactgtgcgtgctgtgctttgaaatggaaagcttattgcccttccttgcttgtccatgagaaaatatttgtagaacaccccatttagaagaaaaatggtttatacattctcttcctgataggattaggagtctgatcttgccctgtcagttcttggccccacctgccaaggagaagaaggagaaggggaggggccttggaggaagaattgtgggagggggtgacaggaggggtagctgagcaagatgtaaagtaaataagtaaaaatactaaattaaaagtaaataaaagaaagaagagattaaaaatgacttgcaaagaatacttaaaataatttatattggattaatgaatgtaaactcaagtaaatttgtaggaaaatgttttatgacattttggctgtgatgaaattaaagttaaggtagcctacgataccttctgagttttacattatatgcagggcccactttaatccagaacaatttctttcttgatatcaggtttgttgcccaaagtaagtagtatgggtaggatatggtactgcgcttggtcagtgatccaagcatcaagtctttcctcagtttccctcaaggtttcacctaagatgtgtcagttgcttgcctgcagtagtgatatcatacaaaaccaatcctagagttatatatactgaaagaatcctggggactacaaatacagtcctacaggctagcccttcaaaaatcaaaaatactaataatattttttaattgattatatggggtcatataaatttacttgatctaatctataactttgtgaatggcttaaggcagagttgctatagtctcagtttcactagtgagcctactgacctggggaattaaaactgtgcatgaaagtaaagatgtccaagtagccttatctctggtaacctggcttgtttcgagcaatcacaaaatcgttatcttacacatttagcgagcagaagcaccgggctgcctagaaacagaagccttactacatctgaaatctcccttagccagctccttctctaatgccccatttgataaagccccaaaatgaacaaaatgttgtctcccacaaacccagaaaatcattacaaagctgtgatggtttgaataccatattctctgccatttgaatccttggtccaccattgggggtgacatttggggtgtataggagatatggtcttgttggaggaagtattcacaggaggtggagcttaaagtctggtaccctttcttaagtattctctctgcctcctactttcttttggagatgaagctctcagatgcttcagccattatgctagctgttagctgccatgctgccccgcatgatttggttgactctaatcccgctggaagcctgaataaaccattccttctacaaggtgcttcagtcatggtattttatcactgcaatagcatagtacctaatacagaaactatagaataatccaccagacccattattgtttttaaattacttcagtctcagttcagatctcctctctgcatcctgtgctattgtgtgtgactcagtccttcccctccctggatctcacagtgagtatcatgtgcctatctgggtattgacatctattaaaccaagacatcatgttagtgtctctcttaatgcttgtcctttagtggatcttcaacaaatattgatgtttttcatgcatttgccttccctgtcatacaaccagaactctagtttcatactgtttacttctgggctccctaatgctgatccactctttagcagagggcagtagagttgaaaacaggcctttgccatccatctgtctccatgttgatatctccagtcctgtcctatgaatgataaagcttaccttgggatggcactagtagtccccatacagtgcttactatacatacatggtccctggcacaattatctaaggggcttgacattgtgtctatcagtccaattgcaaaataggacttattaatgaatcttttattaacaatagattatttcccacaacgaactattcatcagaaacgaagattaattctctcactctcttcctcctgccctttgttgggtttggtttgatttactgtgtttctatctcaggacatggtcagtactgatgccattccaagcttatgagacactttccctgcctccttagactctttggacacctttaggtgtcaacaaaaggggtgtagatgtgagacagggaggcattcacattagtcctggttactatggggaccacagagcaggcatcacatccatcctgtccacacaggattaactcagaccatctgagccctgagtttacctcaaacacattccttcaagaaaagggtcactgccggtcatttccctaaaatatcactgctgtcctgacctgatccttctcagcttcgctttggatacacaagcatactttccacttgtcataaagtgtcactgttttataattaagcatgaggtggcaccaggtgaagggactgtgtaatgtggtcagcacacagagcctgtggtcaaagataggagtgcagttgtcatttggtattttggagtctcaatgttttgatttgtacgtctgttataaatatatcacatctttttccttctgctgtggtgaggttcaaaagctagactcatgaggaaattctctgtggaccataacttataagataaatagggaaacatttattgaaccttccttgtggttctgtgcattatagtagcttttggtctagatacatggtatataggtgatgttaaaataaaattgacttaaaaatctccggaataatccagagctactagtgtgatcttgggttttataggctgtgcaaaagatgacttttttagatccctacctatatgtataaaggattctgcctaattcacataagtgactccagaattcccagagaacccaggtgaaccctgcttctgatatctttctttcgaatgatactcactcaccaagggaactcaatggggacctttgagattttcacttatggcgagaaatcagctttctcctttggccatggcagctagagccctttccactgcgctcttgtttttcttatctcccacttagcatacccctgtgtcttgagttcatgatcctgtaatgagttctcatttggtattggggaatatctctattctgtatggacactggtgttcaagcccagagaggtttccacttggaaaggatctgatataggaagtgtatttttcttctactttcttggtggccagcttggaccagtgagttgctaggctgtcctggtttcttggcttttggagccaaactaagttgtacatgtcaagacaattttcttcttcttgataaaggtctttccttttttttctctagtgcctcaaaagaaggaagggtaacttgatcaattctaatggctggcaagtgaagtatgccataaaatgttttctatcacttgtgttatcttgtttaagtcttattgtcattgtcactttgaactgaatggaagaatgttctgtttataccaaggatatttcatattcagtgtcagttcaacaacgggcatctcacttgcaagaaaagccagacctgaggaactaattttatgtttctcaaaaccttcaaattgaaatcgcttcaagttcccaaagtataatgctctgatggtggcattcatgggatggtgcttgccactgctatactgtaactacttaaatacggcatgtgagtgtgtgtgtgtgtgtgtgtgtgtgtgtgtgtgtgtgtgtatgtgtgtccttatagcatagggctaggactgtttgttagaggggcttccaggtttagcatgataattttacatctgtggttcagtgtttctttagttttagcacttaaaatcaggccggtcttcatttcagcttccaaaaagacagggctctaccctgttggtacccagagtccctgaagtaaaactcatgctgctgtggaaagtaatagccatagataaagttgtggtctggatacaaaccatctcttcagcgctgagctgaaagcaaagcacttaataaccccttgtctggcatccccagtgttgcagtcttcaagacaatatgaagtttccactctatcaaggcttctagttagccactcacgaaatttaaacagaacagcagggaatggagaggagtagaggagatgagatgagacagacaggaaagagaagagaaacagagaaatcaaccataatttctgactggaatatgattcctgtcttctaatgttcacaaggagtaaatggagagagagagagagatgtaaaatcgacttccaatgccttgtaccaactttttttttacagcatttttttaatttgttaattttttttaaagatttatttatttattatatgtaagtacactgtagctgtcttcagacactccagaagagggagtcaaatctcattgtgggtggttgtgagccaccatgtggttgctgggatttgaactccggaccttcggaagagcagttgggtgctcttacccgctgagccatctcaccagcccttgtaccaacttttataaaaactcagtgctaaagaaacctgtagacggcctgcatgagatgtttctcaaggacctgacctcatgcatacatcacgctgtttcacggcaggtcaccttccatactactttgcttaagtgccttatacttaagttgtagattgcttccctaccatcttatgtataaaaaacaaaaaacaaaaacaaaattagaaaaacagcaaataatctaaacctgtcaaatgagattagaagacagcatcctgtatgccaaattgagcttacgatagtgactatagacacagctgtactggagtgcagccacaatcctttgtttatgggttgtttagagttgatctttctacattcagagctgagtagttgtaaaaggttagatggcccagaactcctatagtattaactgttttttatctctcatttaaaagagtttactagtctttgagtactactaatcagtgaataccaagggaaaattttgttgtcaatcatatttccaatctatatgatgtgtagttcttaatctttcaataaaatttagggggaaaaaaaaggtaaccacccagaagacattcatacagtaccttagctaaaggatgataaagagcgtgtaccatcccctcctctccagttagcttttcctacagacatcccgtgccttagcgtaagatgctaggatgttgagacaaggccacacaatgtacatctagaaggttccttgcctctcgtaaaggtggactgcacgttagtaatgctccttcatcccgtgccaggacctaaagtaaagaggcagaatagaggcaggctccagtgtgcactgtgagctctaggaaacatttcacaggaaacagaataaacctctgtcgatgggcagtattagaaacaaatgtttgatgtcaaggcacttcatatgtctatattaaaataatttggcatggaatattgggttcacagtaaatgaagtactgttgagacatttctttttgtcttttcagtagagttctcttgtaagtaatcattatgcccattttattaagagaatgttttgttcttggcagttgtttgatttgctcaaagttttggtgcatataaagagagaaactagccctccaaaggtatagaactgtctctggtcaaaatctcctggcctcaatctacagatatccctttgacattgaaatgagtcttcagtatgataaaggcctttgactttgactgtctagttttaaatggtcccttgatttcttaattttttcacctgatgccacagcgctttctcctggctgagttaacattagtcttgatgtcaacagttttactgcttactctccgcccttgttactatcataagactttggctgtaactgtcagctgatttctgtacttttccttttcttattgctgttatactaacccattggaccctcggctactggttacatctcctcattgcagtttttctcccatagtagaacttacataagagggggagaaggtttcagtgctaacatttcctaatgtgtaaaaaaggacaagaaacagagcccaagccacaccattgactgagactgagagccatagtgttgagtgtttaggcctccaccttgcaggcttgctagccacttgcatactgccgggtgtattttccacctagatgagctgtcttctttattgcagatccccaaatcaggctttttacccatcccgaagcctctgttttgccttagttctctgacatgggtcctacaaacttccagctgtggtttggaagtgtgccacctttcctagtacccttaaggcagctaggggaaggactgattgggctgcctataattaattccacagccctgagtgtggtctagagaaagtaaggtggggatttcagctgtttgttagtaagacaggagagttcagaggctgtgagattctgattcctcggagattctgcaataacgattctgttcatctggctttattctttttttttttaattaggtattttcctcatttacatttccaatgctatccttaaaagtcccctatgccctctccccccccccccactcccctacccacttcttggccctggcgttcccctgtactgaggcatatacagtttgcccaaccaatgggcctctctttccactgatggccgactaggccatcttctgatacatatgcagctagagacacgagctgcgcggggtactggttagttcataatgttgttccacctataggattgcagatccctttagttcctagggtactttctctagctcctccattggggccctgcgatccatccaatagctgactgtgagcatccacttctgtgtttgcttcattcttttctgaacctagagcacctctcttaacctcggtgggtctcaaatatgacaggattatacatggcttttcttcactcggctgttgtgaggatcaaataggcacatgttcaagcatttagaaccatttctaactgtaaactttagttattatcattattatcgctttcctcttgtgattgaacttgtcataccatgtctctattttgggttctaaaaacatggttaacataattatgggtttaatagaattttggattaacttgtgaacccaacatccaattatagtgctgtttttatgagaggatgaattcccaagttcattccaagcagatgagttttaaggaatgtcttagagctggcctgagtcgatgagatggataaagaaaggaaattgaacatctgatgatgtgtattgtttaattgattattttatagtttcatacaacatgataaaatatattgatcacgtttaccctaactcttccaagatctatctttacctccctatctgttgtcaacttcatgttttttgtatttaatactcccatttcactctaatctgtgctgcccgtttaatgggaccttccatggggcatgctcagccttccagaaccacacccttaaggaaaactgactcttcctctccacatgcccgccctcctcattagggttggggcttgtgaacccttcagcatctcatgctacgttggctaggtcttgtgtacattttatacaggcaaatatagcacccatgagcaatgagtgcagtggtgtgttgtatccagaagacactttattactctgatattttatacttactgtggtgccagtgattggacctggggcctcatgcatgctaggcaagtttgggacagttcagctctaccgccagccccattcaaagagaattcattttactctgcagtcacgtcacgttcatgggcatctccttgtatttgggtaatgtttagtctcttttactctgtagtccagggtgacctggaattactaggtagcacaggctgtcttaaaccttacagtactgtgttagagcaaacagagcctcatcttatgaatcctgaacatgtaagctattgaggttatgtatataagctttactcacttaatatgtgttgtcaatttatcttgttattgctttctttcatttggcactgtctgtgtgttcatgagtaaagctggccatatttaattgcctgggttgcatcagtagttgtccaccttcatcattgcttggttctgtaataccacgaaggattactatgccagctcccagtcatatcagtaagcttgatctgcatacagtaatttcactgtttgtgaaatgtctgacctcagttttctacttctaagtaaaagtcatggaagttttttctgatgacttaatcatacctggaacacgaagagcaccatagttaatgtaaaaaataaatccaaaatgtatgggcactgatttgcaaatctgtttacaaatgtgtggagaaaggagagagtatgaagggctgtgagaaagaacagtgccctctaggacccgagaggggattctgaaaggctgtgctgctgactcggccttcaggtctcctaacaggattcaaaggggacattcatggcagaggagataatgagaagacagggagtgtgggagttatagagatttattctgtttgtttgttagaatgccttaaaatggtatatgttactgatttagccatattttacttcaagattcccacatactttctggtgaaaaatcaacaaaatccttaaaattcagatgattaaactctttctggctgagttgtgtgtctgtgtgtgtacacatataccccacatgtcttcacaaatcaataacaatgccaaatggagcaattttccacaattttcctcaaacgactgggtacttaaacactgcgttcaaccaaatgatgaagtccatcagtgtctcccgtcctgctgagctgctgcatcgtggcctggagaagagactgactcttctgggctgcgctgttgaagactgtagactgtacttcacctgtgtagacagatacccgcacaaataacttttctgtcaccacagcctttgctaagtgttgtgagtcgggaattagaaaatagttccaatttgagttctcccagcagagagaaagcattttaagcaatcttccctggaatgctcaggtttgagactggaagagcttagtccaatcattgcatgaggtggggcaacctgtggagggaaaactgcaaaaagtacataatttatgtatgaaaaaacttcatatatacagaaaacaaaaaggcaatgattataaatcacataaaggcagctgtgtctttgggaagctaactggcaactgaagatacataatgcacaactcttaggatgtttcctctgagtgaagactgggatggtctgctccattagtgaaggggccacacacatttttcatgcccgtgaatcagtataggtccccatccaccccattctgtttttagtctcagaatctaaagctgcctagagcagaatgtcccaaacctagcaccacatagctccagagtttgcttcataggtgctgttgggtttcaaatgggagggggggggttcacaaagtatagaatgaccctgcctagctttgaggactatatgaagcataagcaaagcacacaaatgtgttatgcatgtgtgcacacatctacatacatgcacatacacacacatgaacacacccataatttttaagaacacaaggtggtgaatttgaaagagagcaatgtgttgatacataggaagatgtgaaggtagaaaacaaaaagagaagtgttgtaattatattataatttcaaaaattaaaaacttattttaaagattccagataagccaagcaaaggtggctcacacctttaatcccagcactcaggaggcagaggcaggtggctctctgtgagttcaaggagagctggatctacagagtgagcttaagacagccaagcctacacagagaaccctgtcttgaaaaattattgcagagagttgtgcaagtggagaataagaaccacagtataataaagtgcatcaagacacgtaggagcagctcagtgacagaagtcccagcattcacttttctgaaagactccattgctttgaaagcagtgtgttcttcttcccggagtggctggaacattacagtgatgactcctgttatgaaatgaacgggacttgtaggctatatgcttcaccatggagattatttcatctttaaaattctaaaattatagtaatgcacataagtgcttcctgaaggagagaatatatctactgggtattagggaaaactatttgtccatccaaaagataagtgacttaatccagtgttttgaatttttcagtattatattcatctttgaatagtgactttattctggtacaaatagcaagcaatgaaaatcttctatctatagaactcttggacttttaagatggcccaagaatgctttggttgcaaacactaagtcctgcggacatgctatacacagacctccttacacattctgcattttgatactggctatcttgattgtgtgacagccaatggttattctctaaagtagatctccaaactgtgaaataattgcaaagcaaacccccagatcagagatcagtttgggtagctgggatggggtagggaaagcaaatagttaaatgtataaacacagtactggaaaagccagtggcaaccattttgtctacctgccagggcctcaaggcaaagctgtcagttttgaaaaattgcaagcaagtgacactagtcagtatccttaaactgccaacaggtgaattatttcttgtgactaaatctggaggggctctggaaccctcactcttgatgtggctttcccactctctaaatgttgggaaaatcagccttgttttctccatgtgaaatgaagaggttaggaaagctacttgcttaagcaagtgacagtgcataataccaagcaagagcactgtgcagtcttctgtagtattctgctggggccggggttcccagccacctggagaaatagaagttacaggagaacgcacctcatcacaagagcaggctttatgaagtaaggatacaaatccaaacttcctagtctcctgtgctctctagtacacggtcctgcaccttgccactcactcagtgcctctgaaaaggggatcctgtatttgctttgtcaggaatacctgatccctcctttctcacagggctttccaaataaagtccacactgccctactttttccatgaatatttggcaagccttctggtattttgttaactactgaattgtttggggatttttaattgtttgaggctaccatatcaagtattcctctgttcaagcattccctcccctttcacttccagtgtgcatgttcttcctaatactgtagccttgtgaaaatgcccaagaactaccaaagtctggatcctgagaagcaggggggtagagactgctcattccagctgttgcgcttagatctgggtgactatcctgccagctgttgtcacagctctttcgctgttacacttggatttctttgctattataaatcattgattgttgatgggtatcagctgacattgcccccagtttcacacactttgtattctgttttcatcttgattttgccactttgctttacatcagcctatctaatagtagctccttttgcatgtagaatcatgcctgtcttctggaggaggctctcgccttggcagaattttatcctgatattcattccttcacaattggaacagttcacccattccaaaagaaggccttgtctctattttctttatcttattgtatgtttctttctgcttctaataaattgttgttatatagggacaccttaaaagaaaggaaggaaggaaggaaggaaggaaggaaggaaggaaggaagaaagaaagaaagaaagaaagaaagaaagaaagaaagaaagaaggaaagaaagaaagaaaagcctaagttaactcatccaaacttctgcagattcctctagatggaaatgacagtgtctgccttgcatgccacagaactctttctctctctgccacacaggcatcgtttcccattctgcacatgggaagaagcacagtgtaagcatggctatatgcagtctctgtgtctttattaaccttgaccatcccagggtttctgaagtatttgcttgttaatcaacacagtgacagtagtgacgaataaggaaccagtgtccctgtcactttgccatcaatgagtgctccatatttctcaagctgtttcctaattaaagtaatgtgtgtttctgccgtacaaggtcaatagaaataaataatacagaacaaacatcgcaccttcgcttccgcttctgcgccactcactaattcctagttcatgaaggacactcttagttacaattccctggacatgtgtagctccgtgttctgataatattataaatccatgtgttctgtctttgcattctgttggggccattatattattagatttatttatcattattatttatgttattttattattagtttattagttttaataatataaatctgtggatatgagatcaatatatatttttgcctttggattgtctatcttggggaatgtttgtcaatttcttgcttcagttacttttctatttttaatgtattattattattattattattattattattattttacttattcattttatattctgctcaactgttcccctcctggtcaccccctcccacattttttcatcccataccacttccccttctctgagctggtagggcgtcccctgggtacctcctcacccccatcctggtatttccagtctccgcaagtgttggtgcttcctctccactgagggcagaagaggcagcccagctacaagagcatatcccatgtacaggcacagcttttgggatagcccctgttccagtagttcaggacccgcatgaagaccaagttgcacatctgctacatatgagtggggaggcatgggtccagtccacttatgatcttttgttgttggttcagtctctgagaccccccaaaggtccaggttagttgactctcttggtcttcctgtggagttcctatcccctctgggaccacaatacttcctcctattcttccatagtagtccctaagctccgtccactgtttggctgtgggtgtctgcatctgtctgagtcagctgctgggtagagcctctcagaggatagccacactagactcttgtctgcaagcaaagcagaatatcattaatagcatcaggggttggtgctttcccatggaatgggtctcaggttgggctggttattcgttgaccatttcctccatctctgttacataccccatccctgtgtttcttgtggacaggataagttttgggttgaaagttttgtgggtgggtttgtatccctattgctccattggagttcctgcctggctattggaggtggcctcttcaggttccataaccccagtgctgtgagccacagctaaggtcacacctgttgattcttgggtgcctttctcatcccaagtctctgtccttttcctagcaatatctcctacctccccacccctgtcagctgcagatttccattcattcacatgaccatctggccatccctcctgcccctccccacatctgatcccaattcaccccctattccccatctcctcagttacttttctattactgtcataaaatatcatgaccaaaagcaacttagtaatgaagaaagaatttcagagtattaatatcactcattcacaaatgatgtggcacagtggcaataacaagaagctagttggtcacatttcatcagcacaaaggacacagatagaaaagacaaaacctgcaaaatgcacccccaatgaggacctttcttcagctaggttccttctcctagagttcgataatctcccaatgcagtgccactgttgaataatctctgaatgcagtgccaccatctggtcccacatatttcaaacacatgaacctataaagagtatttcttatgccaacccctgtatcctctcaacttaggaaatgctatattagccagcgatcatgttccattctcacgatgctggaagatggtgacattgtgatcctttctgcttgctctattgctggactgatgaactagtatttgaggtcacctgtgtaacgctgaagacaaaagagtcacttggtaatcccctggggccctattttcacatagcacttaggtttgaaagttgcaagaggatttagtgaaataatgatggaacaatttggagatttgtgttctttcaggaaatacaggtgttcttagtaaccacagagctggcagtctactgtgcatttctgctttgcatgtccaaatataaactagatgcttaatgtctaacaatagcagttatcgcctattaagctgcttatggtataaaataatgtattctatatcactcaaagttctttctatagcattgtactggttatatatgtcgaatgcctctttcacgaggtctttatgatcatgaagtatattgcctggaatatgttatcatagatggagaacgtagtcacagccagtagccataaagcctgcactgctttctagcaaagcaaccttcacatgctgtctgatttgaagtcttgcatctttaagataggatcctagtgttacacacagctatctgtgtagatgtatagctcacacatttacaagaaaaggaaccagggtgactttagtatagttctctgccattcatttatttcaggaatgtttctttgggtgtgttccaaagtatatttgtatagtaaaagtcttatcaggcaagctggcaaactagtggcttggggccccagtagaagagacacaccggttctcgctgatcagttcttcgagattacttcaaatccctgttcacttttacagtctggcaacacttctcacagaaactcattacacagatcaatgtctgacaagattattttactttgattttatgcaatgtgttttgcttgtggtttggatcttgtgccatacaaacaccttctcctgcgcacaattccagtgctggaaagctgatagaatctttttaactttaatgttcttttcccccttagtcttcattgattcccttttaatttctctgttccttatcataggcataagcatattattgattgtattgattatgtcttttaaaactaatgaagtgaagagatatacctcatctctatgcagctggcttcattttgcttttgtgacatcctcacctgctcatgagtgtggctcacagtcctctggaccggattatcattcttattcagatgatttcccccaacaatgtatttattggttctgcatttgcatatgaaaagagaacctgagatgcttgtcacagttctttaaggaagctttcactcttttccaaatcagcatcattttctaatgtgtacatgcagtcaagtgtatagggcaaatatttgtctattgtttaattctcttgctcacaagctccttttaagtacttagtgcccttttatacatatgtacaatgactgtaggaattgttaagtggttaaaaatcaaagcacaataatatacttcagcatttctgttaagtttttcattcacttattttaggccccaaaaataagcatcatagaatgtcctttctgatataaagtagagttctcatgtgtgaataagtatctctgtgtgtgtgtgtgtgtgtgtgtgtgtgtgtgtgtgtgtgtgtgtgtgtgtgtgtttgagagtgtttaccacagtttccagtcattcaccaagaatgcagttgttgtatcctatgagagcatttcaggaagctggcagtcttctgaagcgggtgggccactgcatctttttttttttttccattttttattaggtatttaactcatttacatttccaatgctataccaaaagtcccccatatccacccacccccactcccctgcccacccactccccctttttggccctggtattcccctgtactggggcatataaagtttgcaagtccaatgggcctctctttccagtgatggccgactaggccatcttttgatatatatgcagctagagtcaagagctccggggtactggttagctcataatgttgttccacctatagggttgcagatccctttagctccttggctactttctctagctcctccattgggagccctatgatccatccattagctgactgtgagcatccacttctgtgtttgctgggccccggcatagtctcacaagagacagctacatctgcgtcctttcaataaaatcttgctagtgtatgcaatggtgtcagcgtttggatgctgattatggggtggatccctggctatggcagtctctacatggtccatcctttcatctcagctccaaactccgtctctgtaactccttccatgggtgttttgttcccaaatctttttttttttttttttttttttttttaaagaggaggaagctagttagctagacatagtaggaggtttatgcaggagagctatctcaggttgcagtccaggaagaagaagttgacattagcatcacctgtacgcactgcttttagctaagggtcaaccacatgtaaacattcctactctgtccaggggaaggttttgctctttccatggatctgagggatggtcctcctacagggtcacccttctcctcagcttcttccagcttttccctaattcaaccacaggtctcagcagcttctgcccattggttggatgcaaatatctgcattgattttcacaaaaagaggaacatttttggtaaattttttttttccattttttattaggtatttagctcatttacatttccaatgctataccagaaagtcccccttacccacnnnnnnnnnnnnnnnnnnnnnnnnnnnnnnnnnnnnnnnnnnnnnnnnnnnnnnnnnnnnnnnnnnnnnnnnnnnnnnnnnnnnnnnnnnnnnnnnnnnnnnnnnnnnnnnnnnnnnnnnnnnnnnnnnnnnnnnnnnnnnnnnnnnnnnnnnnnnnnnnnnnnnnnnnnnnnnnnnnnnnnnnnnnnnnnnnnnnnnnnnnnnnnnnnnnnnnnnnnnnnnnnnnnnnnnnnnnnnnnnnnnnnnnnnnnnnnnnnnnnnnnnnnnnnnnnnnnnnnnnnnnnnnnnnnnnnnnnnnnnnnnnnnnnnnnnnnnnnnnnnnnnnnnnnnnnnnnnnnnnnnnnnnnnnnnnnnnnnnnnnnnnnnnnnnnnnnnnnnnnnnnnnnnnnnnnnnnnnnnnnnnnnnnnnnnnnnnnnnnnnnnnnnnnnnnnnnnnnnnnnnnnnnnnnnnnnnnnnnnnnnnnnnnnnnnnnnnnnnnnnnnnnnnnnnnnnnnnnnnnnnnnnnnnnnnnnnnnnnnnnnnnnnnnnnnnnnnnnnnnnnnnnnnnnnnnnnnnnnnnnnnnnnnnnnnnnnnnnnnnnnnnnnnnnnnnnnnnnnnnnnnnnnnnnnnnnnnnnnnnnnnnnnnnnnnnnnnnnnnaatgtgttacctcactcaggatgatgccctccaggtccatccatttggctaggaatttcataaattcattctttttaatagctgagtagtactccattgtgtagatgtaccacattttctgtatccattcctctgttgaggagcatctaggttctttccagcttctggctattataaataaggctgctatgaacatagtggagcatgtgtccttcttacctgttggggcatcttctggatatatgcccaggagaggtattgctggatcctccggtagtactatgtccagttttctgaggaaccgccagactgatttccagagtggtcgtacaagcctgcactcccaccaacaatggaggagtgttcctctttctccacatcctcgctagcatctgctgtcacctgaatttttgatcttagccattctgactggtgtgaggtggaatctcagggttgttttgatttgcatttccctgatgattaaggatgttgaacattttttcaagtgcttctctgccattcggtattcctcaggtgagaattctttgttcagttctgagccccattttttaatggggttatttgattttctgaagtccaccttcttgagttctttatatatgttggatattagtcccctatctgatttaggataggtaaagatcctttcccaatctgttggtggtctttttgtcttattgacggtgtcttttgccttgcagaaactttggagtttcattaggtcccatttgtcgattctcgatccataactctagtttcagtggaatgcagccccctcttctgaccgctggagacagtgggttctcaagcagtgtgcttccatgcattcaaccaaaacacttgctcatacacataagtagaaaatgaataaatctttctaaaatagtaaaagaatagtgttatggtcattcctaaatagtaaaatatacgttttcaagacttaactacaatttttgacatgtagatgtatacactaacatgtgagaatttgtggtcgagccagagaaaacagagatgcaaaagcaaaagagaaggccattggctcagtcctctgtctgcaagaatggaaacattgaataagtttcttccttcacacagacatttgccgattatctgagaagcccctaaaatcgatgtgtgtcttggatctaagagtattgagcaggtgataggctcttaaccagtgccccctgaatgacactcactagtcttagtcatcctgccctgactggacaccaggaggcttcttgtctttactttaatgggccagacatacttctgaacttccagcgcttttttttttatgtcaggcacttggagccttgccctgctagggagaccagatgaacgacggaggtctgattaattagtatttgcttcatatgtgtttgtttttattcctctctaaagttgtactggaaaaagaaaatcctgcctaatgcaataacaaatagtggaaaatacttgaaaattgtacttactatttaaatgtaaaggtcaatattattgtagctgttagtaacgacaaccatcatattaaaaccctaagcgtaattccataaagagcttgttgattccctcctgcccttttttgtccatcctcttagcccaccccataatccggtcacaaaaattaaagctatttaggggtgtttgagtcagcatattgcctatacacgatttatcttcctgcaatacacactttcctgaatttctcaaaggcatgtgacttcaagaaatctttaaatatgtaaataatattataagcttctgatgaattgcagatgaactgtattattttgatgtctgagtgatgcaacaaaaagctcaaactccctgctggattattcctgtcacattttacattaataaacatcagtcagcctgcaagaatggtgtgttatctgaatttaatgaacttctgtactgaatggaatgcatctagttgacaaagtgtcatcaaacagaacagaagagagtacagatctcctgaaaacaggaaggaaagaacaaacaagagagcagaagagaagagaaaaaaatcccatggaacactgtccagggggttcggggtgggggtggggctggagtgtgcaagaaagtcccagaaagcaagtctctgtgggtggacagcagtggtagtctcctgccaggagtcttagatctgtgacattaatgttgcctttccttcttattgtagataggaactcaagactaaatagaggaaagtgtctgttaaaaaataatctacagtaaaccattcaagttagttaaatgcagtacttcataggtggctctacttttggccttataatcttgtacccaagattatgagattaaagataaaacttctttaaatgaatttcactgccagtctccccatcttctttttagtacattggcacagcagcacgactgcctacagttggtatgtttacacgtataatatgtggatttttagaacacacggctatactgtcgttctctaacacagtacgaaaaacaaaatggaagcttgcaaagtactgccctttatgttgttctcgggatattttcaggaccacagttgggggaattgatcatacaaagaaactgatatgtagcatttgtataattagatagaccctggagtacacactaaattgttaccaactgtgtatgctgggatagttgaacatagccacggtggtcatgggctccttttaattttaggggggttctcatctctgagtcttttcagatcgtggggcaagatggtaacttccttgttgaattccttatgtcttttatcctaactttaaatggaaattttactctcctccctcatgttagtttgggttgctagtctcagcaccagtcttcactatgggggtctgtgagaagggtttattacagccttgctttgatgtgctgctaaatgcataaaacctagaaagttaccctggaccttttcagggcgaaagagcaaacacggtgattcatggcatttcagtttttcctatttttgttttgttttgtagttgtttgggttttggttttagcaagggtactcttagaacgcatctacatttattgaaacaactgtgaacttaaaactcttaattttttaaatcaactcagcattttacaaatgttgtcattagtccttagacagggaagaggcagagaaagaaaagagtggggaagaagagatgagggaaagaaaggagaaatcgatgagtcattggttcaagctctagctgtgtgaagcagttaacatgttgcaatatttctgaggctgtcagtatcttctgttttggattctgtgcaagtgatctttgtgtcaaaagattgattttcttgtcattaggtatagaaacgttagcagagctcacataaaggaaactgatgaataagtctagtctgttgttttccagcaaatagttttggtatctaaggctacagagcttctcactgagaggggatgccctgtggaggtaagatgcacgcatgcctggtttccacctcatggctccagtgtcccacagccttctgagatttgtagtaagctgggatgatctgtagctgatgcttcgtgtatattctttgaccttcatgactttgattgatgctggagtagagcatcagtgatggttgtcatttgcacaagcccctttctatgccagggtggccacaaacgtttagtatttcttagcactcaaaacagtgtgactttctaaaaatgtaagatttccagacaatctaaagcatggagttttaacatgaaaaatcagaggggttcggataattcacttaagtttattgttttccaattactcttaactgaaaaaaaaatttttagtaaaagttgtgatttccttgctaaacattcttaacatcattttgctaataaatatacttaggaaaaagtcttgaagtacagtttaacttgataacacgagctattttttaagaagcgagcaattataaattttgtattttagggaaattttgaatttatagaataattacataatttgtgtaactattttagcacgacctgacccatcctaaccgaaattaatgttttagcagaaatgtagtcatttgcatttatgttcttcaagagttcatcatttcattcattcatccagacattccatcccagaacaaactcttatcacctctaccaagaagtagcaaatttattcataagtatataataagctaagtgtgctagctcaagaagcttagaaactaatgttagtaatcgttaacatttctataatgttttataatttattaaacaaatactatgtctatctcctactcaaattcttacttctctatgctcactccatctcattcagtctagtcactggttgagtattttattatccacaccccgtttccttacaggagagaatcttgaagaacaagaaagtcttatacaacattgttcatgatcatgttcagggacttagaaggtgccttacagaagtacagattagtggagaaagcacaggccgttaagtgtttcctggctatgcaagcctagctaagacacaaaacacagtatttcctttcttgggcaatagatcatgttgtatagggctctttaggatgacgatttctgaacaaggaaggtagaaagggtgtgctcaaatggacctgccatttgacacccatatatttttgggaggccactatgaaccagtcactcgtctagaacctgagaccaagattgattaatacatagtctgaatgcttacatgctaattgtccgacattgggaggtgacaaggaaatagtgcctgatactttgacaatgttttcaaacatctctccagtcctcatcctgcccatccctccatattagagaaaccttacctaagaattagccataagagctatgttatatcccttctgtggctgtgtgcacacagagaaggcatccatgtaagttgtcatccctagagcttcctttacattctttgaaattagggcacatgccctcgtttgtgaatgaacacaaaggcagttttgtactggttatataaggtttgtttaaaatctatgagttagtagttagagtcagaggctaccaagccctctccattcacataagcaagtgaatattccctgagattagaaggggagaatgcaaaccctgaactctttaagaggtgtgtacatgtgcggttttctacacctgccctgacaacaattctaatatttattaggaggcatgtattccagaagtggaatcagtgcctcgagaatttaatggagccaatcagtagaactttatgctacagtaaatatccttgctgtcaggccgcaagtagcaggttcgattcccatcctcctcacctcacacttctgggtgttaagtgccaacacacatatcactcctggcctgtccacagagtctgactgagtccaccatgctaatgagatgtttggatggctattgtactctttctttgttaatggccatgtaaaatccatccatgaatctgaaaaaaaatatcttaaaaattggtacagttccttttccaaagaaaagatagacttgtcttgatggagtcttgacggcagcaaattgagaggaactgaaagcaaaacagcctactcaaggttagacagtgactggagtcatttcatgcacttaaacaatatttaggatgaccctatgtaaactcgtattatcacttaaagccggtgtaaaaatataccccatctgttgtgctaggcctgctgttgcttgccacatttctctgacaagctgttacctcagtatagagcgagagtatacattttggaatccggaattcgagtttgaaaaaaaaaaatggtatctggtacatatggactagattctgttcttccaaatgtggatttgtaacctcatttattcttaaagatgatgtgttaaattggggctttttttctttttctttttcttttctttgttttttttttctttcccccccaatatcctgggttgttggtatttgagggatttttaacttttttttttcattacctggagcctggagttctcataattttatgcctttcacatggacaatgtgcaataagagattgtttagtttacatctgtcacatgacacacagagttggtgcgaggagttgtgaatagcatagctgagttccaagccactccatgtagtctgttgtctgtagatttgcaggtattaaagacagacttaggaaagatagtttgtataattgcttctaaacaagtgaatttgaagcttaaggactctaattccaggctttctagtggcatggaagcagccaagagataatctgctttcttagagcataagaggcaagactaggggttatatcctcaggtgtcctgttttcctctctgctgcatggatctgggaatagcacgtttacctcggaattgcaggctagcacagcagtgctggatcactgagcaatttgctcttgtttccaagggccagtcaccttgctttcctgctgaaatactacaaaataaccaaaaggttttttaaagaaaagaaaagaaaagaaaagaagagaagagaagagaagagaagagaagagaagagaagaaaagaagaaaagaagaaaagaagaaaagaagaaaagaactgtgcaggatccttcttaaaatgtagtgttataatttctcaaaatttttctaaacttaggtttttttgtttccttatagtttggcttttttgtccattttgtcatttgttgttttgtttttgttaaatataacctaatagcttgctcaaacgatggcattttatttattattgtattccactattattcattacgtgactactgttttctaaaatttgggctacaaggtctgcagaaatgcaaacaggagtccagcagaacattcaaataatgtctatacagtcagttgtgtggagactttaagcattaagaaaatactcaaattaaaacccatgttgtttatttctccagtcaagagacttttgtactctactttgacgtctgtggtcactgttatccaaggctacttcagactggtatttagggcctaaacaaatcccacacaagcatttttgacaccagcatctcatgttgaaccagcctcgcctctgcattggcacgcatgctgcttcctcctacccattatacatttgctattgaattgaacacatatggtcagtgctaaagctttgaccacaatcacatttgaaggttccactaatttttgaatgtagtttccttatcaccaatttagataactagaaatctggggtaagaaaatgtagttgaagctgtaaactcccccatctcctgccagcagctttttgtcctggtcagtgctgtgattaacactgtccctttgtgagcctcactccctggtgttttcttccatcctctttttggccttgctctcattgatgcttcttggcagttgtgggtttctaatctaatgggccaattgcaattccttccacagccttcacataaattgtctttttcccacatacttatttatgcagtttagctcctcctactttgtctcatccaccccttaagtcattccagttttcctctgttgggtcaagtaccactgtagcccttgtttgctactttgtgagttcttctttattccacctttctctgttcttttccttctaccctttaaccctctaacactagataatcgaggaaaaaggaaagagatccctgaataaagacagcagtcagaaaaggggtgacgttatcattagattttgcgggttggggcatcaagttccttggggcaagtttgatctttgccttcaagatgttacttcttcttcttcttcttcttcttcttcttcttcttcttcttcttcttcttctttttcttcttcttcttcttcttcctacttctcctcctccacttcctcttcatcctcctaattattcttatccttatccttctcctccttccccctcctcttccttcccccttccccttccccttcctccttccttccttactcctcttctgcctctctccctcctcctcctttcttcttttcatacaactacttaactaccaccaacaatcaaccaaccacctctcccagtccttgcatttatctaccctcagaaaagttcccagaattccaatcatcacataatcacagaaactatctgcaggtagcaaaattacaccccagctagtgcatgagacaaattatagtcatctgctgtgggcaatctgacacagtgccatatcctcacctctgtgagcaaaaatgaaactcattcttataatatttctgtgatgatgtgaaatctcagctttctgctccagtcaccatgcctgatgtttgtggtcatcgctccttgccatgagggacttcagtccctctggattcataagtcaaaataaatgccttttcatatgtgtgaaagaaagagagaaagaaagaaagagagaaagaaagaaaagaaagaaaccaaaattccaaaatttcactacagtactacagaactgaaacaaggcttctgcctcctttatgggacttactaagttttgctctgacctatgatcatatctcagcacattataattgactgtgtagtaaaggtaatgttcatatttacctacaacttatctctctttcctaatagatgtataaggaacaagttacttttgtttaatgtttcttatcccttcacaagttccatgagtaccttgacaatcacattgaaatttgtaagaattgacagtaaatgaggaataattatcagtgttgccttcagttagtagggtttcaatatttattgacatttttcttttgtttttgagattagaattttatcatttctccctgtccatttctccttccaaagacaacaatactgtctatgaaaaacataaattcagttctgatcctacaatagaaaatttatacattgaagtgataaaggagaaagattgttagtttcagaattatcccattgccctctttgcttatgaagtagattctgagacttattctacccatttctcttattgtattttgaagtgtgactgttaaatagccattgattcatgttgcattgatacccacaggtgtatttttaatattttgctgatatagggcccagtcttcatagaggtatagaaagctgcacgcctgaattcgctgtagtccttgcagtcgcatttggatatcacacagactgatcatttactagcaaatcccagctctggaaattacagaatttgcattatttgcttcatttgggggacatataattgaggtataaattttcttcagtggtcttagttaacactgccatacgggagatgagaagatattctttacaattgtttatatacatgtacctgcgaagcctcaattcatcttcatcttcgcattttaaatgtttttctgctcatagtttaggattcaagggatgtaacaagtctgaagtgtctgtacacaaatttcactagggactcagaggagtggaaacaaggaagctattccagaaggcagactatgggtttataatcttccatgatgctaatagacagtttccccagtattccttgtcgtagcatttgtctttcgtttatggattgttatagccattattattattttaaatcaccagatagagcatatatagagcaagggtggccatatctacatttaccccctcatgactcagccccctgggcttagtatattgtctcctaggctctagattggcaacgattttattagtttttagaactgtgtctattatcatttggacagatgtggagtttaagaaccccagtaaacgttctttttatcttccccttgctatcctgtggagggagcaggggatttttatctgtaccaattgctcctcctggcaactggttcctataccctgtcccaggcagagatgcccctgtagtcatcagtgggttatctgtgcctctcctcctcaatgggctcttgaattgcttgttttcactggtttgttctctgttcaactgcttagacagcacagcttagcattacttctggatctgctgtaaaaacaacagcagttttctcttctagaactggatttcaggagaggaatcacagccactgagtcaccacacaaggactatctatctatctaagaaggagtcacttcttgcttcatacaaatctacattctagcttctacacctatagcttaaactaagttcatttatttaattaattgatatttttacttcccctccatctcattttaccttatttgctgagaacccataatatgtgatatcatataggtagagtgggacctctcctttctaggaaaggaagtaacttgtaaataacttccctataaatgacaaacatattttaaactatcatggtgttttgggttgttttgggtttgtttgtttgtttgttttttccaagtggaaggatatgtatttctaaccaggagaaatgcgatgtgaagtggacaaattctgaagaattgtattttcttttatagctccagggtcccctgtgccttcaggggattgcacagtcccataaatgactggggatttgtataacaatgtgagagaatggtgaagacaccatccacccacatcagtattagataagttactaaatagttatgaacagctcaatactctgcaatctcagtacttgtccaagaacgttatattccctcacataaacttatattgaaaataaggagacttatattttaggtctttgtgtgatttttaaactctggtgtttgggccattaggcagggtttccatgccagctgctatttgaaagcatagatagtgccggttctttccctcatagagtctgcattctgtggcccttcctgtccttttggcagaatggaggaaatgtccctgtagcatgttgctcttctgcctgttgaggatgggaaatggcagggagctgtgccttttctgaagcgaagcagactggaacacaacccagtctcagtgcagagactcttgctcactgttcatttattgtaatttccttatcttgtatgcatggacgctcgagtgacattccctcaccagaagacgagtaacagaatgtccacccttgcatgttgtctctatgttgtagagagcaccatccacaagttagtatagacaggaactatattcactagacatgtcataacaaacactgtagcttccagaaatatagttaggtacccttgctcttctggaattacctgcaaggtttcataccaactgtaccatcccattcatgagcagtgatccttggttagtgtccctacaataagtaccctctaggacatcagaggtacaatgattttataaagttccctggacatgttgtaccccttgcccaggaggctcctaataatcgttcctcccatcctcaaacacacttccccacttcatggctgtgaacactctaggtaaatgttcactaatttttgataattactgtttctatttgatctttgaagtgttggggatttatctagttcagggctatttactcattagtccaaccactctccctctgagctacatctccagccccacacttcagcatttcatgaatagtcctagtcctttttattctcgccctttatatacatagaaaaatgccctatctctccacccttgcagcctgcattgggtatagagtcatgcattaacataccacagtctgcagtataatttacatcgggaagcttttcatttcgaaacctcagttggttttggtaatgctgaggtacccaaactccagcggaattaactaactattgagctattagtaaaaataagaaggaaaggtaacagaatgagcagctgttttgcatcaaatgctgggtaagcactcctcatgtataaattccgatttccttgctaagtggaatgccatctcatctgataaagtcaaatctggaaccagaaatactcaatacattgtgccattgtggttagcaaaactaagctttgaactctgaagatcatttattgcaaggtctctattctttctcttcatgaaatggcaaaatggctcttctgatactaatggctcaaatcattatgcttatcgacttgcagatgtaatctagaagtagtttaaagcaacatctacataccgacatgctaaacatatgttctcctttgattcctcttgctgtgatgaacacagcgaccaaaagcaacatggagaggaaaggtttatttcatcttggtcctccatcaagggaagaaaagacaggagcttaaaacagaaactttggaggtctactgctcttggcttgccccgggattgctttcagcaacctttcttatatagcctgagcccactgacccaggaatggtactgcatgtagtggtctgggtcctcctacaccaattaacaatcaagaacactcccccccccccagacataccaacagatcagagtgatggaggcgtgtcttcagtgcaggttccctcttccagttatgtcagagtttagccatcacaaatgagtaacttgttcagcatgaaaggataggactcaccctgctctgctctgccttagttaaagagatagaaggattgaaaatagcacttccgactctggtactgttggctgcagcacactgggcatgccttgctgccagagcagcattagtggccactcatcagtctcatcagtcagctttattttctgttcaaaaactaagcatcaaaaacgaacctggatggggcacagaaggagttggtaggaggatagagtaatagagatatagtgcttaactatgacattctcaacaaaattcctttttataaaaactgaaggaaagtggacccaggaggggaaaagagtaagaaagaaagaccctgaatggccccaaccaattagacatgcttcaggcctgtgtcgtatatgctctgttcagagtgctgtgggaaaatgtgtcaaatttagaagccaatatgccaaaactgtagccttgcctccaccactgagtctcgacagcagcatgcccgtgtaggcattagagtgcacactcaagctgcactctatggtacagacagagtccaaagctcttagtaggctgtccttttccattacatgagaatgtgttggccagtaggcattggaagaggtgtggaatcctcaccttgtaacttaagctccctagaaccatacatttcagttctttgcattgagttttcctcctttgtgtcttgtgcatcggggttctctccatcctccaagccagtttcaggtttaatcattgccatgggtgtgatcgtaggagaagagtagaaacagcaaaggttcactggcttctgggttgggctctgtgtggattacatgggtgactaggatataatttttagggaaaagcaggagaaaaggcagagtagccaagtatggtggcgcatgtctttaatcccagaacttggaaggcagaggcaagtggatctctgtgagtcagaggccagcatggtctatagagagaattccaggacaaccagggctacagagagaggccctgtctcaaaacaacaaccacaaacatttgtgagaaaatatggccttgattaccatattctgatggtatatctcttgaagataactactcaaaaacaatatcttacaattactcagagggaactgtaaattattggaacaactacagattatttaggtaattcaggatacccaaacaagaggcaggttctagcaaacctcaaaaatatttaatctcccactgtttgctcccacttctgttttgtttgtttttttgagacagggtttctctgtagagctctggctgtcctggaactcactttgtagaccaggctggcctcgaactcagaaatctgcctgtctctgcttcccgagtgctgggatcaaaggcgtgtaccaccacgcccggctttgctctcatttcttaggtagtttagcaagtagagaacacacaacagttactactcagtttgatcagggttgagctcgaagtgtgcttgggtcagacaggtgtcttccacttctcagagtctaggtaagattctgggatagtttactaagagaccagggcttgtttggggaatggcagactctcctgtgcctaactctgaactgttaccattcaaccaactgaaacatgaaaagctatttgaaaaattcccagaaataattattttactttttattgtttctagtatacagtactatagttcagttccaggatctgcagaggtcctctctaccaagcccttttaccacattgctggcttgaaacaacaggtcttttccactctgaataaggggctgaatgaatgggtggctgagacactttatacactactgtagcaaatgaagctctttgtctttccattgtacattacacatttacttttgtatgacttattttatgtatatgatacactgtagctgtcttaagacacaccagaagagggcatagaatcccatttacagatgcttgtgagcaaccatgtggctgctgggacttgaactcaggacctctggaagagcaatgggtgctcttaaccacaaaggcatctctccagccccacattatacatttctgtagctgtagacatgtcaagagtaagttaatcctgaatcttaaggagagaaaaagatgcaggaaaggcaactagaaccaaactagagacattaatttgtgagtcatctgatggagggaggaagtttaacttttccccacagtaaacatgggggctggtcatttcttggcttgggagaaataagtagaaaacccaatacagttgtgacttctaacttgaatactgaggagcaggtgaatttgcatatgaccataaatgtgtcacattctattccgtatggtcactttgtacatgatgttcaagctgtctcctctatgggacacaaagttaataacagtcatggctgttggatgggctccttgttaaacacactgcactctgctctctctccagcagaggcgttctgagcatctgcagcccttgctctctcaaggtcaccaccatgaccatctgttaatatgctctgctgagattcagtcattcttctctcatctcccctcaggctgtcagctgtcctctctgctgggactaagcggcctctcacagtcttccccaccaccttcaattgcttattggttccaatatcctctggtgtgaggaagaaataacaacaaaatgggcacttgactcattggtgaataggagctgtaagcgtaagagacaagcctgcccgagcatcagtcacagaggaaggcttttgctttcaccattttacaaagagagctgtagagactgtgtttcctgctgcttcaatttctccgcctccttccatatctccaccatcattttcctcctctttctagttctctagaatgtcttgaaatgtgacagctacatactgtcaccctcgctccgtgcagattttgtttttctatcacaacaattggaaggccatccctaaatcagatcgttttagattgtctctgttctcggtggctttaacaacacagtgactcaaagctgcatacagttggcagctttcagccatttatttggactaccaagcaagaatgctcacagcctttctgatgaacgaagacatctttatttccagttcacacccttcatcataagaagggtatttgaagggaagccaaaaagcatacttctcaaacttcatgtttcacatgcttgcaggaattggggataattccttaccccagcgtcttcacaattgtgcagtagaaattgacagtaatgtactcgcggtccaccaacaaagagaaaaactatatatgcttcatttacttcataggaaaagcttcagttttccacaattgtatttttggaagtgactagtgtatatactccatggagaggaacaaacttttttatttttttcattttatttccttactgtctttgaaagggtctccattctggaggccaaaatagagcctctgtaatagttaccagaaactttttttgaaattagaaaaactatgttcaagaaacacagatcttattccatgttagtgaaggctacaacttgggggctggaacaaggagatttcctgcattggccaaaacttaaagagctaaattgagaaccctatgccatcgctgctgtctgcatttccctctgtgcactgggaaccacctagggtctccaggccttgtttcgtggccaggacaagctttgctgctcctgaaactgcactttctttccagaagtctcctctccacatccaagaatggccatgtatttgcacactctttgagatggctttccttgtattgacttatatcactgacagtatgaatttattttgcaccttgtctttatgatctataaaccttctgaaggccagatctacttctaacttacctgattcatttatgggtctgccccctaatgtacttttcaaaaaagtacacatttatgggaagacacaaggatggattacttctagaaaagtttatattgcaatccctactataacaatattaatagatattgtcacaggatgtcatgtagcccaggctggacttgaattaataatatttaaaactcaaactcccaaatccttgcatgcaggcctgtcctactatgtggagctgaataggcactttggacttgaatgccttttgttgtttacaaagttcttttacgtgcatttctgtgtagttcagcacttatcctatgctatgcacataagtgtgtagtataaatgtgtatgtgtatccattttgtgtctgtgtgttgcttatattgaacaaactcacacattcatatacaagctgagttctgtaagggagaagctgctatgttggctgctggagcctcacttcagcacttggcaagaaggaaaagctcagggaggatttgttagctgaaggaatcaagttattacctcgttcaggcttcaccataatcatccaaagtgcataaagtccatattgtatcttgtgtcttttcaagttaaaaaactgagtcccaaggacctgctcagggtttcaaaggtacacagtggccaaacaaaaacttgaaccctagctttctagatccataacctttcttcactgacttctgggaattttctatattaatagcaatgcatgaactatctcacgaggaaaaattgcttccaaatttaaatgcgtgatgcatatgcaggaaatcactgacttttcaatccaagggtaatgcggttggtgtgactttcagggaatagggctttcttttacccactcttcctgatgggcatgtgtcagtgcacacaaatgcataccatacatccctcacttcacactttccgaggcttcttaattcctcctcaggttctccatgctctggtgtcttttatagcttctgctggaccaggcacccacatgacatttgttattgggatgtcagcaagtgtaaagactgtgggaagagagaaagctgacccatctaatgtagacgagagcctggtactagtagaagtttgcttccgtcctgattgtagctcatggcaggaagcagagtaaagcctttattgatgactaagttgtattgaatattacagcatgtcactaatcgccacgagaccctaatggaataccattcttactgagatgggagccaaggttcagcactggagagaggtgacacaaacaccacagccagggaagggcggccttaagccctgtgcctagaacacacgaacccttacactgaaattggccgcatagtgtaggtgtttgcacagtcactttctcttcttgggaaactatctcttgtgttctttaacacatctttgtaaatgagaaaaaggcacacagtgccctgagatcacagtaaaatacaagggaactatattcatttcccatattcccatattcagacagacagacagacacacacacacaattgaaaaatctttaaaaggattgctgtggggaacaaatgatgtcctacgtggctcagcagttgagatctcactgctcttgaaggagatgtgagttggttcctagcacccagggttgatagctcataactgccagaactgcattcccaaggagatctgacgccctctactggattttatgagcacctgcactcatagatccctcctgaccagagtctgtctccttgcccatctccctgtctctgtctttcatagggaatgttaaaataatctgataaaatacaagagaaaagtaacattagcttttaatctaaagtgcatgtgggtagggtgagtcactgaaaattgtacaaaagagatcttaagttctgtaggatgtttcaaagtctgtggaaatgcagtgagtagcccaggaactctgtaaaagcctattttggtgctcggggtagacagatggtaataaggtaatgggatgtctagtctatgcagattcacaagtctggttctgcatttgaccatgagtcaggccttggacatggtttctccatgtagacttatttctttctcttttcgtttctcataaatggctacgaagacttgctggaagctgtgtgtggttctttttactgaaattatcatttggggaaacacttgttctctaagacttactgaactccaccccacaaagcatgccccctactcagatgtcatctcctgtacatcatttggaagatggattattggggtttcccaccagtccccagctcagtttctatttccaaattccggctgccagttccatacttggttaagatcctgcttctgcctggtatcctagggaaacagtttgtaagggctgctgtgtccatctgccttcctgcctgagtttttgactatacaccctgattatttcctaatctagaagtgaatcacaagactgcaaatgcagggaacagccttgaaatatgttcagagtgtgaatacttacagagttaggcctgagagtgtagagcaagacacttgcatttgtgactctacttatgtatatatttataggcactttgataaagccaatgtaagtgcatacatagttgggctgtgtatcaagaaatcttaatttttaaatgcagagacattacaattacagtgtgaacatggacctggaaacctccctgcacaccattcccagtcagctgtgacattgttcaagggacccttggcttgaagttgtcaagataagataagttggttagcttcaggctgtatctcttcatctacaagaagcccatcctccacttgtcatgggaattttgagcctttgtcctagaattttttttttgaccaaactaacttgttaaataatatattctacagtcttggttttatactcctagatacataggtattataccatcagaatcataatttggggtgtagtggtgaatgtctgaaatcccacacagcaggatccagaggtcaggaacattatgagttacaaaacaggactatatcacaaaagcaaacaatgtagagtaatataagcagtatcctagacagatttgatttttatatcaataaacagtcttctaccagataaatctgtatacttttcaagctttgaaaagtttgaaccttactcctaaatttccatccagcacacttaatatgaacagcaggttattaaaaatttacctatttggcttgtaaaactttggagcctagttgctaaattcaccattggacattgttggaagtcaaagatgagcagaaaagaagaaagcataggttttgacatttttgagcacactaaccttgtccttgtagttattctagccagtacaatgctaagtaagatccagaagatgtagtgagtaggtgagctgggcctctcactggaagcttgtgaataaaaatgtttggaagggtagacagcctaggtcttatcatatccctagcattagagatggagcccttagcagctagaatctggtgtttcatttaattacttttcaaaatgccgttaccagaatttttatgtaaatacatattttattccctgaggcatgttaatatgaaatcaaaattatacaacactgaaaggaaaacacaatttcctttcttttcaccaggtctctctaatgtgttgttgaaaacatgctataggatggtgaagatgctcagactgtgcctgtgattcctgaagtatttatactacagagccatagcaccatgtcatcatgatgatcgtcaggcagctcacagaatgcagttcagtagactatgggcttagcagtgatcctgagctcccactgtaggaagtgccgctatccttagggaaacaggccctaaattgacaggcacagagctacactatgtggtattcagtggttgatgactcaaagagacatggctatttcttattatatgtttatatgtcaaacattgttcgtctgtcttgttacccacatcattcctagaacagaccttgcatgtgtggctgctacagttatcttcatttttagagggcactgaaccgtagagaaggtgagttatttgcccaaggctatacagttaacaataattgagttttgtgatgtattctcttgttctattctctaaaaacaagctgaaaaataagttatattggatttgacaggttaaaggacaagaacctgaagactagtggagcaaccctgcagtgtgcaaaggtgggggcgggatgtgcagtgcctggctcctggtgttcatagtaatagacattacatgagcagtggatggcctgggagtcaaaaatgttctcacagctggtgttgagagcatggagtgagctgatctggaacagagagagtaggtgataaatacaatgtaaacacccttagggatggcaatccataatgaagaaaccaaaggtgacatagttcattccttctattggttaagtagcagctgttcttgtccctggtcatccttcagaacttgctgggaagctatctaatactgttaacgcctggtcctcccctagtcacggagataatggtctttggggtagaattgctgtgaattcagtctctagtgattctggtgagcaggcctggctacatgaccagcttagcagagagattgtatcctgtgtttgacatcagaaagcaactgcttaaaaatggcatcccaagagttcccatgtacaaacccaaggaagcctaagcatttccccgctggtcatcccttgctccagcctgtgagcctcaacaggcaggggattcaggttgcatacttcttccatcccctcttgggatacttattcagtttttctttaaataatttctggtttgtcactttctagaaccttttatccatgcctgattctctatgtaattatgattttgatatagtcagggtaatatccccttggccttatagtctagggcttggggtcagagccaaaatgttatcattcatgacctatgtaatgcttaatttcctcatccatatcatgggggacattaactgcatttgcttcacaggaagttctgattattaaataaaatatttggtccagtgctctccacagagttgccagtaaatgtaatctttatgattgtggataataacatgaaacactgataatgaatctcggcaagaaagcacttcctatggctgactttctgtagattccagcctctaccaacgagaatagaagatagaaaattctaggttcctttaaggtaagactctgaattgtcaccatgccttattttgcagactgacctgtgatagatgtttctgtagagaaaccataaaatattttgatatagtcactcagcctaggacgtctagccctaggatcagataaccttggaccaaagtgttgcctttcatgacctatgtcatgctaactttcttcatctatattatgggatgatacccttagggatggcaatccataatgaagaaaccaaaggtgacatagctcattccttctgttggttaagtagcagctgttcttgtccctggtcatccttcagaacttgctgggaagccatctaatactgttaacgtcctggtcctcccctagtcatggagataatggtctttggggaagaattgctgtgaattccttctctagtgattctggtgagcaggtagtataaagaacttgtggcgtatacagacaagattggagagcgtgggaaagtactcatggtgccacacatggtcttaatgtagcgagggctgcacaagagtgcaacaagttacatcgtggcttctgctgggtttcttatctatctggtgtttgcaggaagtttgaaacagcacaggggaaaggggaaccacaacatcaaggatgtgaaagctgcatgtattcaagcagggtttgggcatcagacttaaactaaggggaaaaccaaaggaagctggcttgtgtgtggttaagaggaacaggggtgctgattgagggcctcagagtcaagctctccaaaaggctctctcttagctttgtctttaggtgtgtgcccactcctgaactcaccaggtcacagcggataattccaaagtcatacagatagcccaggataatcccaaacaaaacaaaacaggcatccgtttagttgtgcttagtctttcttccccatgctttctgcttatttccagtttctaagagacatgttctagttcccttctgccttgttcattctgcagatgagcaaacagtgatgacaggttctcatcctcggtctcctggctgcctgtgtcctggaccatagtctgctctaactccaagtacagagatgacagaccaactttggaatgtattcaacttccttgctgagaataagtcaacatgagaactggtgttcttatcttcaagaataactgacttctcttctttttgttgaccaagttcttaccttaactgcccccacataactactttagaagaacccatgaccttgctgagaactgctgcatgccaaggaagacttaatttcctctaagtacttgagaggagaaaaacaataatctatatgatgggcttttggctgaaacccatatcctctagaaggtagaacttggcataactcatggtctagtttaaagaaaaatgttttgttctgatgtcatctgcctaattaatgtaaaagaggattgaatttttcctatgcaatgtcatttagccttaggttttagagttaagtggctcagatcaatcctggtcttttgaggctttgtagatgccctcagttggagtgacctgcgcctggtatttataaggtggtgtactcatgacatgggagcagtacaggaatgtcccttctcacatttgcttgtccatgccttcgtatgttgaacagtacctacatgccaggataattgaaggagggtattagaatatacagaaaatggaagaggagactgtgtagcaggggagtcatagacttactaagtaataatcagtgtgttgatgaagaagagagaaagcttgggaagataagctgttgatctggctggatttctattttttaagtacaaatgtttcctatggctcgtgttttcaataagattgtattaaaagcctgttttcatggtgggcattccacttaaggacaaaatgaggaagcatagaggtggtccctaccttcaaggagctcacagtctattgagttgcctttctgattctcccactagattgtgagctgctggagggcaggcacttgaattcatctgaaaaggtagatataattcagaatgaagcttgtgtggaatgctagctctgttgcttgttttatgatcgttacagctacttgattactttggggaaatgaaatgtagaaagattggatgagcaaaggaagagacaggttaacacagttttctaccttaatgtttgttgggactcagtgaatttcggctgcctggctcatcccttgatgcctcaggattgggaggagtaaaggttgagatctgacatctagtttggataagcagcagaccctgtctctgcttggtcaatacttataatctaggctgtaaggtaagagccagggaaaggcttgggctctgcccctcaatcccaggaatctactaagcacacgtcagaaccaaagtcaaaagaaaatgatgaaatttactctctggccaaaatgctattatttcactgaggagaaccaagtttcttggcaggacatgttgatttgattgtacttatgtaatcaattgtatttgcaagtggcatagtcattctcacaagtgtcttaaaggggaggtattggctatctctgctctctgcttgaaacttttcagagcatttttacaattcattactcacttgttccaaataaagtctctgaagtcccagtggtaggagttgtcacccttcacgatagtcactgtttcatgaggtatgactaagtcccagaggagttggtgactagcctgaagtcttatagcacattgtgcttctacctgtttgtggatgatatgctaatggctcagagaaacagaaagagagaagtgctaatcatttctatctggctaacacattgggaactctgagcttctgttctggcttatggtttagaaattcagaacagagtgttaaagattgcttctttggcttatgaaatactgtcttctattcctgtgactttgacaaggtaaaccttgtcagttacgagcattatctcccattcagagtattgtcaatatttatgtttaacaagcacttaagtcattacatattgttcctagcagccattcgtgtccaaacctactttatacataatagaagcagtgtactcaagaataggaaggtgacatgtgggaaggttagaatgtgatcctctgatttctgagtccaattttcttgcatgatggagcatctctgtcccaagatcttgtctccctgctgttgctgtttaggaattatagcttggaaaaaccaagtgtaagtttgctgtagtagcatgaagtatctgttgatgtaaaaagaaaaatcacacattattcaaaggctctgctcatttgtctaaagaaatttattacctcctatttctcaaaaaaaaaaaatctattcagtgtttcttcaatgcacacattgagatggagaagctggcctaattccacattcccttctctcacaagtaatgacacattctaaaggatgctaaataggttgtcagagacgtagatgggttctataaatatgtacccaaatctcagcagtcaaaatcacatacagagagaggcctgcctctgtgaccttgcttgctgcatcttccttcttccaggatcactatggttgttaaaaacacaaaggcccagagccaaacagacctgcattcctagttacacttcagctggctgcttgaaggccttggtctctgtttcttcatttcagtgactttcatttcatctttctatgtgactctttatcaccacttaagcctcttgaatttatatatttcttagaaacagtatcaacttcaccttaatgtcagtttaaactgttgaaccctggggtattctatagcatgtgtattcttacttctacattcaagtgcttaccagtgcagtatctgcccatgtctgatcagttcatgctatttggagtaacagatttcacctttagttatgcatagactataacaccatgacctggagcttggaaagagaggagggaaaatataccagcagtgacacacttttaagtttccccggttgtgcaatggcaagagactaaggataggatctttcttggctgtagtagctagcattttctgcttataccttggtgctttctgtccccattgctgaatgagggcaaaggggaaatacctaagcagggaaaacggatgcattgcaagtatttagagtagaccttgccttagcaaattttagctgttatggttttgggtagatggctcagcagttaagagcacttaactcttaagctcttccagaggatcctcgttcaatttccagcacccacgtggtggcccacacccatccataacttcagtaacaggagatctaataacttcttctgacacccacgagcatcaggcatgaacatggtacacatacatacatgcaggcaagacactcatacacataaaataagtaagtcttaaaacaattaactgccatgttgaagaatgccagggatgggtggtagtggtttgtaggtccttgttgtgcatcttatctgcttgcctgatgttgcttctgctccatagtttgttgaaaaagaaaaaaacaagtgtgtgaagcagatgaacattaaacacagggaaacaggacctcgagaagcaaaaccaccgtctaatagcatttggaaactttatggagaaaaatctagagttcttactggtcaggctgctgtgtccttaatttatatatttctataatttccttgttaagagaagaggaagagggggaaagaaatccctgactcttggtcactacatataattgtagaacaagttttagaggcagtgggtattgaattctttcagtctgtctgtataacagtgttggtattatatgaagatgcctcctaaactggaaagtaggtgcctaggcagtggatggagagtgtttcagctagcttttagataagcacttatctaaagtcaggacataaaaatactttcacgactctatgaaaactgccaaaggagaagataaaactaacccagattccgttattacactctcccccttcccccgtggaagcatgaccatctcagtgcagtcctggggcacccagatttctccaccccaaccttccccctgcatgctgagttcttggcatgctcatttttctccagcctctcattaaagtaatcactttaaaaaatcagcagcaagagcgtgcatttcggtgagtaatgtttggcctcgtctggaacagctggcctgctgtgccacggtcctgaggtgatctgcagacagctcactcagcagcctcctgtgggttgatgctatcagcagacactttccaccccttcactaaaacaccctgctggcttcctactcggagtggacagtagagcaaacaatgagcacagagacactgagggacctgaccctgcgctgacctgaagcaattaggctgccagcctgatgcacctgctttttctccttgggtcttcacctgagatgccatgtgtctacatgcccaggtgtcccacgtccacctgtctccaggacgcagttcagatgttactttctcttatgagtgtctccccatgaccccaactgcaacaccccttttgctatgaagaagtgtaacacttcagtacagtttgctttggctttgtagacttttctctcattttattttcttttcctttttttttttttttctctatgagaacagggcccatatctcattagtctcttcagtaaatcacctgctatgcatttggttaatactctcataatgattgtgttatttacaatcatcttgctgtaattataattgtgccaaatgaaagcagtgtgctctccacatttcttgtttcctgctcatctcaaaagcctctgtggatagttaagaagcctcgtcttgaagcgtgaaaatgttgaatgacctggggcggtggctgaactacttgtaactcagaaaaagaatagagcctgggggcctggtgagatggctcagtgggtaagagcacccgactgctcttccgaaggtccaaagttcaaatcccagcaaccacatggtggctcacaaccactcgtaatgagatctgatgccctcttctggtgcgtctgaagacagctacagtgtacttacatataataaataaataaataaataaatctttaaaaaaaaaaaaaagaatagagcctgggacaacatggattctaccccctactcagaatggagtgatgaggctcagaaaacctccagagctccatgttgttcatgtgatgctacatttgtagccgtaggattgttacagcgaatagatgtcattctgattacactgctgccctgggctaccttccctgtctctaggggtgaaaatttctacaaccactgcattttattatagatcctgtttcctccttatcccagttctgtgatcttgaacaccttgccttcattatttcccagttgctcatttgtgaagtatcaaaatacttctcatggaaaatggcaagcatggagtaagaaagctgaaggccaaaacagcaccagtgatattattccagggctggagacacacgtgctccatagtgagcatgcacgccactttaacagagaacctgagttcactgcctcgcacccacacacggcagcgcacagctacctgtaactcagagcagtggagccaaccttcctaatgctgtgatcctttcacatagttccatatgttgtggtgacccccaaccagaacattattttgttgctacttcataactataattttgctactgttatgaatcataatgtaaatgtgtggtattcaagttttttgttatgtgacctccaaaggggtcataaccctcaggttgaaaaatcactgcttctgagggacctgctccccctctttctctctgtctctctctctctgtctctctctgtctctctcannnnnnnnnnnnnnnnnnnncacacacgaaataaacagataattaatactgaaaaaagaagagggagaaagggaaccagctgtagggaagaaaccaataaagttaaactgtaatgatctaaatgtatgaagatgctttaatgaagtttatttgcatgctaacttaaagaatactttttgaaagccacaaaagaaatataaataaaacctcaaaaatacatactttgctgacttatttcaaaagttaaagggagaacttatccacaagatagtgatttataaatattacttttgcaactcccaggcattcacaaagtctttccataaaacagtagtgttcttagaaagtcaagtcgttggaaaatagcaatagagacagaagggagatgccttggtgctggcttattagggctttaacctcgagttaatgacactcagcctatggggtgcacagactgaggaggaacgctccttcttggtccagaaaaagaactcttcagagggctggcatcagcacagccagacttggaattcactataagaccacatctgtctggaccagctgttgccggtctgtgtacactcgccaagaataacagcaatgattttcactttatagcaacttccatcttgggaccgcagaataatgcatcagtgtagattagggctcccatgattcttgacaggaatgggcatgcttcacagagaacggggatgctctcatccacagcatgccgctcttctgggggagccttctggggtgcaaagaggcgtgggccggttctgagttagacctgcttttctgatctgagctttcctctgttgcagcctccattttcaggtaagcttgagcagcacagccccctcctcaatgctcccatcagccagcaaatgatctccagtgtgctctgcttctgtaaagactgcaaagtatggcaagcctggagatgccgcctgaattagcgagggcctggttcttacagggcgcaggggagttccctgatagtctagccatccttaggacagaacccaacaggaaatcttctcgtcctgctcattaggagatggccccgaacttgagcttttaatgtaaaaaagactttttacagtttttattttcttctcttctgagattagcattgatccttgtgtcagatattgatagaggagacagcgtttgaaaagcagtttgattgtgctgaattttgaatgaaactattcaatctggagaagtttctcagcagtgggagcttacccttcacagacgctttttcactcttggctgtcatctccatgcaaaaaaaaaaaaaaagtattttcacctaagaaaatttctattgatgttactttatactatataattttaatcccttaagactaacagccgtcctgtgggaaaagtgtaggtgggttggaatgctgggtactcttgtggtacacatcagtcttgaggacacctatcaaggtacgagtgacttagtttcaccccttggcaagacagtgtgattgcctatcaaaggtgcttggtgattaaatgagttatttaatgtgaaatatttcgaatattatctgatacctgctatatagtgccctgtagctactttcagtttcccaagttataaatcaatgaattatataaatcaaactctaatgtatgccgagctcatagaagtcatgaagacatgtctgtgggtacatcacatggctggttgatcagaagtggcagagctcctcgactttatgttcaggatcagttcctatctccccgctccctgcggtgttgatggatggcacttaagtccttcatgttctctcacccaccttctgccacttttgaaagacagccatagctcagatttgacaggttgtgtgaacatttaacacaaataatcatgaggcactgttaaatactagcacatgccatgtatcatctgcataccactcacgatggctctgaagtgcctgttcctcacgtcatttatcctcggaaatgtgatggtaagtctaaacacccccaccccaccccacccccgccgccgccaaagtaaaataaaaaagaaataaataagaacagtggagagtaagtggtgtgacgtcacactgctctgccccaaagccaacactttctccaccacaccacaatcagtgtttctgaaagcaagaagggccgcattagtctccagcctctggtataattagcatcaggctttaatcagtgaggttgactgtcttgattaacctttatgatggatcatgtaagtttcatatttctaaatgaatatataaagatagctgtaaatcagtgggaaaacactgagctaagatcagaaggctcataggtaactcatggctctgctgctccctgggtgtggttttattcaaatcactccctcccagataggccattaacaaaccactgatttgattttctgaatgaggaaaggtgagggtggggaagaggatggaatggaaaaggaaaccccagggtcatgatgtgacagtaaaactctggtgtttgtcagtgttggaccaggttgcttacagacggtgaaggagcaggaaaatccaaagaaaatttaatcttacagtgtttaatctctcctgaattcttttacaccaggtcctaatccaagcccctgatcctcttgtcttgtttaggccacaagaacattctgtcctcttgaatccacattatctaatgatggttttacaaaattgccacagcctgggcacatttaacgcagacactaagttctaatgtgccacagggtacagtggcttagatggaccatcttacttaactcataagagctagagaaagtacccaaggagctaaagggatctgcaaccctataggtggaacaacattatgaactaaccagtaccccggagctcttgactctagctgcatatgtatcaaaagatggcctagtcggccatcactggaaagagaggcccattggacacgcaaactgtatatgccccaatacaggggaacgccagggccaaaaaaaaaatgggaatgagtgggtagggaagtgtggaggagggtatggaggacttttgggatagcattggaaatgtaattgaggaaaatatgtaataaaaaaaaaagatctgttaacacacatttatatcttaagtaactaagacatatttatctcaatctctaaatatcttgctccacgtgtcaaatgttgattagtgggtatggagttaaagcagaagtaagaattgtctatctagaatgcaggcattaagcgccttagccacactgattgcttttctttgtccttttgttttttcttcacatgccttgatttcctgaccaaattctaaactgttaagctagacagatcacagccatcatgatgtttgccctgatactgcacgagtccctaatatttgcgcagccttaaatcactaatttaatgcagctttagttgagcttgcagtttgcctacggtatagatacctaagaacaaggacttttcactacttctccatgttctctctgtccagttgtttatctccccacaaggctgaacttttgtgatttgcttttcattggtcaaacaagaaaacatttttttcctgttattccctcttaggcaccttggttacattcctacaggcttgggcattcagcaagatcacctgtcagagggcaaacttgtttgtagatggtggcattttcacagaacaaagcattggcctttctctgcctcccaggtgccttgggttgctgagcaagacacctctctgactcaaaagaaaaccacctccagttaggtgaaatgtgggggggttaaccatttgtttgctggtttgcgtttcccacgaaaaactcaaaaacagaaatttacctcagccatggaaagtgatgtgccaagcactgtatttgcatattaaaactgaaagcggatttgcatgttatttcagtgtcttgtgtcacgttcaggcatctgtcaatcccactagctagaaacaacttgtgtagtgggaaagtgtttctgtgcatagaagactgaaaagctcaggcctttcgctttctcaacctgtcctcagtctggattcccttggctggcctagtctcataccgaaaactctgaagaggagactagaaccctatgctttgaaaagtacatttgttattttccaaaagccattcactatactatattctaattaaatcattttaaaataaactgcttatattccatcactgatactttgctgggcttctaggattttgttttgttttgatgttcatagtcagtttctcatgtatgttatacactattttaatacactctgaaaattataatagcaagaaacatgggcaatctaagtacctaataacaagtgactaggggaaactcattttaaacaggcagcgtgttagaaacaaggccaaggctacaggacaggtaacagacaaactatggtgtctgtctcttaaaagtatagcttcttcccagatgcagtggtacacacttgtcatgcctgcacttgggcactgggtgatggtggaaagaggatcaggagattaaagccaggctcatggcatggcaagtgtaatatcagccaagattttatgagatgctgtctcaatgaatgaatgaatgaatgaatgaatgaatgaattggtgtaacttcaaatcaaaagcatccccccatccctgtactcctaatagaacaacacatgctatgaaatctttcttcacaacaaaggattaaatagctactgcactttttcaggccatcaaaataagacgaaaccttttcctctagaaagccattgctacctacgtaggctataagcaaggaaatggtttaatttgaaaatgcaaccatagacagttcattccatccattagaattccatgtcatccgtctttgttgggtgaaaataaatgaagagatgtccgacatttgtctacccttgttaatggcaaatctatttccatgaggtatcaagtctaactggtaggctagagactatagtgattttccccatcctggttttataggaataggttccattagcctcctgcagaacaaactgagagggatcctctcactcccaaggtgggcttgcttcctcctcaagaggcaccctgggaggcataagaacagcagcattaggggatacctgtggcacagggctgtgtcatcaatttttctgcatctgttaatggaggtacccactagttgttttttttttttttttagttcttctctcctggttggtgtggcatcattatttatggcttagatgcctggagaagcaggaaagggacagaaacattactccatctaacatgaactttatgtcactgatgtatgtttcaatgtcaaaggtattatatataggaaggttaaaagtttggaggtccaacaaagcgtgcatttactaacctcagtattaggaggcctgttttcaaaagtcctcataattattatgtaaattggtaaaacattctctgaaattcaagactatgaccctgacagaaaggtgggggtcactgcaaagaccagtgagcaagcgcttcactttgttcttcaagaagagcatcgccatggagctctaaatctcttctctagtaactgagcaggtagacttagtacttactatacagtgcttctttgtatgaattagataaattactccagcttgtaaatgaggaggtcagtaatagaaaagcaaattcctaagtgattaaaagatatcaggactcaaagtcagcataggcaaccttgaggcaattacctgtgacgtgggagactaagggtggtaactgtggggcatgagagccactttggcttgttagatggtcacaaaaccttggtgtcctagcactgcagctttctaatagatgcccagccttgcccttggatgtagtagcttttcagtaagcccatcttgctgaaatacagattcataggtcctctcctgtgactgcagctttggcttagggacaagagtgtgataagcagccaggtgtagtggtgcacccctttaatcccagcactcgggaggcagaggcaggcagatttctgagtttgaagccagcccggtctacaaagtaagttccgggacagccagggctatacagagaaaccctgtctcgaaaaaccgacaaaaaaaagagtctgacaaaaaagaggttgtgggttctgcctagcaataatcatgtggatccctctcctaccacatgacttctccatggcccacccctgaaacataacaggtatcccagtggaccctctgcccttggccagaaaggatacgtcatccctttacccagtgaggcattaagagtcaacctgacatctggtaagaatctagaagtagaagcagccataggaaattgagaagtgaaaacttgatacagctaaatgctggggggtggggaggggggctatcagaaatacagacttttttttttttctggcaggctttcagctttaaaatggggctaattctaccttttgaaaagaagataatttcaatgtttctttttacaagaacatataattgaagtcattttccttctgagagaaggaacctcttgtacaccattacaaatggacaagaaaaactgcgcatctttgctatccaaaatgatagagtattcattatcatggaatctttcagtacattttggctgctttttcctgcagttttatttgcctgcgcagtgctgttctggtaagattcagattcactaagttcaattgtgtagtactttgtagataagaaatcaacagcaggtaaggacacagaggaaaaatgaccaatagcaaggccatcctctgtaacctgagaggttgatacattggcagttagggagtgactgattcatcacatggatccttagagcactgagctacattgctattaggaagcttcattgaagcgagggggcattggcctgggaacctccactaggcatctcagtgagggctctttatcaagcattcccgttcttcagaagatatgggtcccagttgcacatacctattatctacctcttgtgaggctaaggcaggagggtgacagctttgaggtcagtttgggctgcctagataggttcaggctagtttggctacatagcaaactctgccacccccacccccactcccaccccccacatatgcccgttggtggaaactttccttctctgtgtaagaacagggcaaggaggataaagtggttaaccttcctaggttcttgatttcggaagccaggcgtagtgaaagttcagtaggctgcagaagccctgcaggctgccccgtgcttactcagactcagaacacagagtgaagctccaggtgcttcagaggatgctgacaagtggtttatgtcttcttataatggaaacctctgtactaatgaggtttccactgactcagtgtgcatctatttttgcagacgacaaaatatctctaaatatagagacatgttatttcactctcaaggtggacaatgacacatgctatattatcgtcacaaacacatggagttgaagaatcaagcaatctttgagaatgtatttctatgcatgaagaaactgaggcccaggaaatgaaaataattccgtaaagacctttagtcaagttaaagatagaaaaatattaaagatgccctgaatagtcggatatttgtgatcatgtaataatatacttaatcctgtataagactatgccaaatgcttcaagcataatgaaatgcaatgtgactatggtggatagcagttgctatttgccttattattattgtggcaatttttcttgttcagaaacgattatgtccttttgtatttttttcattattatgcaatatcacccataatactcccataatacttagcaaaaaagtagacttgcatatgactgtacatttggcaccatatgtcttttctaatgacagttacctgggcaacaatgtagcagtgcatatcagaccaagtagataattcgatcctttatctgacacacacactcaaacacacacacagagacacccacacttggaaatagacaaacacataaatagaataataccactcagtttcctatgacttttcagcactggccttttagtttatcagtttccatgttccctcttacagtgtgaaataactcagcctatgagatagagttctcttcattttccagtaactgaaggactaagcccctaccttcttgtgcctcacatggcaacttcaaactgggaatcagagatgctttctgtgtgcctagagacaagagagcaagttgagccaccacccagtcctgattgcatttgtaaatagccttgcaatgtaaaatctcatagtgttctctcagctaaaatgaagacctggcattggctgctgtcttccttacagctctttttccctctccatttcttccgtatgcagtgttcctgtgtgtccttccttttctcttcctttctctgtcttatgaaatctaatctatccttcaaatacaaagattcttgtcttcagcagccttctcctggcacatgggaacatcggaaccatgcctgtatcttagtctctacacacttttgtgactatctaccgtgggtcttattcttctacaactctttaagttgtcagaggttgaaacttttcattgggattgatatttgcagttcttggcacttagtaatttcttaggacgtgtatgttaagaaaagtttggagttgtctgaaacctgtccacttgacaactcacctgcctatgatgttcctatgtctttactaagtgattcatacatttcaaagaacacacatactgctgattaatatgagtatttaaaagaacatctccccccccccccagaaaatgataggctgatttaatttgttccacactgagcagtaaactttcttttatgtacataaaaatcttggcttatactagagtaaatagatataaatctaaattgctgttaaatactgcagctggaagggcttgaagacaccagtagacaacattgagaggcattgcattgtagcacatatacaaacttggtccaccgtggagtctgatctgctgtttctcagagatggtgctcacttacccacttgacctgtgcagttttcttatccttaaagcagtttgcctgtcaaacagggcatctaagcatctaagattagctaaatgtgaatgcaaacatcctggaaacagtcatgcaagcgagggatcctggaagcaggtaaacatttcaccaccactgttcacatttctacttcagaagcaccaactcagaaagcagtgggagtcatcccatcccagtgactcgttcacataatacaattgaatgcttttaccctaaactgggctatgaattgctcatttgaaaattaatgagttgaacacagctgtttggtgtcctttagacatcatgagcactaatctctattagaagggagaaatttcggagataatctgcctatcagagggagaagtaaagttgaactcaatgccctgggctctcttccttggggtaaaagccaccacttacttgaagactctggtggtttccaccatttattctacaggtggtcagcattagacactggatgggaaggtaggagagtctcatagacaaaattcagaaataccatcaaatcatctagatcctttctcataacaactaatgtatcagattttgttccttgcttaactggggttctactgtcagtttttcatttttgttttgaaatcaggcatccattctatagaaagcacacaaatctagggtatgtttttccccccaagctaataatattctcttaagatgctgtgcagtggcactggggcagagctcttactgggccacatagcacatgacagtcaatgcttttagtacatacaatgcccagcatgtgaggtatataaaaggctccttttgtttataatgttttcaacttacaaatgggtttatcaggacatatcaccctgataagtcttgatagcattaatatattatatttgtcttatattaatacaaaaagtagaatttaaatgggaaagaacctttctaaatttggcaaactaggcaagaatatttgaataataacaaaaatagcctttccacatctgtgaaatactgataagactactttgatattagtctttttttgaaatgtaagtgctaaaggtagaaaatctaaatttctgaacttgttttgtggaagatagatttaattttttaccgcgtgtttattgaaacctagactaaaacaataataaacaatacctggttgaaaggaaagtgcatgggtggaatttgggtttagatgccagcataatccgggctcagcctcaccttttattgcacacctgaaggaaagcaactgaccccttttccatcttcactatttaattgtgtaggccatgcatggtaggtcaaccatactcctgttgtagacccaacacccaagggtgtatgtgtagcacatatttgcttgattttttaaggggatgttaaaagttaaaaacatagggaagtagggtgaatctagggtgatttggggtgggataagtaggatcaaaatacattataattctcaaagaattagtaaaaatgagggaaaaaaacaatgaaaggataaactaaaaaaccagcaacgcagtagtttctttaaggtatactgcaatgcttttagtgcaaaacaacatctgcagttgagaagttgctctagatttaatgtaactggatggtccagcatggtgtcttggcccgatgtcaccataactagccctgccctgatcttttggcatttcagctttcttgtctcacaaagaagagagcagctggcacaggccatggtctgtccacttctttctctaaagtaaatattctaacggggaataaaatcctctgagaaccagagtagtggcctaccaaagtgtttcttgggatttttactctgcatgtctgtacttcacatatatgtatatctcaaacactagaaaaatagtatagacaaaggactaaaacgttaccagtgaagtattattcatgttgtgaaggcattccatgccttcagcatcactcaaacaagtgaaactagaattaggcatgacaacatcttgaagtcatatatagtttacagaattttcatgcctgataactccttgtatttattggacatggtgagagaatgaatgcacggcttggggcttcataggatttaatcttctgtgatgctgaagagtgaaagtgtcagccaactatttcaagagtgtgaacaccaatcgagcactctccctctcctcccactgagagtggaccagtggtatccccattgctaaactatcggtttttatttcctaattaaagattctggattgataatgacatgttcaaatgtaagaaagggaaatctggtgagctcccttatgcgtatgtgggtgtaagaagttttatgtagcaggaagctactctgctgctaccatctgaccgtcccttctttgcacgtgctgggattttcagtgattgtctcagggatgctctggcctgagttcccatcctcttacgctgccgttcttcagtctcacctgcctacgttaacactactggctacttcatcctatctcatgtctgcctacttacagctctaggaaggaaaattgtgcagcttccttaagtaggaccaaaatctcttcgctttctagatctcaggaccaataagattcatcttatttcccatcttaaatgtatttgaacaggaaagcacaatggctgagagcttttttattgtacctgagtcccccctccccccttgggtttaagaagtcttatgtatttttcctctttctctgcattctctcctaggaagcttcccttaacccctgacagtgcactttctactgtctttatggatgtgcctgcagactttcctctggactgtattgtctttattggtcatcttgctaattaatacacaagtgataacatgtcaacttcttagcagttattgaaatattagattcctactattggatacacagattctaaagtgtgatagactcgtctaaaaaaaagaagtaaatggagtgaaaggccaaaggtcagacactgttgaatgcacctgtcctactccttcccaggacaaatactcctcggttaggctgattgctgcagtggatgtctagatgacaatgaaatggttgaatgctttcttcctttcagggtggataccctgggcctatggggcctccttccatccccccatcattccgcccagaagatgagctcgaacacttgaccaagaagatgctgtatgacatggagaacccacccgctgacgattactttggtgagtggggaagagagccgacttgtggagtaaattcctcatttccattttgctagtgagcagtgaggactgtatcagctcctctggagtagtgttcacatctgctgcatctgttatccacataccagtgcgcgtgtctgagtagaccaccatgaacctcagtggtggatagagttattagacatgtaaaatcaacacataattttgccagtttattagcttagcagcaggcaaagatttatcatcgtgtgtccaagtagctctaaatatttatgtctaatacttggaatctgatgtagcttaactgtattttcaggtcttacattaactgaatagaggaggaaaaaattatctttgttttccacttcttctctcttcaaacctatgaaaacttatgaagtgatgttgttcttgccagtctattagtataagttggaggtatgtgtcatttgtgagatgctatggacacaacttgtcaagggaacctacaatgcaaaagggatgagacaagcacacaaatgattatgagtgcgtagaggagaagtgagagtcctgtgaatgctcagatcagattggacagatcgtcaaccatcgtaatatagaggttgtttgtccttcagtctcataaagaatggtatttttgtagcatctaagtaaatttatttctgtgaaaacaattttgaaactgcaacatattaaaatgtgtaaaatacgagaccaagtttgactattacattgaagagatgctgagttaccaattaaggtggtataatattttctaaacattcattctctgttttgtgatagtcttatcacaaagtgctttctgagtaggttcttgaaggatgtggagagaagcatcatatgggtcgcagtaatgagtaaaggctccgccaaggtagagaactgaacaggcttttgcctcctcaagagcagttgccttccatcttgggtcagctgtccatgagtgctggaactgttaagccagccttaccttcctcaccctgggacaagcctactatctgcctgtctgacagactgacaccagtcaagactacaacaggttaaaggtacatgccaccaagcctggcaattatttactccctagaacccacacagggaagtggaactgactcctgtgagttgccctttgacctccaccagcatactgtggctcacacatccttcatgcccgctccctgcacctctgaaccacaaataaataggcaagtaaatatttttaaaagtaatttttttaaaataaatctacttctggttccttctgtgtgcccagttagctcagtattgttagctgttcccttatcacctgagcccagtttcctaccctgatgattcaaagatgtggaaccaatgttccctagcattctttgaacactagaaattcactatagaaacaacattaactcaaagaaagaaaagcgtaaggcttaacataaagattatgagaattggcacaaatgcatggaaatagtaacacagaaaccaaagcttaaagcagagcataggaaaagtttattgtgctctcttcattgtaataggaggagggtgtatattagaatccaagataaactaagttaacgatgaaaaataaggtgtctgtaattaaagaatattaaaagtgaaatgctgaattctgagcatatgtttccgatatcgtgcaacaatatctgctgtaataaaccgagcaactgtatcgactgtaacaatggataagtgttacacactcaggaaaacagataaaaaacgatcccttagaactaccttagctttacgacatacaagcttcaaaaactggagcaaagtgttctgtgagcctctgttggtgctgttttatctacaggatggaaacaatcgctatcttatattgtgattgtgagtaatgcatgaaatatttatagaaagcactcagccaagtccttggcatgtagaatgtgctcaataatcagagttcaccaaagctccaggggcttacagcttatttaagaaaataagatatccctattaaaaatctatcaataacatttgagtgaaatttaacttgtagtaacaataaaaggtgcatcaccagccgtcaaagtcatcattgccaagtggaggctgctatctgtgagaggagaggagagaagggcgtggttttactggctgtttataatatggtagtactattttatgaacggcagaaattaactgtaatttcatcttacagaagaatgtaaccccttggagtagatgttactatcatgttcccattagagaattaaggcccaggaatgctaagtgattttgctcaatatcaacaaataacgagctgcagaagtaggtttcaattcgtgtgccaagcctgtgttgttgagcaccatgcctgggatggagggaattagagcaaacactcagggaagggtttattggggagattgcctttggagagttgggcaacgaaccatgaggattctcttctaaatataaaataagcggaatgtaagtgaagacaggattgttgaaagatagcgtcctctatgtggaaaacctggaagtggctctgtacaggctgctctggcagcgcctgccccaggcgtgggttgtatctttgaaagtgtgtatgtcccagagggggctgtgaaaattatagtgtgttactccaacaagaacaccaagtgatgcacagcttcatccacattcagccaaggttctgagagactccaggaaaggaaggaagatctagaaggagccacagaaaggtactagggaaagattaagcttgaaggagtcatcaatcttagttcaagtcatttggaaatgggtcttagttcaatttggaagataatagagaaatgcggtgttttctgatggagaaacttttgatttgaaagggggaaagtaatggaattgaagcctggtacagaagtggaaaatactgggcaacagttggcccaagtctctgaaaggtttctacaccctggctggtgtggccttctctaatgagttgcatgctgaagtctagttccatgtggattgttctgtggagaaggctcaggagcatagctgcagggtatagtttaaatgacacctctaactctgcttagcaatgtgaagtcgggagcagaagtacttggtgtagacctgcctttagcctcccagtctttaaatatggcctgttaccatcttggctgcagagaagcagtgccacgatgggtacagacaggagaagcacggggagctaaggtgatgctgtgtgagtgggagaagagaggtccatggacccacctgaaagatggaggagggaagatgaaatagcactgtttgcatcatgggtgtggccagcagaggaagataatgtcttctcttgcttttcctccagaaggaggagagaggaagcagaaagaacttggagactgtagaagattcatttcaccatctattagaagcaaggctgcatgcttttgctcgaggtcatatcccttggagtagtctgtgttggtgtaaaactagcaaagggtgtgtttgtttgaagggagcctccactccagtggtagacgcttagagagaccaaggggcaaagaactagaaatcactacgacttttgacggattgaaaacttaaagagaactttaaaaataggtatcaaatggcagaactaagcagcaagcatggccactgttcaactccaagcttacctcgtgtgagtagttttcaaggaaagtgtgaaaggaatattaagctgtagaccatcttggaatggcttctcggggttatgtgagccttctatgttgcctcacataacagacttttattttcatccattgtgaaaggaaacacagttggctgtccatttggaaaggaagcataatttaactgccacacgtgcacatacactctcatatgtgtgtgtgtgtgtgtgtgtgtgtgtgtgtgtgtgtgtgtgtgtgtgcaggtgtgtgtgcaggtgtgtgtgcaggtctgagtgtctgtctgtgtgtgaccatagcatggcttcaaatgaaagttttctgactgagcccttcctaggactgaacacaaatttgttggaatgcagaatctctgaaagtggatatactatatctgagagtggatcgaaaatatctgtcagcgtattttaagcatgtaatataattatcttggcattgtttacatgctgttgtcttattccaaaaaagaaagaaagaaagaaaagactgaaatgtgtgcatttcacatttttttactaggctatttgaagaatcactatgccttcacagtagtacaaggtaaaatcttgtgtaagagaatcttgtattaactggaaggattgctagtggaaggcattgaaaattctttgcatggaaacaggactttgattggaattgggttttactttccttccaaaagatacttggactagagtggaaggtatgaggcagcaaagacatgacacttgtgttaaatcgaagaggaagaagacagggatggtaatacactgctattcctgaagtgatgtcgcctgttcaccacacttagtgctaaatatcttcccaaatgaagtcaaactggaggtccggtgatgttcatgaatcagctctagaatggaggtccagttcctccctaggttcattggagcacgtggtagctgaccatatccacaaacattgactgcatggttcaggagtctggaaaatatgatttaggtgcatttgagattttggagggaagaagccctgggacccttcctgacaattactgaaagagagtcacctgtgaaatggacttggccaattctaacagagctatggggtgagttgctaaattcccattcagtgtggagaattaatgctgtgaacagacaaaacgaaatctctgagaagtacaggtgaaaaatcaactctttgatggggaagccaatgaaatacacatatgctaatatatcagtacatctttcatccagtgtccacgtccgacattgagtgacttagttatctaaaatcacccttagctgcaccttcaaagtgagtctacaacatttagttttaatcctgtgttcagatgattaaatgaggccaggtgtggcagttcacacctttaatcccagcacttgggaggcagaggcaggtggatttctgaattcgaggctagcctggtctacaaagtgagttccaggacagccagggctgcacagagaaaccctgtcttggggagatctatagatatagggtagagatagaaatctgagtcagagtaaagattttctggcggttttaaaacacttacatacttcttgcatcatctgagttagacaagagcctgggtaaggggttaatatgctcattttccttggtagatgaaccagatgatcatgagcttccctgctctgtggacgccatgctgccctcatcagtcagagagctgacaagaagcagaatggccgtggctcagacctcactctggagtctcttccctctccttcattgtgctctcttagaacgttgctgagttggtcatggtgcagcttagctcagttagctgtgtttgagcttccagatctgtacaaagagccgcgtgattgctttggaaatcgcttggcaggtcttaactaaggtgctgagtgatttgaacctgattgtcttcattgttgtgtgacaagaaaactattcctggagtgtccctgttgattacagacaggggcctgactccaggtgggcagtttcctttagaaaagctgggacctcaggtcttgttttcacacacaaataacctaattaagtaaaaacccaaaaccacagcgttggagaaaaagtagaaaatgggtggtttagaaaaaggtggtactgatcagaggggaaagttggttttttggttttatttttttccctttttgaagtagctatgggtcatgagagtacagtggtgtttcgttagacatattaggtgtatctcctttatggtgataactttttgtgaagtattttctcagagcaatttgggcttatagcactaagtcatttatgtcttccaccatagcatatgttaatttttagtaaactcagccagtatgctattaaaacattgatttgaaacctaagattcatagggtttttttaaatgtagtcctagaagttttgtgaaatagtttttcattttctagaaaattaaagctcaaatcattcatccaaggtcatacaactgagactgatttgaaaactgtagatagaactttttttttctttctaaataaagagtagaaattaaagctacagaaatggctaggttagtgctagtgcctgctgtatagacatgaggatctaagttttgacccctagcaaccatgcaaaattctggtcacactgtacatggttgtaaccccagggctgggtgggtgtgcaaaagtagagactggagaattgctgtggtttgttgccttccagcctactgaaaaatagcaacttccatgttccatgggagtaagacagaaataaagggtgtcacctgatagcctcttctgatcttcacatgtgtacctgcatatcttgtactctctcactctctctctctctctctctctctctcacacacacacacacacacacacacacacacagacatacacacacacacacttaataaaaaacaaactggtggtagaaatggggaaggggccatccaaaggttaagaagcacattggaattgatgtttttgcaaacttgatctggatacaccattgctatactcaataagaatgcatttgccattataaataatgaattaataacttgctggtatctatatatgcacattgtcctgatcttcttaattttcaaatacaaaaatatatcattgcctctatctcaccctttacaaatacctggctgtaccttttgtgtccttcttcctcacaagtgtatagatgcaagggtagtgcttacttcacggtagtgccccatcctttatgggttggcaagtgagaaatgagaatgataggttggcagttgctgcagagtaggggtattcttccactcatttttttttatcacctttgaatcataaaatgttagtcatgcaaggtacctatgcctaaggacctgctacagatggggagaagaggaaattcatctcactcccccacctcagggtcacaaggcacttagtgacacagccgtgaattataacccaaattttatcatttctttctttttaatcacataaaggcacaggagaatatgtgagtagagttgagatgttgttgctacattcagtgaggttaaaattgggctgacaaccttggacttgatctcatttccatgtgtcttctgtgaaatccaggaggaaatcggtagattgaaagcttacatagttgagattttattcctaaagtactatatcgtattttactttatactgtttcctctgtaacctttggctcccacaagagattcttgcctctgtaatttcttcctgttgcaaaagaattgggtcagaagacagggaatcaaattgaaagaagtatgtccccatttgtacataggctgtctatagcaactgttctaaaaaggtcatccttaaagtagctccctccaatgccatgaaccaccatccaaaactgccattttatatggacttgatagaaacaacataaatctactcacgggattacagttagcagcatccattttatcagaattatgaagaaagtaaagatactcctacttcataattcaacatcctttgatgataagccatggaagcaattggaattctgaaggaagaaagcactggtgggccattatgtatggcataacaacgtcttacttcctagaccatacacagtcttgtattgacatgaacgtaaagctgagtcctgaagctacaatgctaattatgcattttctgaccttacatcccagccatcttttaatgagaacacagctgcctttcccctacaattcgcccttcctctctacaacctgacctttccccctgcctgtcccctaaagcacagagatgatgatcttcttgcagatgttgaagtgacatcaggattgttggaagacaattaatttaccatcaagctattgtttgaacatctgtagagttatgcttagtaattctattgtgtttttaattaagcaggttcattcatctacaaatatttattgagcacctactaaccaccaatcattgttctgtgtacctccggagatcatggaaattaggtacattagtgaccaaagaggagaggcatttgttaaatcctcctctgtcaaaggctttaatgtagaacaaagttgtttgcttcagagttccaatgtaacacaagtcagtttccaagaccagttatgctcattttgagctacccaccccaaccccgttccctggggtttatgaggaagatcactgcatcgaaagatcaagtgccaaggaatcagattaaaatagggttgtagactatgacaaagcacagcactgatgccatacacttacttaagggcttctggggtcagtgtcactaatggtacttggcataaataagagatactaatattgctgaccatcaatgtgacattggtatttaatgtaaatgatacagcactgtcataaaaaagaacaagtcatcatttgatggatggcacagaggaatgagcccttgatttggaggcaagtaatccaagcataagatgggtctttttctctgtgcccctgctgccatttgactttttgtgctgtccttaggatgtattcttatatgttaactgagaacatgttagcagtcttcagattatttcccagaaaacaaagacacagaagtaactcagcttgcagtatagctaatggtatggtacatgaggctctgagatcagtccccagaacaagagagagctaaagcagagagtgagagaatgaaagattcaggggtaaggctccatcacaggctttcttaacttttctgggcctccattagaagattatctattttatacacctattgccagaataatattaaataagtaaacaaacatgtaaatgtgttatacaccattagtagaaccctcaaaaactaaagagatgttagcatttcctccttgggctacatccagtttgatttatggcatttgaaattagcatatcataatctctctgattgtttcatgaattaatgctttgtgattttataaggtgttatcttgttactcttgttactggagtatcactagaggatctaagacgtgggttttactcactctgtgtgagaaagcaacagcccaagatccaccacagtgttctcatttgctgagcaaactactcttgctttttcatgtggaatgcagaaaactattgaacaaaaggacaaaatgaattttgactcagatggtacaggatgaatcataaccttctttcttatctaagatgtaaagaaaaaaataaaactaatgcagtagatggctgtgtcagcataatccagacagcctgtttttcaacagaacagagaatacatttctaccaagctgagaattgcaggtaggacaaaaacctggttaaatttttttctttgttaaaactgtaatcaaaggatctctatgtccttgcttcaagcaagccaatcagagggttctgttcccaccagcaaatattgcccagactgttcataaatccacctataatcccagctgagcaattaggggacagaaaattgactgtgtacttaatgtgtgctccccatatcagcctaccacgtggtcagtatgggggatataccatcaaaagatgcttcctaagtcatagtgttcttggccttattggggaaattgtttaaaataaaatatagaatttatccttctagagtctcgacccagatttattatctaatcagttgcctgtgaatgtaatgtaaaaatattctttaagtaaaaggcacttttaagacctctgttttctccaattgttcttcaatttacaattctagtgggtctcatcatggtcctgtatgtatgtgtgagcatgtgtgtgtgtgtgtgtgtgtgtgtgtgtgtgtgtgtgtgtgtctgttttacatgcctattgatctacttactgatttgtaacattccccaggaaagactacaaatctttaagttgctgtttcttcttcaaaaagcaaagtgagcaactatggtgtctttagaagtcccatgtcactccatcaaggcttttgctctcagtagatattccctagaatagttctattctaaaaacctgcactattatctctggttaaaactggaccaacatagagtaagcacatagtctatttggaacactttaatttgcttttagacaaaaaaaaaaaaaaaaaacgaaagtactatgtatcattactgtgaccctttgagacagatgttcttcttttacagatgataaaatggaggcataagcaagttaaagatgtttcctaaggtctatcaattatagttgctatttgagcccacagcctgtcttttgacacctgcatatattgactctatgaccacagctggcagaagggattcaagtcatcgcaaaaccacaactgtgctaatatcctaacccatgtctccctttgtttcttctggaagatgtttcttagagtactttcgtttcctctggttgaagggccccacaaatgaccaaggaagtagatgggaatccagacctgccatcagtctctttgccctatgtcaaatgtctgcagagacaaagaattaacttgtctaacaaatgttcagtgttcggattcttgatgggaatgtacctgagacctgtatcccaattccttttctcatcttaggcttgactgaacttggctattcatgttccagctgagaaactctgcacactgtctcagcccttctttcacaagtggacataattacttttgatttttagccatccatctcagtgatatcttctaagctaaggaaccttttaaaaagctggtccagtccacaggcaaactggaagagagagagagagagagaacaagggacaaggatttcatattgaaaataaggttaccctgttgtcatgtccttagacaaaggagttcaatgcaatagctagcaattggctcgctcagtcggaagttgatgctattttaggtcatcagcaggagtgtcaatgtatctgtgaattttggcattttgtttcattaaggtggttcaggaagccagacactgattaactgattattcaacttggttcccactcctaattttggatgtgtggtgtcttcaggcagctgttgtgacaccctgcttctaaagaaaactttgcttgtgcctctaaagcaattctgggaatagtttaccccacatcctactctcctggattctctgcatctctggtgacagatgccatggagatactgttgcttctggatcctggcatttctaggaagtaccagggccatccaaactgcctgcattctcactggtacactgggctcaaagtggactttcttatggaaattacataagaagatgcccatgcctcagcacgaaagtctttctgaagggaagagaaaccctacccagaccacaggatgtgtatagggaagactaggaaaattctagactctgctggtaagaatttggaatctgattctctctgtaagtgtgctgttaagtaagcaggaagggcaaggatttctattttggaaacctaagtcgtctttgtccatttgtttaatcactgagtggttattgtagacctattatgcgccaaacattttcactaagcattagtctaaaagctgagggcagaaatgcctactaaaaaaattagataatgaatatattactagagatttgtgatactatggaaagaaaaatttttgctgagattgaagccacaggtaagtgttagctcgtgtacattgtgtcagagctaaatagtaattaaatgtttcaggtaacccatttccaacaatccagtaggaacacagggagaagaccaacagagattgtaaagcatgcagtacgaatacagaaggtgcatggaaaagagaaatgagaccaaagggctgaccgatgtctagatagcttgtattgtagctgctctttcaaataagtaaagaccaagatgggtttctttctttttttttttttatatgcatagatgtgatagtgtcagatacctcagaactggacacgtacagatagttgtgcgctgccatgccataaattgaacccttgttctctgaaaagcagccagtactcctaaacactgagccatctcttcagtcccatagccaaaatcttagggctaattctggatcctgttgtggggagagctgttgactctgtggaagcttggagattggactgtgctcatttgcaccaatctgaaggagacaagagcctgaccagagcagctgaggtttaacaattttgcagggccagtgacgacatctgggtgaggagaaagggcaggttaaggttcattgctaagcttctgtcttaggtaggaaaataccattaagtgcgatgagaaaacagacttagtagtggttgtgcacgaacctactaaggctttcctatttggaagtagtttaattttcatccatcagtacttattgagcacctgctgtgtacacttacacatcatttcacattgttacaacaacagagtaaaacagactaagtcctaagaggctcacattctagtaagtggagagagaacataaataagtacacactgagaatgatagacatagagggccatgtagacaacaaactggaaagggtgacagcacactcatcagtggggacgaaacagggcagagcatggtgggtggtaggacagctgccaccccctgtggtcagatctcctgtgtctaatattggtcctgatttattggtattatcttataaattgtgtacttcccctgagacaggaatgcatacaatgaaaacattttcaatcacacttatttctatgtagcaatatattcggccaacataaaatatgccaggagaaacaaagagagaggaggaagacactcccccatacactcatccttgtttctctaaaacctagggcttgaaggtaagaagccacagaaaggaacccaagatttaatccaaatctcttccaaggatccagtttgacatgacaacgttccactgtcacctccaaatgtgttgggatgttttgtagcactcctgggcatgtgtagctcatggcagacaggttgaagattgacagtgaaacctgagagtagtgagcatattagcataatatcagggctagcagaatgtcaaaaacttaggtaatttgacttctcttgcttgattctgaacttggaaccaatctcaaatgataaccaaaggtaaaattggcaattgccagctcagatgttaagatatttcatatttgttggatcactgtaaatactgaagcaaagtataagacaagacattggtatagtgttatattcatttaactgataggacgctctagaaaaataagtcaagatagagtaatctgaagttctttagcataaatggaatcctagcctttaaagatggagacatttcttgtccatttttctccatttagcacaaaatcagcccttaataactgatgaccatttatggaacactgattatggactaagcactttattaaatactttagtaatagatcatgcttcatcatgccggcatagtaggtagtcactcagatctagtatatgggtgaaaaagccagtgctaagacagttctaaacctggaccaaggtcacacagattgttaggaggctttctaagggaagtctctgttctgacttgcttaacaagtaagtgtttctaatggagccacttgtcctcatagctataatgttctacaggattctgccatcagtaccatatactactgtactttctgtcagtcacatggttatccaaggaatatcaaaccaagattgttggaatggaaagggtccagactttttgggttctaagcatgaagagtaagaatcatccaagggagcaacattttcatgagacaaagctatgtgcccatatgcgctgtacatgtataagtctgtatatagagagatgatagatagacagatggcagatagatagatagatagatagatagatagatagatagatagaagatagatagatgatagatagatgataggtagatagatgataggtagataggtagagagatgatagatagaaaattaaacagacacagatatccttaagcccatacccactgacaaattttaactgactatggcatattcttagttataatagaattaaaatctaagttgagaattactgatcaagtttcatcttgtcacatcatagacccgaagacagaaacacactggcaactactttcagaaggtcctctgtgacacatctgtgtaaggaaccctggttctatgactttcactaatagtgattttcatttttatttcacaaaacgatatttctggattgcatcatgtcttgcttcatggttgcggtggaacataagcgagcaggcaggggtttttactgtgtctggggtcccatgatagatgtgttggtaagggaggatgtgttcactggtttctgctgagattcacctgttcactaatgacagctcctcagcacattttcatagtggtaggtccgtgggctgcatagttttgtgtgtgtgttttcaatttcagttcctttgataactgagcaaataacagagatgatgaaaccgaacagaattaatctcctagattgtgtgtcacttctccttttcagtgagtcagtacgtttggtaatgacacgggagattagaaggttgcaacgtgtgcctcagtgaatgcttgtgggaaactcactatttgcccatcacagatttatgtggagtgaatgagagttttactgcacagaatatccaggatggagaaaagataaataaatttggaagtctttgccctcaagaaactcatagactgtcacaggttagacaaccaaaaatgtataataaccctttccctgtgaggtatctgtgcatatgaccaaaggatgccttgggacatggaaagcagtggtagcttaagggctgatacctgagctgcatctgtaaggaaagactcccccggcccctgtagaaaggagaagaaaggcatgataaaatgaagaacttggtagaaaggaaggcagggaaagtgttccctcttgagatagcagaatgtcttcagcactaacagggtgatgagccagcagtagggacgtggaaggcgagacagtcagtgttcagcgaggagctggtccatgccactagatctgtgcttgatccaggagagaacaactgttcctgttgccaagtagcactgctagtgactgagatgatctcacagaggcacctcgtggggcagagtacagacttgccaggtggaacagaaagatggcattgctgtcttttactcacgcttcaaaacaggaagtgcctaagtaagcagcttttcggatcaatgcagccatgctttacctgcccttgggttcttccgcatcagcaggactaggggcatactgctgctgtgcaaagatgccaccaaatgcaacagaaggcagatcacccaatctttagaagtggaaatgtatatacatctagatttgaatgttgcttccaagtttcaacaaaaaggcaagctgtcagaaaacccctcacatgtgtattctcaactgagttcttgtggttttttggtcctggtgcctactgaagagtttgtctatgtttacaatggaaaagaccttgggagccatctccaaatcttgtttgtttgtttgtttgtttgttttaataaaactagagagaatggctccagccatcattgggagcacgcatgtgatccttccattcatgtggaagcctggcttccttttcatgctgttactaatcaagtgttcattagtcatgaattagtgagttatcccaaggcatgccttgatatcacagtccctgttcactcgcgcttatttagtacagtttccattacctagaatatactgtggcttacatatattaagtgaaaaattctagaaagaaacagattgtaaggtttgaatggcatgtcattgtggggaacatgctgaaacctcacaccgtccttcttcatccagtcaggacatgagcattccctggggcctttgcctcacatgacacctgtagtagcccactctaccactgctgataccaggaaggcagtcgtactgtcagaaagggtatggccagtaactttattccatgtagatgtggcctctgaataaaaccaaaggtgctgctgattcagacatgccagaggctgacagctgcttccaataagtgcaaggtgaaactactcatgctaataggagaagggggaaaacccgaatgctgagactgctaaactctgcagaaaaccgaatcttagtatccagggagaaagtaattcatgacgatgtttctatcttgccttaaactgcaaaaattatgatcgcagtgagtaataaatgatatagttctgtactatcaatgattaggggcatcaaaggggacagtctcaggatgaaaatgggcacgtactagagaaataagaaagacaaaatagctaaatgtttggtaaggatgtgtgattgaatttatcatctatatgcttggttccctccactttttatactaaaaaagatctttgttctttatttttctgaatttcatatgtatgtacatatatgtgtgtgtgtgtgtgtatgcaacattatcatttctgcaccccatttttctccttaaaacccttgtatacaccccccccacacacaagatgccttccaacttcatgtctttttttttttttaaattcattccagttagtgctgtgatatgttcccagatgtggggagaccatccactggtatatgagaaaactaccagcatccataccctccataaagacacacacacacacacacacacacacacacacacacacacacacacggcccagcgactatcttgcaagctgtctgtagttcctcagcatatcatgaggccctgggaaagatgagctgatgatctccactgccctttcaaaggggccttaggttagaaagggagcttggcccagttgagacccttagcctttctcacttcttctcacactggctcaataaagtggagaaagaattttattgatgatgaaaattgtatcagtattttttttatggtgcccaaaacaatcagcattgttttattgttttattttcctattgatacagtaaattactacaaatgtggggcctacagcaacacatatttgttatctcactgaatgtatcagaattcaaggtattagcaaggctccattactttcttcagccctcggaagcagtcctgttttgccttagacctctctcgaggcttcggatagcccccagcaatggcatttctgatcattttttccactagtcacatgtccattgatcacaccttgggaagattctgcaggttttaagaaactaactatgtcattagattgtgtccatttggatctcttcagatactctacccctcaagattacatttgccgaattcccaggaacataacccaggtgcccagcgttaagacagtcctccttaggtgatttaggcttgtgttgtggccttccagtaaatagctcagtgacctagagatagcaaagctggtgtggcctttggagatgtaagaatacccatgttgtttgttaaaggatcggattcttgctttaaatgctaatcttggaaaaaaatatttctgacttgtaatttgataaaagggcttctgattggagctgcagctgtggaaaacaccattcttacttgacctaaggccctgacgataaactggtacttccaaggaaagtgggtcttgttttttttttttttaatttttttttttttaagatttattttatgtattcaccaaacctcttcagacaccagaaaagggcatcagaccccattacaggtggttgtgagccaccctgtggttgctgggaattgaactcagtacctctggaagagcagtcagtgctcttaaccactgagccatctccccagctcgaaagtgggtctttttttttttttttaattttttattaggtattttcctcattttcatttccaatgctatcccaaaagtcccccatacccacccacccccactcccctacccacccactcccctttttggtcctggcgttcccctgtactggggcatataaagtttgcaagtccaatgagcctctctttccagtgatggccaactaggccatcttttgatacatatgcagctagagacaagagctctggggtactggttagttcatattgttgttccacctatagggttgcagttccctttagctccttgggtactttctctagctcctccattgggggccctgtgatctatccaatagctgactgtgagcatccacttctttgtttgctaggccctggcatagtctcacaagagacagctatatctgggtcctttctgcaaaatcttgctagtgcatgcaatagtgtcagcgtttggaagctgattatgggatggatccatgaatatggcaatcactagatggtccatcctttcgtcacagctccaaattttgtctctgtaactccttccatcggtgttttgtttccatttctaagaaggggcaaagtgtccacactttggtcttcattcttcttgagtttcatgagtttagcaaattgtatcttatatcttgggtatcctaagtttctgggctaatatccacttatcagtgagtacatattgtgtgagttcctttgtgattgggttacctcactcaggatgatgccctccaggtccatccattgggctaggaatttcataaattcattctttttaatagctgagtagtactccattgtgtaaatgtaccacattttctgtatccattcctctgttgaggggcattctgggttctttccagcttctggctattataaataaggctgctatgaacatagtggagtatgtgtccttcttaccagttgggacatcttctggatatatgcccaggagaggtattgtgggatcctctggtagtactatgtccaattttctgaggaaccgccagactgatttccagagtggttgtacaagcttgcaatcccaccaacaatggaggagtgttcctttctccacatcctctccagcatctgctgtcacctgaatttttgatcttagccattctgactggtgtgaggttggaatctcagggttgttttgatttgcatttccctgatgattaaggatgctgaacatttttgcaggtgcttctctgccattcggtatttctcaggtgagaattctttgttcagctctgagccccattttttagtggggttatttgattttctggagtccaccttcttgagttctttatatatattagatattagtcccctatccgatttgggataggtaaagatcctttcccaatctgttggtggtctttttgtcttattgacagtgtcttttgccttgcagaagccttgcaactttattaggtcccatttatcgattctcgatcttacagcacaagccattgctgttctattcaggaattttccccctgtacccatatcttcgaggcttttccctactttctcctctataagtttcagtgtctctggttttatgtggagttccttaatccacttagatttgaccttagtacaaggagtaatagagcattggaaatgatactatacagaaacctggccaagcttctccttggcatggcccattctccttggtacgggcttcctcctccattcctctggtcctacccccctccttcgttattttcattaacaaattcagggaagaactgcaggaataaagatgtggggaaatttaatatgttaaagaatgaacaggtaactgaaagcaattaggaggaaaaattgcccgcccacccccatcctgcctgatcagttttgtttcctgagaacttgtaagtcaagttctagaactgagcagtggaaagctcccatctggtggaagactagcaagacctgagggatgtaggactgaagctctctgaaagaacatgagcatcctagcaggagttctctcagattaggacgcaaacatggttccctgatggaactgtttctctccagcagtgagaagcaggtcataggaagttcggaaatgaataaagttgttctaagatctagaaagacgatgagtgaggagtgtgttctgcttaaagatgagctcgagaggacccgctctcccacgagctgcagttatttcattaccaccttattgccagtcaaatagagcattatatcaagcaagattggtcattcaaaaaagaatcctaagaggaatacagcaaacttttccaagctgcctgaattagattacattgtcagaaagtaagaagacagtgcattggctataatgttgttgtgcatagattaagctttggggactataaataaaatccttttaaggtgaatgcctagtgttgtggctgctctttgttgttgtcctgtttgttccattttgccttaaaaataaggttttcctctcccttgggtgagggatgagctagacaagcaatagattagtattaggttgtaaagtggctggtccctaattgttacacttttgttacactttgtctgttttactcagcagcaatcttagtctgcatctgagactctcttgtgagcatgagtagctatgatctatggggaaccactcctgtgtggccgtgttgggaaatggatttagagtcaggagtttacagtctatcttcagaatttttgactttccttcaccaaaaaagcaagcttgttcgtgtgtgtgtgtgtgggggggggggggggtatgtgcttacagtgtgtgatagtttcccaacttttaacattagtcttacttactacaatatattgcttagaattagttcaccattcagttttgcagcatcatagtctgagagttagttcaaatggtttaatttgattacacttaaattgtacacaccactctagctttatatgcaaaccatagggctgagactattttactaaatttaaatgttttataattcatttttccatctgagaattacattttgcatataatttttaatgtttttaagttccatttgaaacttattatcaacatacaaattcttgacagggcattaaaaaaactggtccagattattgctgagttcagtgtttcgttatgtaggaacactgaacacctttggttaactgggtattgataaagcttagagcagtgttggggggtcctatacactttggcagctgccccatggcagatttgacaacttctagttccttagggacagacaaaaagttgcctctttgccacctgtgattaagtaaatgtttgagagtccgagtcctgagcctgattgggagacagacatagaagttaattattctgagaacggttggaaactccttccctgaggaatttgtcaaacagcaaagaaccatctgtctaaggtagttttaataccaagctgcctgaaggcaggtgcatggattagatggcttgtgatgacgtggtgatgcctttcctaagactgaaaacggtcctggagaaagacctgccctgaggagtatagggtcaagaacctgacagtattgagcccttttttgaaattacagctagttggtgctgcctggtagcctgaattccagaatatcctgtgataacaatggttagttattacttcctcgaaaattatatgcatcagtcactcaaataggagtagttcaaatctttgctgatcctaaacagaattctccttgaacaggtagtttgcctgactcaggtctaagaggctttgaaacttgttgagtttgcttcttccccaccatgatagattgtatcctctcagaatgtaagaccaaaaaagacccactgcttcctttaagttggtccccattagtcatggtagcaaggaaggcagctcatgtaataggggcagcaaaccaaccctagaggctggaagcctcattgctcaattctactgaactttggaggaactctttactactatttagtcttaaatttgaccaaggtataacttaaagacttttattttattttgttatattgagataataattttctgcctgacccagaattcactacatagattaagctgacctcaagcatgcagacatccacctgcttctgcctcccgagtcctggcattgaatgtgtgcaccacaaggcccaacacgatcatctcattactttgctaaagcttttgaatgtgatgacaatgttaattttcacttctggctattgcagtttggggaccttattcaaaactgccttacccactcccgtgtgcccaagcgcttccccatgctttcttctggtagcttcaccattttaaatctttaatagtgcccagttgacttctgtaactggtgagataggagactagcttcattcctacaaatatggatattcaatttctcagcaaaatatattgaaaagtctgttccttttccaatgcttaattctcagcatccacaaggaagatgactctgtgaacatccttctagattttctagactattctcctggtttctgttttggtcacctgtatgcttcttttatttaatctcatttaacttgctgacattgtagtcagcaagttaaatattctctttcttctttctcctcaagattgtattgtaacttggattatttttgtggtcccatcaattattagggctactttattttcaatatgatgtactgatggggactgcatagaatctgtagtgtggacaaatggaaaatgtggttgtttaatgcataaacatgggatatgttttggtttcttagggaaaatctcctaaggaaggggaaatacattatagtgttattgagagatgagataaaggagaaatttgaataagaagattaaataaggggatggaaagaagggaaaaggagggaatgtgagcaggagaaactgaccctgaaggccacctgtagaggcgtacgaaacctactagtgaggacgcttcctgaaatatatacttatatgtatgcaatctatatctaagttttaaatgtgtgtgtgtgtgtgtgtgtgtgtgtgtgtgtgtgtgtgtgtgtggggtacaggtgttcacagaagtcaaagctgcatcagataccctgggatgaacttacagtagctgtgatgtctggtgtggatactgagaaccaaactttggtccccaggaagaacaacaaagcacttttaaccactgagccatctttctagcacccatgtttgatttttcttatgaagtcgtatttaatttattccttcacttgacaccagcatggcttactttttataaatcaagtatgaacatacctttcaactcttgctattggaaatattatctggtagaaatgtcaaattcctttcataaaaattgctgtcttgttattttaaatacctttcagaagtgatgactttcccctgtgcatattgatttgaattctttgtgataacggcattgattgagatcctcatgaagtacataaataaatgagcagtttgtgttggaagcctaactccaaagcttggggttgatattagacaactacatgattatctttagcacacactgaattaacttgattgcctgttaatttttctgttagtaatttggtgacagaagaagaggcatacaccttggggtaggaagaaaggcttcatgaacaacttaatgggaaaggcccaaaactgtagacaggtgtcctttattagctttctgtggctctgacaaagaccatgaccccaagcagcatggggaggaagggggttgtttaatcctacaattcaggcaacactccagcactgagggaagtcaaggcaggaactcaagcaggacaagaagctggaggcagaaaccaaaaccagactgctgcttgctggcttgatccctgtggcttgctcagcctgcgattttatacaactccagaccacctgtgcagggctggcatcacccacatcagtcaataatcaagaaaacaccccagggctgtttgtagaccagtgtgatagaggcattttctcaattgaagtttcctcctcccaaatggccctggcttatgtcaaattacagggaacaaaaattcacaatgaaaaccagcaacttacagaacagaaacattgtaatatttactagaaaaaaagggaaatatgaggagagaaaagagaggaggaaggatgggtctttttgttttttttcctgaagaaggcagcatttgaagcgcactttggatggcactgtagcttgagtggcgaaatgggattacaggatatcaagaatgttggactagttaagacattgaactagggaaaactggatagatgagaaataaatccagagtccttactccttttcagatcatatcttatgtttctataataaaggggggtttatttcaaacagtaaaccagtgctggatcctcaggagatgaaatcctgacgtctaatgagggggagatcagtttgctaaagctgagactgattattttgggttactttgaaaaggcacagtagatctactctacctgtgtatcagtgctgtggtctggtcttgccctggctccttcaggtgtaccaaactcatccttactttgtgtaaaaggatagaactggaatgcctatgtattaataagaatgttttactgatagcatttcactctagagccatctcaactcttttttggttttttcgagacagggtttctctgtatagccctggctgtcctggaactcacttcgtagaccacgctggcctcaaactcagaaatccgtctgcctctgcctctgcctctgcctctgcttctgcctctgcctctgcctcccaagtgctgggatctcaactcttaagcatgttatatttcatggctgaaactatactatgactataattcattgatattgttaatgccagtttatgggcataaaatgaattttaatgtcctttgcttttcaaatcttcagaaatcagcaatcgtattattagccatgtggctccaatgccaccatatatctccatttatactctatttcctgtgttaggtaggagaaaccaggctattggtgtgagggctcacatatacactaacagacatcatcagatcatcatgcctagtacacacactcactgctacttttgcaccaaggactatattgcctgatgggcttttcaatttgttcatagtaaccacagtgagtaaatgtggccttcaacagtgttctccatacaggttagggctataaggagtactatgtcttatgctctgttgcagttatgtttttcatttaaaaaatgatccaaataaaacactatatcagttgtaacaataacaaaaacatacatttagttgtatgtctattcttccacattaacccaatgtgaatatttctttcactatgtttattaatgaagaacagcatttcataaagagtgtttataatttacaaccacataacttaaagcatttcaggcataattaatgataaggatgaaacataagactgagcttgcatgatagggaccacttcaaatctttggttctgtagttggcatcagacagacttgcatactgtactcatgtgggctttgtagctttctgggatgaacaatgaaaaatgacctcatcataacaaaatgcttctcacttttagaaaatataagttacgaactgactggcattgttctaccacaagaaaaatagcatggtgtcactgaacacatgacatacttacatcacgaaacatggagatccaagtctcagctgaagcatgacctccctccctagtatgcatggcgctggaaggtaatttacatgcaaccagaagagcagtaatcagcaacatcacccaactccaaaccccgtaacctacaacagtgacctgcctggaagatatagtctgcaatagtggcacaagtgttataggagtaaccagtcactttctgattggatttgcagcctactccatgaaatggaacacatacctgaccctactaaagtggccaagaacatgaaactaaacattttatgggccagggctgggcgggggaaccctacaactatattttgctaaaggaatataacagtaaaatgacttctgattacacattgttatggtaaggaatcagtatgtcactcagtcttgattagaaaaccttcttgttaggggttggtctggtgctgtgcatacaaatgttaaattctgaaccccaaaatctagttgctgtccaaatgagtaattctcacttacacctgcctatgaaccttactccccagtttaattcctaattggtcagtaaatgtctggggcttatggctaagcagaaaagataggaaggcaggtcttagaatcaagtggggaggtctctagagagaccactagttggaaaacaagagaaagaagactgagagaagtagacaagatggaccaggagcatgtgaatagaaaagtatactctgaggacaaaagactgtaacagaaagagcctgggcaagactcaagcagcaagtaagaaggcatatgatttggatgcagctgagaatagctcagaacctgcccagtccaggcctacagcttgtaaataaattaccagggtcatatgtctcttatacagggttagctagagtaaataattcatgtgcaccatcttcttacaataaatggtaattaacatacaaactcaacagtgtgtacaaagtgagagaattttggatcactcagtcctaaacggaatgtgcttatcaacactcccccctccccaaattccaagaatgtatacagaagaggaggcagaaagattttaaaagccagaggtaatggatgactcttaggaagcagggtctccgagactaggcctggtatacatgaactcacagaaagacagcacacacaagacttgcagaagccatgcaaaatcaagcacagagaccagaaagtggccgcagagtcccatccctaaccaagaaactactggaaattgatatcagctgggagagtaaaaatcactccaatagagtgtcactggatctatcagccactattcaagacagaacccatgctcagcagtagatagccaacacaaaatcagctctgtttttctttgtgtgtatgtgctgttttggtttggcttagttttgtttgtgtgtaggacagggggagatggggaggatcttagaagagcaaaggaggggaggaatataatcaaaatatatgaaaaaacttaagccaataaatacaaaaaacaagtgtgggttgttttgtgtttgtttaatataaaactaaacactaactctggtctactgataaaatataaaatctgtttgctgatcctccgcttagtctgctttcatggccatacacaattatatttaggaaataaacagatatgagacaaaaacactagtcttataagagatacacagatgcctttctggaaagaagtattaaataattaattatgagacatgtaaacacacgcaaatactataaaagtttgcgcaccttgtgtgtgcgcctagtggctacagagaccagaagaggacatcagatcccctgtaaccaaagttacaatcagttgttagctgccatgtgtgtcctaggaatgaacataggtcctcttggaagagcaacaaatgctattaatcactgagacatctctccagccccaaaggtgtttttcattttgttatttttcatctgtttgaaacagggtttcactgtgtagcccttgctggtctagaattcactgtgaagatcaggttggcctcaagctcatggagatccaactggctttgcctcccaattactggaactaaagacatttgtcaccacaacctgccaagtttgaaacttttacacgtctgtgccagtctacagtctaccctgtgcctcagttatggtgccttacagtaaaccttgctttcaaaccgtttacatccttcagcaagttgaatatagtggtacgtgtctcagccactgtagaggctatggcaacaatgttacaaggtcagttccaccctgagcaacacagcatctccctgtcccactttctttttttgtgtagatagaggatgagagcaaaatatccacctctgttattgtcaaaattggttggactgttctgcatccttttgcattctagaagtggcttgtcaattcatattgataaagcccgcaggattactcataattcaaatgagaagcattgactccttaaaaggacttccaaaccatgaacatgatgtatctgttccttgatgtaagtgttctttcattttgctcggtgacttttttttaattttaaactatagaagtcttatgtatattttggatcaaaagctagaaataaaagccaaaattataaagtttttatgaaaaaaaacactcccaagaaagttcttatgaaattagggcagtcaaagatttaatgtaggatatacccaaataaatctattgaaagataaattcaatttcatcaacattctaaaagcgtgtaagtccaggacatggaaactcttgacaagagaactaaaatttacatccataccagccagggcttgaaacaagaccctgtcctcaaaaaacgaaaagcagaaaaatctaaaacttgttctcagaagaaaccattgaaatgtgaaacaccaagccatgcatccaaaatgatatgtgtccagtatacagagagcaggtttctaactcaatcaaaacaaaaaacaaaaggaggcaaaaggtttaaacagatgcttttctgggaaaaatcatcaactaaaaatatgcttggtatctgtggtccccaagaagagacttcctaaagtgtccccttacttgagttaggaacaaattcaaattgaagagattcgaggctctgccacgtcccaggcgcgaactgggatgtgaaatggctgagattctcctgaactgctgagaacaggatcgtacaatggatacttttaaaagatcttagcagtgtctttaaaaattaaacacacagtaaacataaccaagcttttctccaacatgttcgcctaaagcaaacaaaacccctgttttcacacagacttgaacatagaggttgatgtcaactttatttgtagtagtcaaaattggcagtggcccaagactccatctgtaggtgaaaggacaaattgcatcatcgtcacacagtaaaatggacacatagggaaataagctggtaaaatgtgaaagactgacttgctgagggtagggaggaatgccaagagaaagacatgggtgatagttctggcttggtcatggtgttaactatagcttttacatttattaaaaataatcaaaacatttacgtaaaatggccttggttattacatttacagaatatccaaaagtatagtatggcttagcaactaagaagacttgttcctctttgaaccaagacatggttcctaatacccacactagtattcacagcctcctaattccagttccaggggatccaataccctcttttggcttccgggacacctgcatgtacacagtacacacacatgcaagaaggcacacatgcagacacagaaataaaattttaaattttagtatatggaaataaacaccatgaagtacatttctatattttttttcccgttagactgaagcatgcttaagtgagggttagtgaaccatacatactgcagagtttcctcatttctgcacaccttttttgggcttctttagaaacaataagaacttaaaggctgtttatgcttttcccccttaatatttaaagtttgtgtgcacgtgcctgattgaaccttatttacctaagtaaaatatcctgatgaaactttcccagtgcggtctacttagattttaagaatctgacccattctttccctccctcccttccttccttccttccttccttccttccctccctccctccctcccttcgtttcttcttcttcttcttcttcttcttcttcttcttcttcctcttcctcttcctcttcctcctcctccttctctctgtctctgtctctcatttcactcttttgatcatcatggacagatttggggtgaaatgtagtgcttctagtgactctggcagggagcatcagttggttatgtcctgtaaaaggcatacggctaaagaagcttttgaatggaaatggagtccctgttcttcttttttctgtgtcagctttgatttgattaggtctgaaaaggggaaactattcagatacactaaacagaagagcattagcccaccccctagtccttgtgttactgttaaattttggtaggtaaaaggcacagtacaactcacccctgcctccctgagaaccagccactaaagcgcacagtaggagggctttgtcatgaaaattccaaagcttgaagagactcttgcctacagctttccttggggcagcatcctacctgtagcagttctgaccactctactgaacatctctcagtgcctgtaaatctttccttctgaaagagactgacagagatctagtcacaagatataagtgcatctattaggcaagtaaccagatccccatcttgcagtagcctcatgtgggtatgtaagaagctttgataaccaggtttctatttgaatctggtcaggccagtctttggtttagtatgtgtgtgcatgtgactcttctctccttaacatttgctaacgattggggtagtatttgcatactgctggggactggatgatgtaaaacttgcttcttctctccaatattgttcttcatggtgagtttttatgttttacttacaactactgaactactaccatgcacaacaaagctacacaggtcatgaatattcaaaagtgtagctacctacctacctacttacctctacctctacatacacacacacacacacacacacacacacacacacacacacacacacaccacatttaaaaccatgtactctcatgtaaaggcacataaacaaatgtacatgtgagggcccttattaaattaacctctacagtcccccacaaactatgtccacaatgggaatgtgaaagctgtcctccactctttcctctttgcccatttagtctgttcctttattctgtgtattttgaaacacttttggaatcatcccctcttccccaaccatgctgccaactgctggtaccatactttatagccaggcataatagacagcatggattttagcactgagtaacaaatgagcaagtgttggctctgcttgtatttgttgttgtgatcataaaaagataaagcggtgttaatatatgttnnnnnnnnnnnnnnnnnnnnnnnnnnnnnnnnnnnnnnnnnnnnnnnnnnnnnnnnnnnnnnnnnnnnnnnnnnnnnnnnnnnnnnnnnnnnnnnnnnnnnnnnnnnnnnnnnnnnnnnnnnnnnnnnnnnnnnnnnnnnnnnnnnnnnnnnnnnnnnnnnnnnnnnnnnccacacccctgagagaccagccacacccctgagagaccagccacaggactgtatagtgtagaaaagagtttattcagggcaactcaatagagagttaagagggtagtagaggcagagaaaaggagaaagtagagaagtagaggccaaccatgactacatggagagaggggggaagggaatggggagagagggggaacgggggcaggggaaagaggcaagggagaaaggcaagagtaagaggattggacaagcagcccctcttatagtgaaccagactacctcgctcttgccaggtaactgttggggtgtagtttagacagaataccaatatttgttgtgtgatagttgatgagatttaacttttcagagcttctctgtctttgcctgcagattaaagataaggcagtggcttatgagctcttttatcaccctctttgctcctctgtgcccttcctccacttttatctagaggtgttattataacatgcatataggcatgtatgtttaaggcctaagacatatatccactttgttacatggcagtgttttattggttggtcttctgtagaaaccctccttgccctgccttgggcccagggctgcagcctagttcctccctcctcacaggtcagtaggtccagactgccagtgttctcacttgctccatgactgtgtgtcttccatctttcccctaatacagaattccccacttggttttcaaagcctgagtccacactttcccttctaaatctgccctgattggatctatatgttatgtaacaactgtgtgcccatgagctctagagaaggcaaaggccaggtcccattcatctttctcttctcggtgagttccaatgcctgctctgtgcagtaatcacttgacacttgtttatgtggatattcacattctgtgttacctgttccagctacatgttaagattcgttgccatttgcccaagaactgttctattaaaacattttcaattttactagaaatttaatgagaattcctctattactctgtgaatttttaccaatccagtgttcaaagttgtatgtggaaagcagtgtctcagagggaagcaatatgaaacacatggaacatctttcaggagccacatgacaaaccacaagattcagataagaatgaaattccctctaaaagcaggcttagaggctgggcacaggatcctgataaggtagcagggagccaatggattcaggctttgaaagctagctgggaaattccatgtatgtgtaaaagggagaaagccttttaccaagccatgcatgaaggttactgctgtctctgctaggctgccacataagtaggtcaataaatagttcattcaagtataactttagtacctattctaaatggtttagaatcttttgaataagcatgaatttaaaaaaaaagaaccctctaatatattgttccaagatttttagctcagcaaatctcttctacaatcttttggagttggcaagttcctcagaagctatcctaaggatagtggtggtatagacaagacagacgaaggggctcatcactgcccttcatgccccctctccttattgctttagtggacagtaggaccacctagtcctcaggatccatcctcagagcactgctggaagacctctccatcttccttgatcaggtactgatttacaaaagcaagagtttggccagcccatgtctccgattcccactgccttgttcttgaagttgctcttcatgtttccctccagcaaatcccatggggaacctctgaagtgcctaagttactctttaataaatatctctcttctctgaggcaccatccctcctagttgaaccacctgccacaagctaaattattccttagtgtttacaccttgcggatatttatagccatcatcatggcaccccttagtcatcctccagccccggtgtgttacatatatagctcttttaatctttctacaaagtcagactcctcagtctcttaatcacttgtaccatcctctctctggtgcctataagagaacagtttgaatatatcccagatggcaaaaaataaccccaacatgtggtaactagggggagaaaaccacggaggagatgaaaggagcaatctccaggttaattagtggggtggccgcaaatatgtgcacagtttgtttcagaaataaagcaagctgtatttgttgtaactgtctccactttgaactcagtagtatgttggtggagccaagctgtgttgatggtccaaacagccactaaagacctttgactttgtactccctctgtgtatctcttgcttaagatggacttcaaataggatcacatagcgatacaagaaaatattactagtttctgtttagttttatggctttacgtggtttctgagcttcatataagctcagtaagggaggacctttgacttgtctctctcgttattaggcacatgggtattagtcatcttataaaattagcagtgtttactgaatatgatagcctaaataaggaacaacttcagtacaagagtgattgctcagaaatgctccacagacagcaggagaatatggccatttccaagtttgtttttttattagatattttcttcatttacatttcaaatgctatcccgagagtcccctataccctccccccacctgctccccaacccacccactcccactttcataatgttttgaaaggctatgcagaaatgtccactaagtgattttctccacacctgattcagccttgattcagtttatgtacttatcttacaaaatgtatcttgggttggaaaactaaactctgaaggagtccttaggaaaacctcccgattcctttgggggaggctgcaggatgtaccatctgtaagaagagtgtgcctcagctgtataagaaaggtagctggcaaggcataggagtgcatgcttttagtcacagcacacaaagtccagacagcttaaagcaaaaccagagaagaatgctgcttactggcttgccaggaaaggaacttgcaacagaaacaacatgtaggaacgctcttcactagcttgctcagttccttttcttatacacaccagacccacctgcccaaggatggcactgcccatggtgtgctgggtcctctagcatcagccattaatcaagaaaatgcctcatagatatgcacacaggcaaatctgatggagatgggtccctcaaccgagatttcctcttctcagaaatgcatgtctaagtttgtgttgagatgacagaaggtattgcaggaaggtacctgaggatgggcctgaagtcagcctcttcattaagttcctgtattgagtttttgccttggcttcctttgatgatacactgtaaactctaaggtgagataagacctctcctccccaaatgcctcttggtcatatggtgaccacagcaacagaacacacagcagagaggatgtgaccagcctccatctgtgactcctaggaaattttccttttcccagagtctcacgtggtccagaaagtgttccttctggcccagccatgcccctcctatagaattgtatgctttcttctgcagatgtctctaatgttctttcaggctgatcaactctgacagtttcttcgtgttttcttttaccaagcatttgtctgcagcttagaagatatgagtctcaccagagttcattagaatagattttaggctttaatatttgtaactgagcagttctgccagtctgaaggtagccaaggacaaccatttcctctcacacacaaagtaaggttgtgaagggactttttctctgaatgaaggaggggaagaggaaagtagaagccttctcatgttttattcaaatgttaacaaagaaatcgagaagtgtgtttccttaaaattgacaccatttttatcccaaatgttccggtgagtgatagtgggtatggcaggcagtcacagcagggggagctttctccaggagctcagtccccgtgggaagcattacctccaagtaatacactaatcgctttgaatcctgcatattttcacatactgtgtgcatacatacggatattaataactgttccctagacgtcacttcagcacttggagagctcagtgttgctaagcaagtgctggagatggaatcagatgcagatggcagttcagcagagaggattttacagagacgcatgaggagaaaggacggaggtgctgactccatccccatggatctttgagttctgaggtgatcagcttgtgtgagctatgcctgatattcatccacccactgcactgagattataaatggcattgctagtgcttaaaggtacttacctcagaatccatctactcacatcctacctgcatcttattcagtggtttctgtctagtaatttcttacagcattgagacatacataaattttactgttttgtgtatatgttctatttccatatatatcttagaagaattcatattttatactatatatatatatagatgtatatgtctatgtgtatatcatatagaaattcagaggggaggagaccctttttcatactaccttctgatatctcagactaaggatgatattcctatattatataaggctccattaagggaagtagcttgcctaaggtcacaggtcatatgtttctagatcaaaattactcctcctactttatattcatttaagagaaaatgcaaaatgggaaccctcccatggagtgagtattctatttaacaacattgtttaaaacagtgcgtccacactggatgtgaccacacagggcctggaacctatgttcttcactcaggtttgcctctcgcttggacggcaaagagtttaacttgttcttgtaaactaagcagctaagcaatgtaccaggctttttttttttttaacaaagaaatgttttcatcatagattgaaattgcatatgctcaggaaatttcacctgctagtacagagatactagtatatgatgtcacacgtttgggagattgtatgcacagcctgaaaagtatcacttttgagtccccaagggcctcaatttagagcctggctctgctgttggcttcctatgggatcttactcaagtcacaacctgtctcttgacctttgttttatattatgaatactaaagttgaatgaaataatcaatgctcttcactttctgaatcccctcaatagcgcattctgggcatttgggctctaaatagacaaaagaactaattggcttcctgtgaagatagtgccaattgcaactgtcacctgccactggtcccagccatgtatgtaagggtcattagatgactcatagctcactgtctcacaactcaaagttcagttttgttacatatttctcaactcattcacaaggttatttctgtaccagctcattggataacagggaaggttatctaatttaaagttcactgtgaaacagaaattcaaaagattatacatgcatttccgtctctttagatatttctgtctttcccccttagagcaggtactgtaagacagaactcttttagtggccatacattgttatagtctgccttatgctgctatggcataataactgagactatgtaatttgtagaggacagagatttctttattggtctaaaggatgggattcacaatatcaagatcctggcggggctctgctgactcctgaaggcccctgtgtgcttcaaggatggtaacttgttagtatgctgttacacagtgggtgctgcatgaggcctctttatagaggcctgtttaaatcctggagggagatgcccttgtgattttacaatctcttcaaggctctacctttaatgtgatcacattggctacatctgaggttcagattgaacacaatcaatacataaaacataaaagtctaagattaaaagagggtaatatggaaaacagctttgaaggacattaatccataagctggattaaataagagtgtgggggggcagggggagagaaggggagagagagagagagagagagagagagagagagagagagagagagagagagagagagagagagagactggagagcgtgtaagtgcttgtttccttttgtgaaacagagggtaaaaaggacatttgaggaaacctagttccctgtaactgagtcctggttttccatttgtaaagaattgttcctgttcttcttgttcatgtcaatatgtttattaaagaccacatacatgggttctacctcatttgcagaatattcttttgccttggttgattgctagaaatgagttcaaatagtcttctatcccacattgaacatatagctcattccataagtcactgaaatttcaggcatttcagcttttttattgttgaactgagggtggctcttggtattttgccatacaagattattgaaggttctgatgtatcagtgtgtaagaaagtttgtgaagatgcaagacactgtattaatgtaaggatcacttgctgatgtcctgggtagataatgttgttatggtgccaatatacaataccttcagagacatgttcctacaggtcacctcagggctaggcttgccctgaaacaaccagaataaactagagtattttctaccacaaatctaaaagtaagtgagctggcttaacctttgagtggaggtaaaggtaagagagattttcatgatagaaatcatggaataaattcaaccatatctcaaaagtagatattctggtagtggttgctgctatacttaacatcaatttttctgttaacagatcaaccatgaaatgaaagccaatatggatggcttcagagttaaaagcgggactaaacaatactatgtagaaattaacttgagaagagacttgcattggccaaaaggcagggtaatatttttagtaagtgtattctatgtttcatgaacattctatcaggccagatgtctttaggaatttatatttccaaagttagtaggtggaaagactctaaagccaactacctaggcaggcatgaaagttccagtactgatctctcagacgaagaatgcacagtgcgcccctgccaccttttcttaaatatactgatggagctatatatatctgacggaagattagaatcaggaacacacagccaactcaaaaaaagctaagtaataagaaatcaaatgacacaataaataggaaatgaacagacagtttaaaaacataaatacccaatacatgtggaaaaatgttcaccctcactagttatcatagaaattcaaattaaagctcccttggtattccattttatccctgtcagaatggcagtcattgagaaaacaaatagcactgcccctagaagcattgtgggtgtggctgctgtgtcatatgtgcatcactaggtggcagagagtgtagagaggctatgcctgtgctcagttctctgatctataaacatctgaatgattagcagcctaatatttcctgaaagaaataggcctggaatgaccaccagtctggaggcttgcaggccccagcagttcccaggtttgagagcaagccagagactggaagaaccatgcctgagactgaaggccccagtgagtttccagtattgatagagtagcagaagcccgaagccttgtatcagaccaacaagtcattgcaatgaacatttgcaagcagaaaagtgtagacgaaaaggtctgctttgggacccactacagctttcacaataagattgtctgatctctgctggcaaggaggtttcaagggtggacggcaggtatgatgggactaggtgtatgatgtgaaatttacaaaaagaaaaaacaataaaaacgttttttaaaaggacaaaaaaaaagaaaacaaataacaatgaatgctggagaagatgtgaacacaaatgagaccttatgcaatgcaaataagaatgtaaccgagttcagccattctgaaagtgtgtaccagagtttctcagactaaaaatatgtctgccatatgaccaagctctttcactcgtgggcacttagctcaaatactgtatacatcacagagatacttgcatattgatggtagtactatttgcagtttaccccaaagactgcaaggcagcatatcacatggtacttacatattggtggttatgggagcagtattcacagtaatgaatttaagtatccagcctaggcgtccatcattgaaggaggaatgaagttggggctggaaagatggcttgaggattcagagcactgcctgatcttccaaagaacccaagtttgatttccaacatccacgtggtgcttcatacaactgcctgtaacaaccctcttccggtctcctcaggcaccaggcacgcattgtgcacagacatacgtgtatacaaaacacctgtgcacataaaaataaactaagaataaataaaatgtgaacaatgaccatatcaggaaacatgctcatgtggaagagtgaagagtctcacttgttacagggtcccataatgacttctgagagtgagagaacggtcctctcccaagattgccccgattggttatccagcacaaagcagtcagccctggatccacatacatctgaacaaaatggatagaaggtggtgttgtgtgtgtgtgtgtgtgtgtgtgtgtgtgtgtgtgtgtgtaacaataatagagaaaaggaggatatcaatttgagtggtaggcatgagggagaactggagacaggaaagggatacaggaagtgggataattatattttaattaaaacataaaaattatttaacaattatttttaagttaaaaagaaaacaggctgagcaagctatggggagtaagccgctaagctgcattcctccatggcctgagtttcagcttaaaagcaaaaacagaagaataatggaaggaatgtcttgtcaggaccaccagcccagggatggcacactacccatagtgggcggtaacctcctacatcaatcattaaggaaatgttccatggactcacctatagcgtgatcttatgagggaattttctcagtcgaggtttcctcctctcagatgactataccatgtgtcaagttggcatacaactagccagcaaaaaagcaaaggactaacaagagaggaaaaggaccacaaagggaaggatagcagagtttgaggtactgactatgtccttatagacttgcttgaatatgtcttttgcatacagttattactaggaagatgttttaaaataacttttgtgagcaaatacaaacagcaagcaggcttgaaaatacctctggaagctcatatcctgtacttgcttagcctattggttttcctagactgcctgtctctccttacatctcgcctatcatgcatttggaattcagtctggctattcaggcttagctcaactattaagacatccataaggcatttaaatttatagtactagcatgacaaccacaggtttcagtacattgaggaagcccttgtagtgtcccaagataaaggagacctgatttatatacttggtttcaccaacattaaggacattgttacatgtggaaaagagaagataggtacacaggatcccaggctggccacagacagtagtaacatatgaaatcttttggtatgtgtatcagctttccggacctctgctcctggaatatttgatttgctaagcatccattgcttagaagctctgcatgccggccctgtgccagagctccttgcttcctgctgcctagtcaactgtgcttccttcatgccctggtgcctagaggcctgccgacattcctctggcctttcctgtttaaggcactgaggattttgtctaagtgacaggctgtggtatgcttttactaatgtgttgtctgagtccctctcaaagcaaagataccctctgcctgagttgcttgctctgcattctgaatgctctcctgaggaatagtttatatattcttgttaatgtaaagggggaacatttgggcgccttgttttctgttgctggtttgtagacctatttttaacttttgttctttgctgttttttccccctatgattgtgaattggaaggtgtcagactggctgcccttgaggctggtgtccctaatttatcccaagaataggaagaatttaaaggaggtaacaaaactggtcaggcccaggtccgggtccagcacattagcccaacctactctggaagaatattctccagacgtaaagagagacttgtttctgagaatgtaggccatctgcttctgtggcgagcacacagatgctcgttgaggccagtggtttgcatccagtaagccacagatgttcatcctttctttggcggtgggggtggggcagaaagcagcatttttctgcctcccccctctacctgtcaaaattgcattctcaattgcctttcctgggaaaactcttgcagaggtgttttagatgtgacttcccttgcatatttcggtagcacttttctctgcagtgtgccacacatggtgccttagactgttgaacccgggaaattcctcagtcatggtaagaagcgctagtggtgactagtccacttcttcttgtcacacaaaagcacactgaagtactggacaacgagctgacgtgaaggagattgaaaacgaaatatttttctttctggagcaggctttcactgtaggctggtgatcaaagatgtcccatacctgggatagctgtctaactctccagatgccnnnnnnnnnnnnnnnnnnnncttaaacaaaacaaaaggggaaagttaatatagaagaataagtgtgttgacttatattgaatttataatataaaaatctacttctcattcgaatccagtggacttgtaataatgttcacatgctttaatctattttccgcaaccctcagtgtgttttctacagtgaaatgccatttgttggcataaaattctcagaggtatggcatcatttttcaaacagagtatgcttcatttgatagtaagccagtaaagtttggagatgtggttttgttttcagcctaattacgaaaagagtgacaaatgaaaaaattaattttcttattctaaccaaaaaagtatatgaatttaaagcatttctaactatatgtctaatgataaaacaactataaactatattacaaatatcacaattgtattaaacatcaagaagatagcctgaaatttcacattaatatagttgtagcagacacagtccattttttaagacttaaacttctttttctcagtgtttcaaattagtttgtttgttttttaagatatgctccaatcctgcaaaagaatacaaaggaatatttacaggaccacatgcaatctgagagaaatatatttacctcttctcactcattgaaacatttacccctcccagttttgagtgtgaagtggctgtcagtccaatgtgacggggtgctgaaagccttcttcaatgagaagtcattccataatgccccatataccagatctgcactgatgaacaggcagtgcagctgtggggctggaatagatactttatccaaggatgtttaggcatgaagttagttagatattttctgcaacttactttcctcttctttagagtaagaataatggtagtatgcccatgtaagggtaccatgaattagaaaggagttaatacaagagcctcaaaaaatgttggcaattcatgaagctaggtctatgacctgcaaaaggctgcaggtccttgttgatattcctagttgcctatggttatctagtaggatcttgtttctgcctagtagacatgaactataaggagtcaaggtgactatggcccttacgatcccagggtattgggttacagaagctgccactcagagtaatacacaccctgtcccattatttactttctttccttctggtcctgtagtttgaacacatgatcctagtatatattaagcaaatgctctatcactgagctatacctaatcctaaaattttatgctagattatagtctgttactgtttaaatgttaatatgttctttaaaatctaatctgatacacacacacacacacacacacacacacacacacactgtagctttatagaacagacagtgagaagcaggttcttaaggaactcccaaccatacagtatatggtgccattaagtgatgtagatatgttcaaactaagtgcagactcagaggcagtgctgactggactctagtctcttatatgatgtcaagtgtgtggaatgagacttggcttcaagatcaccagaaatcagaactagaaccatggggaacggtcagggtggagttgcagtagtggctccatggagaacaaaatggtctagcagcctcagtgctctggaaacagctgaccttcccatcagtgagggccagctacagaagagtctgaatttagatatgaagtctgaatgtagacaagatacacacacactaactgatgtactgactcttccagggacggaggctttcctgaattgttctgttcagtagattgtgcttttcaaccccagtatcctgaatcctgctcctacctgtatatgattagagacagtgcccaggccccttcatcaagcatatgagtttccctccattgccttctcaggagccttagctgtctgctcagttgactctgggagattcccgctatgtgcaggggagatcttggtgggcttgctacttaattcagcaaaggcagtaatgctatgtctcttgctactgcaggataaatcagctgtctccctcatcttgacttcattggacaggtctaagaattcctctgtaacaagcaaccccttatcttctaggccgttgtgcccgctgtggggaaaatgttgttggagaaggaacaggatgtactgccatggatcaggtcttccacgtggattgcttcacctgcattgtctgtgatgtcaagctccgagggcagcctttctatgccgtggagaagaaggcatactgcgagccctgctacattgtaagttgccacattaggtcttcatctgctctgtcttatttgaccaaatacaagtcactccatataaatgtcaccatcagttctttgacgttcaaaagatgtgtacacatgtaaattgacatactgtatttttttctatataattacagttcacatgaggtcaaaaattgtgttaggagggggctgcctttcaaccaaaggtcagccagaaagctgtcttgcctgtgttttttatccatgtatataggaacagtatgttctctgtcatgtatatgaaggattcctgttctcagagtcatacagtcttatcatgcatttgaaatctcagtattttaggaaagacttagcaggtggcagaatttgtcaatggccttctaaacttctggactaattatctctgcagaatcattttacctccctaatcccccaggttgtctatggtgtagagaaactctttattataaagtattaaagagaattgcattctaattctgactgagctagaaatggttttctgttttaaagaacaaagctatttttgaatagcaaaacttagtgactaaaaataaataacatttccttagcattttatatggctatttaatctatttagctaccttctgatagagtagattacttaataagaaaactttatacccaaagtaaattcctttactgtcattctggttttgatctatctgttgaacatatccatggaaaagtagtactttttacaaacctaaaaattagtcacagttgcaccctctgtcaaggcatttcaacagcaaagaaaccttgagaataagggactcagaaatttgtagatctccagagtttaattttattggaatttctgccttggttgatgtcttagtattactgctactgtgatgaaaaaccatgatcaaaggcagcttttttaggaaacagttcatacttccaggtagcagtccatcactgatgaaaatgagggaaaggccatagaaggatgctgcttggtggcttgctctccatggctccctcagcctgatttactatagaacataggaccaccagcccaaggatgagctgagctcttccccattgaccactaatgaagaaaatgccttacagacttgcctacagccagatctatgatggcgctttcttcattgacgttccctcctttccagtgactccagcttgtctcaagttaacataaaattaagccagcacagttggtaacaaaattctgaaaactcaagttcattgaaacccaaggatgtgtggcacaaagaacagttctccacgactgacatttctacgtttcatctcttggtttccatcttactttgttttccttccaggaacaacttaaacacatgtggcagcattataatcccatcagctaaagcaggtgggagagaaaggaactgttttcaggtcactcgcctaactgctctctttagaagtgagactagagacacaggcgtagggtggcttctggttaccatcagtcagagtcacatttcttccttgtcctgcgacttgggcagtgctgcatgtcactagctgttcagactgtaacgataagcatagcagtgccctgtctatctggaagcagcagcatctacaataagaaaaagtctagtcagcaaaacctcacctcttacatcattctactcttcaagtaccaccctgtgaaatcattgttgaaaagaggaaggccttttataattctgacctcttttaagtgggctgcactttctagcgactcaggacagccttgtgcaatcgtttattgctgcaagttttggcagccaagtcagcaaagcctcgtccagccatctagctctcgtctagcagggagcagtaacctttttatagctcctgtttggtccctttttactgtgccactgatcattgctactgtaacaatgcttctgtggaaggcatcttaagctgtttatttttatgctttgtaagcaaaggtcttacataaaatactgggaaactgtagcagcatgcaaagaacgtgagtttgaatagaattcagtcaaagctttctgtcgtgggcaagttacttgctctttccaagccctggtttttctttctcatctatatactggacataatgggatatttttccatcagctccctgaggatgaaatgaggcaacccttgtaagcacccttagtctactgaggaaaagctattctacaaatgttgcatctgtacttagtagttaggtttggggacctgttcaccattccgtatgtgtgcagtgagactcagactcacttagctcaaggaagctggtttgcttcttggatatacctatcttccatttttttgttaatgtttgcttacctcggtgcacaacaaagcttcagtttcatgtttttagtcattttctatagtgtggcagattctattatccagactctattatatgatccttgagattgcttaagtcgctggctccctctgttcaggttgtgtgtcatagcactctgcacttcaagcaacgcagagtatgtgggaaatatttaatcatacacatggaagagctgagtgaattcaaataatagagaaccttactatcctttctgtgttttctccccctcataagaccctgtcattgaggtccttgacttaatggcctcctttcatagctacccagaaaggttgaaatcttctcagacttcagttccattttacctaaaggccctctctgttcagaatcgattccaggatgcagcctggacctcgtgcccttgaccgaggtatcggcacttccaactccttctaaactttcacagttctgataagctgcatcagaacttcagagggaaacagagagtgtgaattagaacaagctgcatggcaggtggacttagtacaggcggtgctaggattgcttgtctctccaggagctaaagttctagagcagaagaccctgctcgtgggatccagcttcgtatcacacggctcgacacaggtgtcccaaagacattgtgaataagacaagacaagcaagtccctgggtgccagtccatgggactcttttctttctgttcttgtgtttggtttgttgttacttaattgatggaataagatataataagaatagcaaaggcaatggcttagttaattatttctctgtaagcaccaaccactcatgcttgactattgatccaggagtaaggcctcccacctgtaaaacaaaacttaaatttccttctgaattggttattgataagcctaaaatcatatctaaatgtaatattgtataccctgacattcagtgcccagtaatctcatcatatttggttaatcacattagttctttcctatggtctcttgagctcttattctttgtgtatctgcatctacagttaaacagatttgattcagtgtggtggtatagctctcttcacatgtattttacctgttttctgtcaagtacctgatatgaatatatgcacaccatacttcagtggcaatcttcacttttagcctctcatctacttagatttatagtatgtttatgaactaccttttaaagcaaaagtatattttccattcctttatcattatattatgcttaaagaaaattgagtgaaaattttatatctttatttaaaataaagtacaataaaataaaaataaaataaaaaataaataaaatacttttaaaataaaagtaaaataaactaaatttacaattaaattaaaatttaaaagtaacataatttttaaaatgtagtttattgttttgcttagggtttccattgctataaaatgacaccatgaccaagcccactcttataaaggacatttaattggggctggcttacactttcagaggtgcagtccattatcatcatggtgggaagcatggtggcatccaggcaggcatgacactggggaaggagctgagaattctacatcttgttctgaaggcaaacatgaggggactgtctcacacatggctaggaggggggtttcaaagcccaccccacactgatacacttcctccaacaaggccacacctcctgaatagtgccactccttgggccaagcatattcaaaccatcacaattatcaactcaaattatcaacatcagtaattctaggacattgcctgctgttcttagttttgacctagaacacgtgatcctcctgccccagtttcatagaatataccaccacacctaacactttaaaatatttctttagaaaactgtttctggttgacaagcctgttgcaatcagtgagttcatatattaaacgatatgttattccctgttagatttatttagattcatctgggtcaatgtaataagtatattatgtcctagttattttaactgatgcttatatcagtagtagtaaatgatcttgtaaatgactcgtttcgattatgcttatagttttgaataaataaaaagattaaaattaagagcacttaagtttattaggaagtaaaatgatttaaatagaatctatctaccttggtcctatctgtctggttataatgttgggtacatcatttgcctccaagtaccagggtgtttttgtttataaagttaaaattccctaatgtcatagataaggaatgagcaagtgtgttatttttgtatcatgaaactattggattaatctgctgagtgaccttattgtgatacgatggagaagctgtagcccacaatgggcatgtttcagctgctgttgctatagaaatattgaaagtaattggcttgataggaggaacacagggtacatgggagatgagtgctttgcttacagtcatttgtggttttaggtatgaagggcatcaacaaggccttcagcttgtttgaaacttctctggttgaggcaagcttccttctgagtgttaatgtaacaaaggagcacttgctttcttcttggcagtgtaaaggagcctaggccttgggacatacacatcagacgtcctcaggcagagtctgtttatgaaacggtgatccaggatcctccactgggtcagggcttttggacagagtagctggaaaagagaggcaggcatttttattagaattgatatcctactgactagcagacctctgaaagtagcaagccagtctcctgggagactaacttgaaagtaccagaacctggcacattaataaccagcacattagcagccttttgctctcttatggcactaaatggtgaagttaaagcagtctagattttcaactccattaagatgtagttttcttgtacctctgcaggaaagctgtccttttatgtactaacgtttgtcctaatggaatgttttaaaagcagggccctgcgtgggtgttggaaaaggaaccaaagagttgggacagagtctgaaaaatccacatgagcattgctctccctaatcgcccacctctgctctcatcagcatgatgctgcttctgcctccctcggtctcctactgcacacaccacctacacacttaaacacatccattcctgctgtcttactgtcaccccaccagcactctcccaataaggaaaagggttcgagaatgagaaacattgttttaaaaaacactctccaatgaggttgagtgtatgaacctgggtgtaatcaccctcattcctgaccttccatatggcacaccatgtctgttggagctgtgataggcaaggggagagtattaggcctggttacaaatgaggctttgatatggtcaaaggaaaaggcaaaatgaaaaccagaaagctttcttctgacctggtgtccttatttgttattttatttatttatcttatttattttattcgctttatttatttaccatgctgttaccctgaaaacttacattcatccttttgaaaacaccagaatgctgccagtaactggccactcactttaaagtcacagaagctttctggtcccaagatttcatttgatagcaaccactgactgaattgtgccttctagcattatagacaacgggtaaaaagccatgacacctggtcttcccttcagtatctacaaatcatggagtctcaaaacaaaaagaatgcatttatgtttagagttaagtgtagtcatagtgataaatgccatctgcccaatagtataagtgtattttttagtggttttctttgtctgttggtctgaaaggagccgtggagatattggttctgctccttttactgtcatttccagtagcaagaaactgagacttgtacaactctggtgtgatgagctttgtttttatcttatattttattttgttgttcttttttttaatgaaggaaggaaggaaaacctaaatgactggtttttctctattgccttctctaggtggggtctgggatttttgtggatttgtttgttcattttttagatttaattcaagctggatttagggatatataaccttgtcttattttagagaaatgttgggatcaaaattgtctttttaatggtagcgattcttttaaaaattaatatcttttaatatacagtcattagaagactagaaaaagaaacatatccaattctcccatgccgtatctgcagtgtgctgaatgtgcatcttctgcctctgtgattgtttgcgtggtcataaccatggggctgtaatagcctctgatgttggtgacacatgccgagtactctcaccttacttcctaattagctacttgcttagttgtctaatagtgtgtcaaactttgttttgtacagaaatattccatggacattcataaataatatataccctttctgaagagtgactccaaaagaactattttgttagataaacacattaatgagaacattccaaggtcagatgaaactgtggtaaacaaagagccagtaaaactactagctgatgagaaaaaaaaaatgggatataggatcgtgctcagtggtaatccacttgcctaccatttgtaaggcaggaaacaaacaaggaaacatgaaaaggagggaaacaaaaaaatagaaaaataagcaaagataaattagcaaattctgatagttatattcaagttatagtatttcaagagaatattttacaaagtcaaatatcaatatcctataatatgaaaagcaaaatacaatttatgacaaaactaccagattaaccagcggacatgatgttattcgcaagcctcccgtattgcaggaaggatcagacttcttccccttctgtaagtatcgctacacagagaaaccctgtcttgaaaaacccaaaaataaaacaaaacaaagtctcactgcactgaaatatatagcaagcaatcctgatgaatgatgtggcaaaatgaagacacctgttctttagaaagcacatttctttctgtctttgaccaattaattacaggagttggataatacaattaataagattgattgagtcaagatacattgagtgtggggctggtgagatggctcagcagttaagagcaccgactgctcttcgtaaggtcctgaattcaaatcccagcaaccacatggtggctcacaaccatccacaacaaaaatctgatgccctcttctggagtgtctgaagacagctacagtgtacacacatataataattaatttaaaaattttttttaaaagatacattgactgtataataaagaaatttattttcccgatatccataaaatatttagaaaaacatttatcaaatcaaaatctaaaaggaaaatacatatggtacaccagtttagtcctacatcttgggaggctgaagtaggtatgttgcaagttcatggccactcttgattacatagggaaaccctgtccaaaaggaaaaagcaaacaaattctgaaagggaactgtagctgaatccagcagttgactagccaagataacagccgagaaatgaaaagttaagtaaacaaacaccctgcttgtgcagactgcttcaactacggaaggaagatgataatgcctgccagacagaggacgtggatggaggtctaagtcacagaagccactgtaaggagagtacagaaaataccttgatgctcataggagatgctgcctaaagaaggggtgggatgcaggccattcatgacaagttgttggtaactgaaaaaaaattctaggatattctataacagtgaattcaaggccagctgaggttagaaaagaccctgtctcatggggaagggtcggaggtgggtgggaattaatgaatgcggtacaaataaatctagacaaatgttacaaactgtgggggtgaaaaaagtgtgggcataactatagaccatttcctttctctccactgaacctaggctcctttgctctgagtaaaatgctttaatcctagtacactttttctcaatgtagccttgctaacatgcacaaaaccttaatttcaaaacccatgcttcataaaccaggtatgctagcacatacctgtaactacagccagggaggtgaagacagggtgattaggagttcaatgccagccaggggtgcagtagaccttccctcaaaaaaaaaaaaaaatcacatgtttcataggaaagatgctttttctgtaaatctaaaatatgcaaggggggggggggaccctcaacctcaccaatgtagatgaaagtcagaagtgctacctgagaaaaggcgaggaaatgtcactaacagggtttctcctatcttcaaagaacaaatgatgcctgcagtgtctccaccctcagccttctgagaccctaacttagcctgcctcagggagggagtgctaatctaactgcacatgtggagaaagcctaaaagaaatgttgagttcagtgctgcgtgataaattggagtggtaaagtgaatgccacatagtaaaatattctcaattatttgatgagtgcaatatttgaacaatattagcagcctttaaaatacttggtttaaactcatatagcacattggggcagggagagaatatgagtgtaattctctccatggatacgtttcactgaaatgatacttcataaatttgttacaaattttttaggatttaattattctaaagagtgtgtgcgtgcttgcatgcatgcatacatgtgtgtgtgtgtgtgtgcatgtgtgtgtacgtgtgcatgtgcgtgatgggtgtaccatgctggtagatgtcagaaaagggcatcaaatcccctagaactggacttacaggtgtttgtgagcctatgttttaggaaccaaacccaagttctctgcaagagcagcaaatactcctaacagctgagccacgtctccagcctatcatgcctttttttaaaaacaagcaaccaccccagcacaaagccagctctaaataaaatgaggaaactagtttagttgaataaggccagccttcctacccttgaatctaggaatgtgcacgatcatctcttatatttgtatttttctaaacatgctttttaacttttgaagtaggactatgaaaacaaaaagaaaagaaaaggctaaatgcatatatgtttgcacaattatgtaggttttatttttttgacacagacataacaaataatataaaggtccacatacttgttacccggtttaacaaaaaactattagaaatgcactggattctttgttctcatcacagtccccaaacttccttctgtcatacccatggggttctaatgcacatctttgcagtgtgcactgttgtttacatgcagggtttcatagctgtaaatatagaacatataaacatttatagacaatggtagactataaaacatgattaaatctaaagtggtaggacaaagcctaaaaagctgacaagataaaagttacaaggttagatttaaagaatacatgagagatagcccttccataaaagccgtaagaaaaactgagcaactaggcaacactggaaattgtgtctgtgtaacggaatttagggtgctttggagcccgcctgacacttgtatgccactcttagagccactcattcataatcagcagtatgtccaatctatggctaccttttctaatgatatagctctgtcctcctgtggacactgggcagtactttactgacagagaagctgaagcacatacctcctagttgactgaccagagcaacaggaagtccttattgataacatttataacatttccccctaactcttatcccaaagtataccaatttctattgtatttgaataagaacatttaaggcccagaaggaactaaaattaaagaagtactttaattcagtgctgttgttttatggctggaaaagctaacagccagagaaagtttgttgatttgcctgaattcacatgtttggcaatggtagaagcatgaatagaaaccaagagccttggtggtaccttcagagaccctccctctttaggagagttttgaaataactaagcctatgtgtctacagagacagagtgatccctggggaaagctggactctgcccacttcagtaggaccgtgaaccaggacagcatttgcttcagctctgaccagaatgaagggtctcgtatttccaggttcagtgcctctgaaatgttatgctagaaccttcttcctgccccagtttgtttatttttaaatgaagcatgaactcaccagccagtgtttgacagagtttggatgaatgtcagcatcaggccactgcaataatggtttaagatttatatttaaatataatcccattacttatacacttcattaggctgagtgaattgctggctgtggttcagcaaagttcctactttaaagataaaggatggaaagagaataggaaaggagcctctttattccttgttttctttcttattcatcttgcagctcttaatggacagaaggacaatagttagccatctacagcgtaacgtctgcactgccgaagccctctgaactgctctgcaccaccagaacaaattgtccatagctttaaatttcctataagtagaaaaagaaaggagtggacttggaggggggaggggggactaagctataaaattctaccttgaaactctgtctgaaatgagctcctgggtcctcagtaatataacctttcacttggggttggaaaatacaaaaggaaatgagtgtaaagatggagaaaatcaaattacaaccagccaccattcagcatctactctgtttctttagcttccgtttctgaacatatagaatgacagtttctccttacctctcgtgatcacacagtgaaaaaacattccgagaggggggctgagctagagtcagtaaggtgtgcgtttgattgtttgtatgtgtatgtgtgtgcttgaattttctttttaactgggtaattgcactaggccagagtccaaggcccatgagcaaagccttcaaaagaggtcttccttgacttgtgtctctagctcacattgccttccagcctctggcacactcctggaccccgatggtctcagagctcagggaatatgaggccttgaggtcctcaaagcttgatttttacagcatgagtcaaaggtcatctgctttcaatcactggctgtgttcattaaacaaatacgttctagaccctcccaagtccctgtacaggaggacaagagcatagcacattctgtaagccgagggtcaaggaaggcctgtagtttgtatgtatacaaagatctgagatccatgccctagtctttgacctcacatgaaaaatgactccaggtttcttctccttccctctcttccacgagacttgtttccagtagcctcctgtgaacattgacctcagaagcttctctctctgccctggtctaggctgctggctcccttgtgtctcttcccatctctctccctcaaacatctgaattaagcagccttcagaaactttcttggacaagacttttagcattttgttgtttttcctgaggttttgcttttattttttttgagagaaaaaaaaatgctaacatgaagttagctgggtagttagctaggaaggggctgggaggaattatgagaggggatcagaatagctgaaaacagattttaaaaattaggtaaaattaaaaaataactatgggaagtttttcaactatatgtgggttttcttgaacgttcaatgtcctttttaccaacaactgcatagggctgaaccttactataagtgatataaaatttgtggcttcttggcatattccttaatgatgtaaatcctaatagaatatataaaggcagagaggtcacatgtgactcacccctgttgggttttatggttttttttttcaatgtttatcacagcaggtgatcctatcattgctttgagagatgaaggttggaaggggacaagcttcatgccaatgtctcctcacagggtttggcttatatcctgtttgtttgccctctgtgcacttgaacttgagactctctgaaatggaagggaacaggaaaacttggcaacaggagcctatgtgcagtcattgctggatataaacatgaacaattgagagagaaggcgtgagagtgaagcaggctgtctagtttccagcccaaaaactatcacatgagctgtggtgttcaaggtcaagtgcacagattttccccacacagcaaaattaccaggagtttgatcagaagttctcttatgtgctgaatgtgacaggccacttccctcccataacccggttcacaaaaccaataaaaaaagttcatagctagttaacttccaggacccctttagcacacttccctgcagaggaaggcgtgtcagccccaaatgatgccatcattcctgtagagcaggttcctttttccttatcttacagagatgtaatatatggggatgtaatatatggggatgtaatatatggggagtaacagtgcctaacacgggaaaatctgcctgaaacgtctccattgcatgactgaaccaactactctaaagcaatctggatgtattgaatgcatatattttgtgatattttgcattggaccaagtatttttatataaatagtaaacaccttccttaacagttattacatgttctgagtcccttaatgctctcaggggtggctgaagtaattcagaagaatacagttgatggtatgggtcagttgaaatgaaattgaatcttctaagatatattcctcttgaaagtaaatatttatattcttccaatttagccaaatgacctaaaaagttttctgttgtaaagcataacatatgcaagtagttctccagcaaatagagaatagttgagtatatttaggctcaaagggaagaaggaaggaaattccggtatcttgggagggaagtaagtattttcatggtcaaagctgcctgcaggatgggtcagatggctgctgttattccctctgtttttaccttctttttattaataagaacagaattaagacatgaagtaaaaccattttggaaagcaattagaccagatatcccagaatctatatcttagccccacccttgtctttaaataaccatcccctgccatcagatgtgaccttttcttctctttgtcagcaaggctctcatgtcagcctcgaagtctatttctgttacctacctctgcttcaagggccttcctgattggcctgtagttgagggtgtgcaatctttctgtgcctccagagtggctgcctttgcttctgggtacaccatttacctcttaatccttttctgtctacttcccacattggtagatgctctctttccctcacacatagacaagagtgacatgggagccagcttgtttttccttatgtgtctcttttctgtgaaaccccaaacctaatttcttgtattcagaatagtaccggaagctgtacctctcatcctaggggtagtcagtttgttcttaacagctactacaaaacaagtacaagcatcagagcgacagcaaagctaaccataacaaaacagtatacccagcggctatggagcctttagagaagggaggctctgactcagcagcagtcacttacctgcaatgggcctttaagcgttaagcccacagattggtccgcccagttctctcctcttcctggggtgctgccatgtgagcactcactatcatacatgcctgccaccagttagaaccgacttgcaccagacgttccttgctataacagactaaaatcagagtcagaccaaacctccgtttccttggttgccccatgaggtgtgttggtcacaggcacaaggagcattactaacccacagaatcagaaacaaacagcatttagctgaaccttttgaccataggttgatcaatgtattatcagtcctgttctggggtggaaaccacaactctaccctcctagtaataggagccgcctaatcacttaacaagtattcagccagcatcctcttaacttgactttcttcagctcaccacgggaatggcactggggtgaaggtattgtatggctgctacattttctcatcagtatatattttccttgctagttcttatcatattgtgaagaaaacaagaaaaacattgttagggaattagtgcagagtgctatgaaattgttcagaaattggcgcagttgacaggaagtggccccgattctggctggacagtgccatttcagcaaaggagctggcataacaccgtgttcacccataaagtccttcttgtcaaagtgtcttatggaattaactcctcatgcatggatcaataaacctcaccaatttgccaatgtaattaagaggtagcagattaagcattactaattaagctcaaagtataatagaatgaagaaggttatttttgtgaattgtgctgctggagtttcatcaaggatgttgcaattcttatagaggatactccagggcaggttgggaagacagtctcctctactttgaggggaaggagcatttaaccttatgtattttaagtcattgcaagtttttataactaaagagtgaacggggcatcagctgtgaggggcgtagagtgagcccaagccagctcctgcattggaatgtagagcatagcagagttagctgtgttctagcagagcacttgggatactgagaagggtcagacaaacaacaaagtaaggcagcgctctctgacttaagctccagagatccaggccctgcaaagagatcagagaaaagtacaagccctgccctggggccacgggaaagctgaccagcgtcagagaaccccaggatgggctgcattggaccatttggcctgggcctagaaaaccagcttattattcaatattttcaggaaataataacttggttcccaattgctgctggatggtattaagtagagaggagaaaaagtttcttcccaccctctgaaggagtaacacttgcatccatgaagtatactcagagttgacagataaccaggagaaagttgaagtttattaagtacatgggaatagcccaagacaggaaagtgactacccaaggaaactcctttacccgtctcttagaggatgaacaagctactaaagagtaattactaaagagtaatgaactcttagaaaaatagagcctagcctatggtcagctgtggggctctgttcaattccagtctctattcctttgataatgtttgtattccctggttagtgagattcccagggaagcaacccatgacagttgtcttccttttggacttagtcaaataaactaaccagaagaagatggacctgcactttagagagaaagaaggaggtggacactgtggcctttaagtgtccagtctctttcttctactcaaagtctacagcatatcaaaggatcataatttgggacattatttcctaaggcccatccctggcagcttgttccctgtctatgttaattatatacccttgaacacataaccaatatctcagtatagtaatatcttatacttgaattcatgtacccaaagtatgttcaaagttgtttttcctttgatatgtatagcaatcccatgaagcaggtgttttctaggatagatgtgtaagaaccaaggccctgtgaaaatacccaatagctcatcactgaggatggggctttgatgttcattgtctgactgggagtccacttttctcatctttgtagcctagttgcctgcctaaatggcccaatccataaagtccacctattgtaaatcctaatgtcccaatctgtgaagtacaccttactaagcaccttctgtactctagatttttaaaagaaaccacaatctttgttaaatgtggttaatagaccatcaattggatagtagaaattaaaattcaataccatatgcgcataaactgtcttcagagctgggcagtgggtagggatatggaagaatgtggggatgagtttttgcagttgatctaagcatgacagagtctgccaagggtacctgtgtttccatgttctttgtctccacattacctggggccatgtgcaggagcttaacctctgctgaccttcctttcagagcagctggagatgcagtgatcgtccctctaacttccaaatctctgtggagattttctcttgacccttgagcatagcacaagataatttaggtttcgatgttaaggctttaagattatttgtaaggaaaataaataactttatgatagttatacttcccagtggcctccacctgaaggatgggatctcaatagcatgtagtggctaagaacatctcttccgcctactttaaggaaatctgtccttaagagaagttgagattgattttgtcaattttacaaggttggaactctaccaggaaaccacattctaggtcactttattttggtcatttggaactataaggatgtttcatagctcttttctatacttatccatgttctgaactctttctagcaggcattttgagcaaatgttttccaaaaacatgagtggcaagttctttgcatctgaagagattataaggtgtggtgggtctaattctgggttaagttggagatccaagatattctctctagcagaagccccctgttagacttagcctcagcatctgtgcaaatgtgtaaatgaataaaacaggtttgcattaccaaccaccaaaacatacatacatgtgcccacacagacatgagaacacatgcatgcagaagccaagccaactgggaaatagttatctgccttgaggggaatctaaaacctagctcatcataaaagcatatttttttaaaaagtacaggcaaatgtataaacagacactacagcactaatttatcaaccaagcaagtttaagtgggacaagataaaaagaaactgtaatttaaatttttttctgtatggtacttgtgtgtaagtgtgtgtgtgtgtgtgtgtgtgtgtgtgtgtgtgtgtgtgtaggaatgtattgaatttgaaagtaatttatggaaagtgctgctaccatggtatttcaaatgctccacaatttgaatttaaacgactcaatgggatcattaagattattatgcatgttttccaaagactttcaaatgacaattttaaaaaatggatgccctttaaaaaccaaagaatgttattgcacttgtatagattgatgcagcttgaagtaattgccaccgccccttctgagcaagtacctgatgatagctgttcgagagacataggtattagcgaggtgccaagctgcacacgcatctgttgataagtaaaaccggattatagagcagactttatggacaaagacttatttcatttagtaaaactgacagtataaaactgtgaaaggatagagtgttcagcatcagtgtgaattcatgccgggctcaagcccagagattgtgatagcagaggctcccagagtgaactccaaaaggaaggctccctcaaacccagtacttctggcctttgctccctttgtatgggtgggtcgccttccactgtttgcctcttacccagtgaacaacataccagggtaggagggatatttaagcatttttcaaaaggaagggtggttgtttggtttgcttttgccaataaacttattattttaatttaaaaagttgtaattctgatctttggaaatatgctcgtcctttagttgtctggattttgggttttttagacagtgtctcactgtgtagcccagcgttaggttattgtagcctaatagccacatctgccttgaacttatgtaccaaacacactgtacagcaatacagaggaacacggttgttcctttccacactgttagaattttattgactttgcaaacaacatcagtttcctaggctgcaatttacaaagcagtctcaatttcccatgatagctagcagttggcaaacacagttcttttattccgatcataattactaatattaactcccggatcacacgttacacttcctacagtaattatatgtatatcggaaggttacagaatgactactaaaaggttaaagaggctgccgagttcaaagaggtcttgatgggagcagaggtggagggctgatcctgattcagagagtcactgcaggtggttagatgagctactgaggaatccagttgaagaattattgaaggttcagagcctggcagcagtagtatcccacatgatcctgacccctctgctgctgaagaagctcagttggtcgagtgcttgctcagcactgtagtggcatgtaagcctagaatcccaggatttgggaggtggaggcagagggttaagaagttccaggttatcttcagctgtaaatgagctcaagaccaccttggcacatacatgaccctttaaagctggaagaaaaatctgataactcgtctcttcattcaagtggaatcaatctgaatacagaccctgctgcttcctattgtgtaagatgaactgatagagactaaggtccttcagatttctgcaagtatttcttcctattaagggaggctgataaaaaaaaagtggttctaattttgttaggttgtcacaaatactacatgagttcatttgtgttaagcggccagcacagtgtccccctcctgattgggcccctgtaatactgactgtcattattgactttaaccctggaaacacctatcacatcacatattttatagcaagtagattataagtatactgtgagcatttgtctcatgttgacatcctttgcttttccctcctgttccactctcctggcagtacttcaacctggatgaatgcactacttgtcttttgcttgccaaagcagctgactattgtgagagaaaaccatgcagccaggcatggtgatgtcattgtacattctgaccaacctagagctgggcctcagtccactctgcattcctactttctgctcccaagcagttcataaatctcacattcttacccagtttctatctgcctcatccctactcctttcttaagggatgcttttgcttcattcttcatagtgacgatggaaacttcaagaagaaactcccttagctactatcttagttggtgctgtgaagagacaccatgaccatggcaactcttaacaaagaaagcacttaactggggctggcttatagtttcagagtccacacaagtatatgtccacacgcaagtaagtgaacacaagcagagctggtcatatctgggcgagactgacaacttgtctcaacatattatactggctttgacactgcactaaagttaagtctttttcccagcaagataaagggcagatagccttcagctcccatgagtcagtagtagtcagactagccaacttttaattattttaaatgatatttgaatatttaaaatacaaatgtttcctttgactacagaaataagttaatatggtataaacaaaagtgaacttaaaaatcatttcctgtcttcttaccccacaggccataacatttcctgccacctctttgatgctaaatacattgaagccttttaatctttttttaaatttttttgagaagctcatacatgtgcatacatgtatgtataaatactgtatttacatttccatacctttttctgtcttttttaatcccctatgttctcttcccattctctctcaaatttatgatgttttctactcaaattattattacacacacacacacacacacacacacacactcacacgctgctgaatctatttggcgttgtgtacacacacacaccaatctgttaaaaaatggacacttcatcttccctctgggactgaacaaatcttttcccttcacagaacatgcaacctttcctattgtatcctcacctctagccaagaactcctaaaaattagaaaattctggagatcttagtctcccagtaccctatgtgatagcctcctctttgcccccatcaaaatatctaaaagtctctatttcaattgcctatttattttccaggtacccaatcagtaatgaacttcccctggggcagaaggactccaatttgttttgtattctttgggccatagttgggtcaagcctgggacgttcggcatagcaggcaagcactcacacctgagttcagtttctcagtgcttttttaccaaggggcaggaagtgagaagttctgaatgaatatgaggtctgaatgaatatgaggcaaagaactaggattgatccttcctctctctctctctctctctctctctctctctctcggattgctatgtggtaagttgttgtgtgcttgttaagtgtttccacaaccgtgctacatgaaattgcatttccgatcctcttagtcatttcctacgaatgttgccaaaattattttcagtttgcttttacattctctccatctcccccacattgtgtagactagaataaaacaatgtctaactaacactgactggtttgtgaggactggggttgattggggtaggagggagagaagggaagttaggctaagagtaattaagaatatatatgtatatatgtatatatgtatctgtatacacacacatacatacaaatgtacatgcatacacacacacacacatatgaaattcttaaggaacaaatttaataaaggattgtttaaactcccctccctttttggtatgaggctagctgctcataaagaaaacaaaactaaagaatagaagtgaatcatgatgtggggaaagtccagggactgtaagtgacgtgtgcctctagtgcctctggtgggcacaggtccacatctcaaacagcccagctgttgtagccgttagcttctcttgaggggctggctgacagaaggaaattgatgttgcttttgagggaggaacagagcagcaaatgtaaagataatcaggccttcctccaccctagtgagaaaaactgaggccgacccctaggtgatgtagctactcacttcactgctgtgcagaagcacaggtaaccagcagcctgccccgctgaggcccatgttttcctttgtggcatgtgtgtggcattcattattcaataggatattcatattcgggctctcttggaagccaccccactcctgtgcagaggcagcttttctgcctctctgtccagtcaccaagagaacctttgggaagctgcatcctcatgtgcagatcagtatggcagatactgggcacagctggaaccttcatgaactcacatgcctttacctaccagggactttatttttattcttgtcttatgtggtagatttacaaagtgtataatttcccttgcaggacaggagacagttatttctgtccttcctctcttccttccttccttccttccttccttccttccttccttccttccttccttcctttcttcttttttatggttatatttggtgctggtttctataggtattgttttgtttcttttggttctcttttgttttgttttttgagacagggtttcattatgtagcccaggcttctacataacactcaattcttttgtctctgcctggtatgcattagcactacaggtatgtaccaccatgcccagccaggagtccttttcttagctgacatccaggtggcctttcttagagatttctcatgaacctctggctgagaccatatgagtaatgggcagaagtcacaagaaaggatagcatcgttcaggaaataaaatgagcctggttttaagaagtgttttggcaacattgccttgtatcctctgctacagtacttacacatgggtgcttcgcattggtagttggcagttctcaatgtgtgttcagtgtttctgacctctggctgtattagaattaacatgggaattttcattttttaattctcgtaccgaggtctatatccttgatcaattgaaccagactttcaagtttgaggcctgacattgacagtttagcattgttttgaatcacataacaataaaatatcgtataaaaactttggggtggggaggcctaggttgattgagggtctaatttaaagtgaatgatcagcagagtttgaatgactcaggtactgtcttctgccactgtcttgctctcaatttatattttgttgggctcagtaggacaaggagggagcaaagaaaagaaagcaaccttttccgaatgcattttcatgtgctaaccaaggattttttttaagaaaaaaagccccagcacaaaggagaaaagtgacagaaattagtctatgcagtgaaggaaggactgctgcaccagaaatcagagccttaggctggtgctgatctggccatgacctttacattgaagggaactcaataaacatcaaggccaggcccagggctcagtagtttaaagtgcttgcttcacaaggctattgccctcatgcctggagcccatggtgaaggtgagagcagatgcccaaaattatcctctgaccaccatacacacatagtggtggtagtgtgtgtgtgtgtctgtgtgtgtgtgtgtgtataagcacaccaatactagttaaattaatgacaacatattacatctatatgtttttgatgttatgttatattattattgcatatttaaaaacttagtgctttaatacaatagttattttttcaataatggctccttgttggtttccacttgtggactcagggacatgaacccactttgctgccaggtctaccattgctctagagctctaaggcccacaggctacagccttagccttggacacaggaggaaagatggtggccagggtctcatcaggagctgcagctgattgccatcctggaagagtgaccccatgttccttctaccatactccatgggctgggactcaggtgataattacaagacacggttggaagtatgactaagctgagccacaaagcagggatgcttcgatgcatgtctagcctgtctttgctctctgtcaccattccagagccattcgtattggtgtggttcagtctgaaacaggaagctgtggtacctcagaacaaactgtggttgatttagctttctctaagtaaaataaacttatatattgttcctatatgtgttccttataataatctaatttgaaccagtgactaaaacatatgttcttggttcaccccagttaggtaatttaacctctaatttctctgttttgaaaattggggacaccttattttttgggaaggaaaaaatatatttacctattaacaaaactcatctaggaggctgctgtttgtaagctgtggatgttgaacagtcagtgaagcagactttcagtctggtttaggattttcatttccaataaagaacagacagaagggtcacggcactcattcctaaggaagtgatgccttactgagctgaggagtggacaggaggttagacgtctcaggcagtggaacttgctgacttgaggacctgaaagaggccactgtggtcagagaccgagagagcagcttgaagtaaggcgggttttgagatggacagaggtcttgctaaggactttgggctttctcccaaaaggcaaagactgcttagctatttcattatttcttacacactcatccattaccagcttttcctgaaaggtctttggcagcagggaagaggcggaggcagcaccatgagtaagtgaacagagaatctgctccctgagtgttgtgggttttagccacaccccgtgttccatatctctctctgtgaagcgccttactttctaaagctgaaagaaagaggagcttaaattaaagcatggctcagctaaaatacaacctaaagagtaaaccatgtttcctgctccagatgtgaacacatctgcattttctatcacatgatttaggagagacaccttgaacttggagccatccctgtctttttgtctgttaggcaatgcttattacagatgacttcctggcacttgtttccagaaagaggtccagcgtaaatccttctgaagccagcatactccacttttctgtacagtgtgagccatggtgctcccccttttataatcttttaaaaaaatatctatcctgactgagctagacctccttaatcttcattccttttcttcctgttgaaatggcaggtttcctctccaaaatttggacaagctttaaaattagatctcaaactgccagcctcacaaatctgccctgacaacaaatttgttgattgtgttttctcctcaagaaatagagtagctctgagaggcattgtgtttagctagctgtcctggaaacacagatacagctctgggctctgagccgaccaagggttgtgggcttcagtgacttggcaaagcacaacaggacagaagccggcagagcatgaagcctgtctttgtcatagtttgctagaaagccagagtcaggctcccagcatgttctttcccagactgccacatgccataggagtgagggacaattcaagtggctgtaacgtatgtaagtcagtccagtctgtctttccatgatgcctcatgtgtgactgttcctacacactaattgttgctcataaattaaaatcatagaattgtctaaacctttacatgtagaaattctgtgaattaggtttgtgtttgaccccagttgtctgaccccatgcattctgtctaatactatactgatcctggcctcctttatagtccccaagaaatcatgtttgaccttgcctttctgattctatgcctggtactgaaatatcttgttcacatttttatgcctaaatgctatatgaccaattccagcatcatcttgtctttgaaaattgattcaaagtgatcattttctgtcttgctctgtgacacaggtctcctcctcctcttcctcctcctcttcctcctccccttttccccctcctcctcctccttcctctcctatagaaaagaaagggagacattacccttgtctgaatgattcagaacagcaggcagacttccattgcaaagctgtatggctgtggcctggtaaggttctacactaagaacaggagttatggtaaggaaagctgcagcatctcattaaagagttactattccatctgactgttcacagtggtgagggatgagctgcctttcaagaggggatcccttggccaaatgattggcacattccaactgtgatgtgaggtctacacccaggctagagatgctattcatgtgaccataagtttttttttttttcataaaggagtttttgttgctacactaacattgcttttttaggagaggcgaccttaaagtcatttaagaaacatatcaagaatgaggactcctaaacatttttggcatctctaagcctctggcaaggatgagtgtatcatgaggcccaaggacacttcttggtacgggatacttgaacctgcttctagttagggtgtggttcagatcttagcacatacctttaatccatctggctggaatacaaacatacccttcgcacacacctttagtcccaaacaatgaaggtaacattagcttgtagaaggaagcactcatgtttgaattgagtggcaggaaacgtgatgaatcagagaaagatttgacagaataggatatgcccaactctccaaagagaggagggggaaaggaaagctgcttaatggagagacagacagcaccggaagaaaagcgcacagtacaggatattctagagttcatggagagcaggacaggagagttgaaccagccagctagggttcaggaagaccaagaaaggatgaatttgctcagcagtaagtctcaggaaacattctagccccagattagattgtacagaggctagaagcttccaaaactaggcctagattagctgaaggaggcagtaagctttggagacaacagttactaccggagaataaaagttacgtttacaatgtctgtcttggccaacttggacagagaacagttggttttccttgaggtctttgcagtctcctgagctggccagtttcttcctcatatccgtgtcttctcatctcctttctcctatgaagatgcatcccttaatgctattgtggaattgggatggtcactgatatggctccttccagctgaaaggggacactggctatggcagttggggttctcctcaaagggcctatcaaaaagactccaaaaataattggtaattttatttgactgttgcctgggaaaagatgtgagggagtaaagacaagaattattagcattccaaatcaagcaggtaactagaagccagaacacgggctgcttttttttttttttaatgtccaaatcaaaatatagattttctttattttaaattaatgaatttatttattctacatgtatgggaattctacatgtattctataagtctgtgtaccctatttgtgcctggtactgtgaaggacagataagggcataacatatcctaggactggagttagtaccttgtaggtgctgggtattgaacccaggtcctctggaagagcagccatggctataaattgctaagccatctctcccgattcccattctctccaacactgaactcaatagtgatgaatccagtatgtttataggaattttgaattacagtgtgaagcctttcctaagatgacatctaaagaggaagagcgtgaacaagtttctcccaataggaactagctcatggctgggacaactgaggtccttttagaaaccagcaaatatattgtgtaaagcaatgtgccaaacttccaaaccatggaggtctggtgttacctccttattctgacataggaaatgtaccaacctaatcacattcaaatagagcccttgctggactctttcatctccaccagccctttatgcttctgcatacacacacaccaaatatgaagacattggcaggagatttgggttcatgattgaatattagtttatgccatatgattgcattaactaatatggcagcaaattcatgcagtcactgccaatttggtaatgtcacagaccaagatagctcccaattcatgtggctgccctgctcctgatgggtctctaagcctctcacacggctggctatgctttaagcctttgaagggtcttcgataatttaggattggtcagtttaaacaggagacctgactagctcacaactgttgaataaacatgtcctgaaaatcctactgatagaagagaatcagctgtccaggcctgtgttttaatttaccagggttttgtgtcatgagcgtaaggaagaagccagccatctggaattttgccatctttattacctagtcatagccctcctcttgtctgtctaacttccagcccttcagtctagagtccctctgtggttgtcagacattgcatggcagctttgtcctcccatgaggtcattgttgaagctgtatgactgcagccttgtaacctactgctaccacagattttccctattgtatatacttatgtctgtgtcttatattcctcgtgtaagagcttttattaagggaagaacctagagcttgtcttatatttgtttcccagtgtccctactgtgggaaaaataatactccaaggtcagaaagcactgagctcaagttgaaatctgatggagacatttgattttggacttggacagacctgttacctcccctgtgaacttggacaaagttgtcaccttccttaaatgtcctaaattctttatcaagaatgtgggaatatctcattagtgatgacttaatgaggctatggtccagactcatgataagtatttagaaatagcattctgcatccccccaggcctctgttttccattgttagtctttcatattcacaaaatacaaaagtaataatgataattgcagtgtgccatgaatacaggcagggcttatgtgtcacattgcaccctcaaatttaaccaactggaaaacaaagtcttaggtatattgatcttttttttttccatttaacatggctgtttttccttaattttattttatgagtatttgcctgcaattatatacgtagagggggataggggtgtgtatgggcgtgtttatatcacatttgaccacaaaggccagaacagatgtttggatacccgggtactgcagttacagaccgttgtgagccaccacagaggcattagaaaccaagcccaagtcttctgcaggagcagcaaatgctcttcactactgagccatctctgcaacccctaacatggtagcttttagggaggaacttaaaattgaccctagtctctgcgatctgtattcttgataatgctccctggtgtttctccagttcaagagatgatgcagatcataaaagtctggcactctccaggagcctagggatgtctgttcgctctctcagacactggaagatctcagagctgtttcctctctgccttgctcttccttctccatcagctttatagctagctatgcctgtgagcatctcgactgctcagccctggacagaatccacttcttttatgtacatcgtaaagtgcaggataggtgtcttggagatatggcttagggagatgagagaaatggataatacatagttgctagtgtagagaagtgtgttagtgagctcccatgtcccacaagtcaacttggacaagctctcctagcctagagtagaggctgggaaggtgttgagcagaaacagcccataacatcagagagaagcgaggttgcaaactctggcaagttcccatctggattttatgctttgatttcatgaactgcctcactggtgaattttgatgttcaataccctttaatacagccatagttgatcagattccaccctcttcccttaaccgtctgattgcctacttgtgatggagaccgatttcattgccagttcagctacatgtgtgcagttgttttcttttctcctgtgtaagccaggtcttctcgattaaaaaaaaaaaatccagatttagtcagctgctttttaccaggtttccattcagactgtcatagtaaaaataaaaagagtccgattttataatatcaccttctgctttaaaaataaataagtaaaagttcccattcaaccagtcagatttttaactctcagcatctccagtaactgctaacgaaatctgcacttcatttccaacatttcactctattcttgaataaaaatgtaatcagaaagaattattgcctttttttaatacccatttaacctttatattcacagtggataccaaaaccacttaaactttcaagctctctttatggactggtatgcagatgcatttttctggagattttttttgcggttgatgaagcatgacatgcaggtccctgctcacttcccagccttaccgttgactgctttccgtcgccttgtcgcgggtctattaattattttaacagtgacttgctgttttaaggaagttctttattaatgccactaaatccttttttatggttgaaatgattcttttttccactattcgaagtatttcgtgattttagtctttgtaatgcgtaagtgtctaactgagcataaagtgctgctggctgtcctccattcttggctttcccagaagaaaggtatggaagtgtaaaccagagctctgtttgcagttttgtttgtaatgtgagcctcacttccctgcttcaggcagctttcatgtacgacagcacgtgacacagtggtgcctttttttttttttaatttccttattatataagtacttcatcttgtagtccagaatcaaattatgcaacagcatagaaaatgaacaacaaaattcttccaaaactccccctagaagaagccactgttaatagcttaagtatactccctgaattttatatgtgctataaaaccatgcatgcatgttcacataaaatacatgcagcatatgaatattattatgtagcttgtttttgcttctattccaacattgcacacttagtgtctttgtctggaaggaggtgcagtatagatctattttttgtgtcctatcaaggcattcagcaggctacatggactacaacattctcagccatttttcttctgataagaatttatgtttcagttttttacactaaaggtaaatttatttatttatttatttatttatttatttacattgcatttcaaaactttcttcatatttgatttctggcgcaggcttctgagttcaaaaagacatatgtggactttcttttcgatgcctattgtaattgcactgatgaagagacttgagtgtgaaagaacggctgattccccacactctctgtaaactggaacatctttcacttttgagactgtctgctgaaaaatttgaaagtataatctcaaagtttaatctgtattattattactattgttattattatttgtgtgtgtgtatatgagtggatgtagttgtgtgtatgtgtgaatgaatggatatagttttgtctggtgtgatgtgtgtgtgtgtgtgtgtgtgtgtgtgtgtgtgtgtgtttgaatgaatggatgtggctccatttccagggttcagtagacacttgcctctgctctttctccattttctggttgggttattcatgtccccctaaagactgctttggaagatagattagttttaccttttggtaatggtgattttgaaaccactcttcagaggtaggacttccttggagacagcctggctgataagctctcctccatatccttaaacccctttttctacagcagccactaccaaaccctgttcaaacagaatagcccattgcccccttctaattcctagtggcctttaaaattaagtttaaacaaaagtttctgagcctacaaggaaagtctgaaaaccctgcttttgaggaaagaaccctatattttgtcataaagagatctagttcctggctcctcaacttagtattagcatataggaggagcatttaaagatttaacttcgctcccgttttataacaagcactaatgtaacataaactatagtttgataagttgatatacttaaaatgcattctgtggctgataccttagtaataatgtatatttgattttgataacagcctcaatatatatttgaaactgagaagtattcatctgtctataaacaatacttgggtttatgattatgataatgattcttacacatatgcttattgtctaccattttatttgttgcatattgatatatttatttaatactttgcttgttttaggtctaatcaaaaatgttacagttctaagtagcttatttgagccaagcttttaattctgtaagttgagtgaatttttgtgagcatcgaggcagctaatactaaatagatgcccacagccatagtctcctgactcctggagcagtatattctccctttcggccaatgctgggtaattgtatgcaggtcattttacctaagcttccatttttttttttctttttcaattgcaagagtgcatctcttgatgtcctgactgggatggagaattgcagataatgacatttctggcttttgtgaatacacttagtatctttaaaaggctgagtaattatctgaatatctttagtcctttgttgttgcagtagtaaaggtaggattactttcagtagtaactgtagcaattaatgtttctattttagcatattataatattatatagaacagtgttgatattttatctgtagtcgcttgtgggcttgattttttttttgcattattatgttttaaattacatatagaaatagttctgggatagttctttcactatccatgaaataacaaaagtcacaactgcaaatggtcaaggagttgccaaatggtcaaaggttggggatgactttccaaatgctcttttccgtggtccacatcttacagaccttgtttcagcaaccacctacaaagttcctagtaccggatcaatcgttaaataagacatcattgagtgggccaaagacttatcataaaatgagtttcccaaatgagacagtagtagattgttacaaaatgaaatagagtagtaggttttcacagtgtaccacgaactccggttgcctggtaactgtcagtaggtagggtcatccagccagagctgttgatgaggctccatagatgctgcttctccgtttctcacagcagtcttcttactcttctactctgacactgtttctactgacacccctcataagctgtgattcctgaaccttgagtgcaggagttgtattgtaggtcatcagttgaggttgagagcaggagaaatagtcttctcaaaggaaaaggccctaattagttatctagttatctgataccaagtagtcaacctttatctgtgcacatgtatgtgtgtgtgtgtgtgtgtgtgtgtgtgtgtgaagctttatacacgtgagcaagttgtatttaaatatatgtgtgcattatgttttatatatgcacatgtatgtatgtatgtgtctatgtatctatgtatgtatgtatctgtgtaggtatgtaacaaaaattaaagaaatagagaccatgaatttaagagagaaggaacaggtttcatcagaagggttagaaggaggaatgggaaggaaaacaactatatattttaatttcaatatgttttaactattcatccaatagtgactccaagactttttggttgtgtagcttacatgaggttgaactttttttttctaactgtcagaatacagtgacagaaatgtagactacttaccagtctggtaatggccattgatcaacaaaattttacttgaatgctcagtaagctgccactctgattgtaggatgttatagttggacctcctcattttattcataaaagactgagtcttataaaaattataatcaaatgatacccagtgagtatctgaaaatgagagttttaatgcataatataaatatatttctatatcagcatatacttggcttagttattataaagtgagcatactctataaagagctctgaagagaagccgtccttatccatacatcagtgccttgttcatgctagtctgacctcctgtctttcttacctagaagatcagcacctagacttacaattccacatatttgtgttggcgactattgtatatgcttatttgggtcattttgggtcatatggtctttctaagacttgaagtggagtcatagtttgttttcatgtagacattttataactttagggctttgaatgttttctcatttcaagttaatctgtataaagtcaacaaggttcagtttttgtttgtttttctcatttatgaatctcaaattactccagcaccatttcatctaaattagttaatgatctgtaggtcacatgaagggtaagtgtctgtctcagcacacagtgccctgttcgtcggtcagtatatccacccatccttgaatcactacattgttttgactgtagctgtatagaaatattgaaatcaagacatatgctatgttttgctttgttcataattattttgagtgttctgattactttgcctttaattagtttgtcaatttttaacaaaactcctgctgggattttgattggaattgtattgaatgtagggataagtctaaggaggaatgaaatatttacaatgctgatttttttctatccttgaatggattatattttttcatttactttatatttactatttacttagattttcaatttgcttaatcactgttttatagttttcagcttggaaatcgtgcacatattttgtaagatttataataagggttttatgattggaaggatttgataaatagacatgaaaaaaataaattccaaagtagtcatggctactatataaaattagggttaatttttacataccaattatcctatgacattattaaatttattaattattggagcccttacttaaaaattcggtgatacttatgaaactaacaagacagaattcatttctagtagacttgtagtagaagaagtgtcagaagtggctttctaggtggaaggaatgtgacatcagattgacacttggatttacacagttccaaatggggtacttgatacagtttgggtgtaatctaagtgtgtccccaatgtttcctatgctgggattcttgctgtgcgaccttcctttccttttatggatcttctcnnnnnnnnnnnnnnnnnnnncccctccccctccccttcctttcctctccccctcttgcctccccccccctctctccacggtgccatgtttccatggatagctgtgggtctaacaaacccacaaatttctatgtgtttagatatccgaaggaaaggaatgacatgagaggagcgcatgtggctgttgaatagtctttctatgactctgcttttcttctctagcatgcctgtttggctctcataaagcaatgataagacatactctaatttgacatagtctgtgtctctgatgataatgtatgttttcttccttttctatgaaacttattacattaatcatgcctattttaatttattcttctgtagttccaacatctgtcttccttctgagtttgttttttttcccttgttatttttgtcttcttttttatgtcttataatcttcattgaaatgctgtatatagaaatgtagagacatgggcttatatatcttacaccaagaactggacatgtgtttttttctgttagacctttcacgtgctgtgattgtcgtggtctatgaggacggaccttggtttggtttgagagggagaggggctgtggttagattaacctcagtgtagtacacatcatgcatgcctcccgatcaactctaaggtggtcttgttcttgcagtagggaatgaatgctttgcctctggaaccttctcttttgcctcctgctaattagaagtggtctgtgtttgacatttctctcagctctctcccatggtacattgctattccttaatgtctgtgggtaaaggggtgtttccggtccctccttagccttgatttttcaggctcttgtttcagtgatcctgcctctgcctccccaaaagttctgggtttgctcctccctctggctgtagtgaacctcacaggtgtgttgagggcaaaaggattggctgtatctttcccatggcgtaagactcttgtgctaagtggaagacaagatagaggatctgtgtggctctgggccttccatgtaactgctgcttgccagcttcttaagatgcacacatcagagccttatcaaggctcctcctctgtcaggcttcactagattgcactgagtggggatggtgaccaggagtagaaactgaaagcctgttttgtctgtagtgtgcaggggtgctatctccttagacttgtgcaaagacagccttcagtgctgactgtcaatgttagttgactttctcattttacaaatagtatggcatttaagagacatttgccccatgtaagcaaatatatcctttctccctttagaggtattggtctttccttaaaactgtgcagccacagctctccataggatttgaataggctgtgagtttctgaattgtctggtataagttgtcctgtatagagcactgctcattcatctctctccatctgtgttggagccagtcatttccacctcagtatcatgttttagtgcattaagaatgtcagcatgccaaggcaggtggttcagaagtctaagtgtagtaagttgaggctagccagaccccatctcaaacaaacataacataacatttccattcagttgttcagagacagatgagggctggggaaatccctcgttatgttcattgtgtcctagcatgaaagcatgagagcagacccacagcacacacatggagacctgggtgtggtgtcaggcatctgtaacctcactatagtaaggaacaaagaggctcattcaccagtcattctaacctaaacgtgtgaccttcaggcatgtcttttgaaagacactcagaaaatatttctcaaagttatgatagactgaaatcattgagctgtagaagcatacttaacggcatatgtataattttttgtgtctatttggtttgcactgctaaggatcagttcaaggaccttacatatttaaagcaggtactctatattgaactatattcccagtctaagatgtattattacatgtcatgttttaaataaaatataatttatgggaaaggacatccatctcaagtggacatagaacatcttttaagctgtaccaccagagtgctatagtcacgtttctagacattagctgggagtctgttattttagtaggcacttagcaaagaaaaggtgtaagaggccgtgtctggagaagcttgaaagatagaatgcagccaccagaaactaaaacaaagaaagaagggaaagaaacaaacacacaaaagcacatcaacagtattattccatgaagactgtcgagcacagctgtttgatgaaaggtagctgggaactggaatctggaaatgtgctcttgatgcctggcccaatgctatccagctgggtaaacacctcacatttttttctctttaaacaaaaaataacagtaacaccagccacagtgaaatactacaatgtcatgtgtcttctaagtgcttcgtaaacattagggtcgtcatcatcactgttatcatctgatatcatttctgtcttagagtcatctgagggatttcatagaatgtagtccttcctcattaagaatgtaaggtggggagggctagagaaaggactgaacatgctgctcttgaagaggacccaggttcaatcccaagaagtctaatagatggctcatatcagtcagtaattccagttccaaggatctgatgtcctcttctagtctccactggtgtactgtaagtagcacacatatatacattcaactcaggcccatagtttctctttaaaagaataaaatatataaccttgcttcatagtgattactgatatttagttcttttgcccttgaacaaataactattcattaagtatcccccatgcatcttgtctggaaatttcacttcaaaataaaattcacatgccgttatataaatgaggatatgggtgatgatggagacgggaagcaggggcatcagtttctgtttccctctggcctgcagtgcagtgggcagatagcattcctcatgtgaccagagaattccagaagcaaacttctagcacagacctctaattccacaatggcagcatgggtggattttacccagtgtttaatgatgaatgtaatccaaacataaaaagatctaaatgcatgctttgaaggaatttgcaaaaatgaggaggagggccccaaaacgtcacaattccttttgtttctttcacatctgtgtttgcttttccccttctcctgtgcatattggagacttgcaaaagattagatttttcaaaccaaataaacattttctacagtcttcactgatagagtgcattagtatgatctttgtagatgtgaacattaaataatccccagtgtggcattctcccgtttattcataaataatttttaaaacttttatcacataccaaagagctaattataatttctcagctttttagaatacctaatatttataatatcagttttggactatctaataaaacttacttgttttactattattttagataggcatacaagttggtgagtctcactgttacatcttcaacaggtgtatagcatgccttggccttcttcccctcttctttctcttgctttcccctcttctctcatgatcagttcttaaatttcatctgtcatgatcaatcatattctacttctaagttatcctcccccattctttcttaagtttttccaaatgctttatccatgttatttcatatctaagaacagtttaattggaagcaacaaaagtatatagttcctgctgttctttagtgtcttggtggttcatgcctttgatcccagtacttgggaggcagaggcaggcagatctgtgagttcaagttcaacctggtctacagagaaagttcaagaccagccagttacacagtgaaactctgtatcaaataacataggtagatagatagatagatagatagatagatagatagatagatagatagatagataggagatagagaaagtactcaaataaataagaattaattagataagtatgaaccaaagatgggtctcccagtaccttagtgagatgctttctcttgtaaagttagtcccagcaaagactctcgtacatttatagcctgtagacttgtgccaatctgattcatataaatttattaactgagtttaaaattggcctttgtgggtagaggttatagcccactgatagagtactctccttacatgaagctctaggctcaactatactaccaccaaaaagaaaaaaaaaagacttttgaataagagaaattatactctataaatactctgaggtatgtaaacctccaaagagactgacaagtactttggttatgaaactagaggaatatccactttcctcaatgatgcatacctgcatgcattcctcagcaaaagcaatgcatgctttgctctatacaagagatcatgctgaagatactgcatgtgtgatatgaactgataatgtattaaatgagagcaattactaatattgtttaattgaatattttaaaagttactaggaatgagaaagctggtaaatgacaataaaattttataccaagtcgtaaatctgaaacacaaaatcttattacttatatatttattaactcatgcttagtgcatcacttcgtggataaacactatgtgtctattagtttcaagatattctctatagttattcttgggttttggctacataatagttgatgctacacaaagtcttaccatgcccttttggaatcattatacttcacagagacaaggctattgagtagttctagtacctacttgagcaaatctaggttatgtaaaagaatttgttcctagaggaattccgttggtaaaacatccatttaatgttctactcggtacattatatcataatcttaggacatatcagaaagctatctcttctcgggggggggggggagtatctggtctacctctttcatttagactatgagaaggttgccccaaaagaagcacaaatttagtatctgggaaaaacacaaaaaacagaggaaagttgaaagaaactttacgtcttcactttatctgtatttataggacactaacttaatttaaaaaagaaatgcaggagaaatagtagcccgagagaataataaaatctctctctcttttggacctttaaacttgttgcagtctattctagcatggaaaccggtctaaggctattaagctttcccattgtttggatacttgaaattccttccaaaggctcccatatgtttgtcccatgtatttctcttcaagtacattaagaggtttcttttgggtcaagtagaattagaatttccttgagttgtttcatgaactactttttcttctcttgttttgcagtgtttatccagtcttggatgagtgcaccttctgtcattctcattcacacttacacacgtgcacttaagttagcctactatataagctccgagcaagcaaataatgcacagttcatctcttgcccaccagaagaagatgagccttacattgcgttaacttatcagccttgagagatactgtattaattagatggaagcagagtctacaagattgccctactttaaatcaggtatcactgggcaagttgcttcaccctgtccaggggtgtcaggcctcttatctatataatagagattaattgtaataattaattgtaaataatattgagtgcttatgattaaatgagagaatacacatccgtcctctcagtgactcacacagaaagaatatcagcttaataatcactactgtggatagagcatctgtaaagatccagacaccaaataagtgcttacccatggggctgactgggattcagtactccaagtactgtcatttaccatctgggtaacaaagctttattatgccttttggacttaatttgaaagccatccccatcatcctatattaaagccagcttctaggccacctggataactgcctggcatagcagtaacacatttaaacaatgtaggcatgatcagatggtccagattttgtttctcctccctagagtattctggagagagagaggggaggtaagaaagagagacagagacagagagagagagagagggagagagagagagagattggagtattatagaaccagttgtatgcttaacttagactcattccctttggccactggttgaagtactgtaaggttagacttggaactgcatgagctgaaataacaggattctgatcccatataagaaaggaacattaagcacgtgggctaaaactacatgaaatatttgttgattaaaaacaattgttttatgggtttaagtgtccgctgcactgtctgctattttgcatgtgttttcaaagaagatcctgggtaaacattgtaattttccaaagcagctggtcttctcctggcattattacagggtcagtctatttccttctaatctgaccataatgccataaaatgctggctgttcccttggcaactgttcagtgtagactagctgctttctctaccttaagccaatactgggctgcaggcaggctcctgcagacagtaaggaagcagttttcctcgctgagggtgtttgtgtcaacaagtcacttgtcagattttctttctattcagagaatcggcatgcaccttttaaaaaggaaaaaaatgaaagtatatctggctcacacgtttggtttttttcgtgctttcttctcagcctgtgtaaaattgctgaccgtggttgacttttctcaagaaattaggaagtacagatgtgagagtctgcatggatacttgcctttgcttttatcctgcgttttaataccttcttgatgtattctgggaaggtttcctgttcggttctcttaatcacatttcctaaattacggtagagcttgtatctccttccatatgtacttcactcaagtccatgttcttagggaaacgtaccctgatacctattttctgcccatgttttctgaaatcatctgccatgtagactattttcttgataagtcacataaaaaaaaacaaaaaaacaaaaacaaaaccttactgtttgggagaagaagaccaagttgtttgaaataactaatttctcttcctgattgctgtaaaaatcttgtatcctggttgttttgaaaaggaagaaatccttcttaagttttgcgtacaaattattggttataagttgtcaaggggatatctggctcctacaaagggcaggcctgttttttacatagaccctatttctaggtcagtaccaataggccctcttcggtcatcccttcacgtcatggtagcttactagagtgccttcaataccagcactggcagccaaagcaggaaatctggacacgggggcagttctcctgcttccagtcagtgtccatggtgttctgcagccttatcaaacctttgtacaaactactcagcactgttagtaatcacctgacagataacctttcagagcaagacctgaatcgagccggcgcatagctttgaatgcagaatccagctccagactcctgaagggctgttaaagcacttagctctgtaggatagatgtgttcaagtgagtacatcatgccggatcctcttctgcagccgtcttaatcaagatgccaagtatcccgttcttcctgcctctgggagtgcatccttttcctgaagcatctcacaccttcttccattttacaagtacttctgctgctactgccactcccaaccccaaaacagcacccagccctgttgggattcctgtgggctgtggtaagtgagacgttttgctcgagtctgaaaagactacagtgtttctgtgtgtacagaacaaaaatggaaaaccagatcatgtgtttatcttagagctaaaattccaaaacctaatctgaagcgaaggaccatattatagtataagacagtgtccagactcactttaaaggaaggctgtgcaggagtcaccttcggacctctatttaacagttccagttcgggctttttgaagccgttttctacagtaggctgttctgtattgagcaaacatacacagatgaaaacccagcaaacagagtgatttaattcattgcttaccctgctgagtatcaaatttcctaactttcaactaatgttctttaattcctctcttttctttcttttctttgtttgtttggtttgggtttttgctttttgtcaagacagagtttctttgtgtaactctgggtatcctggaactcattcattttgtagaccaggctggcttcaaactcgcggaaatctgcctgcctctgcctctgccgctgcctctcgatgctgagatttaaggtgtgctcactgccggcctggcagcttccttcttcttatgaataataatgtgggaagcctagggagtctcttttggcagtcaagacatcttcacttgtgtctgtagcagtttcagtgactgcttttctccctttagctatttcctccctcgagcctcccagcaattgctagggtttcatagttcatgctagctggacagatattactctggagtcctggaaaaagtagaaagtaaggtgagaatcacttagttattctcttcagcaaaactgttaatgttgtttatatgacaggcagtctggaatagagtgccttgggcaaactgtttaacatgtttacaatcggcctccgggcaagtggaaggtaggcgtttccatgcacaaatgtcattgtccttgaagcacccaactccttgtgaacaatattgtgtgtcagcattcttcccaaccaaaagggccaagtctgtgttcagttcagttgacttctgaaagacaagaaaaataacttgccatgagactgttctgattctaatgcaaatttgactgatgttaatttttccttatctctaatgaatttctgtgtgtgtgtgtgtgtgtgtgtgtgtgtgtgtgtgtgtgtgtgtgtgtgtttataaaacctacgagggttttcatctctgtctctaaagaaccactttcgtagaatcccacttttaaaaagatacctgaaagcctattgtgtgcaacatctggctctctggaaatctgtcagaaggaaacttttttttaaaaaaagttgtaaaataaataaaagccgattttgaaagcatttaagtggacatagagattgcacgaggaaggcatttattcgaactgggtaattggcgacacttcctcagggaggatgggaaggtctgtggcacatgatgttagtgggaaagaggggacaaggataagaaccctagatgaagatgtgaaggcaggaagattgacacatgcgtagtcataatcccaggggcaagagggcagaggacgaatggaagagccaggtagagaccaagcagctgagcattttgagagcaaactctccagttgatcggaaagctttgagtgtgctactgcagcctgaataaaagtctgtctgcagctgctaaacagtaagcagatcaaactggcattttatcagaaaaggaagatcttgttctagtcgcagtagatgagaggtctcagaaggttgcgcattgtgatttcagctacacatgcaaatccacaagactcggagctcatttttactgttgtgcaacagggttagttttgttttgagctgagtctcccaaggaagtgtggtaatcagatttctaaatccatcacattaagccctgtcagcagtgaatcattgcctatgtgttaaaggtcaaaaaatttccctttagaaattcattatggtggtgactggaatgtaaatttgaatgttcatgtgtagtgggtgtgaattcaacagataaaaggccagaggagacacagaaaagtccatgttgttattattttaggtcagatatttacaaattgtactttaaaagttatgactgcaaaaacaaagagtgcgtatctttctgtcttgtttgggcaaggctgtgtgctggctagtaagaggaggagccggtgtgctcacactcccagtgtgaactattacactattgttcacatttgcttttcctcactaatgtgcccacccaccttagcagatccccagctcaatttcctggaattgtcctatcagaaagtcctgacttcaggactggatccatgtgtgctgcgtgtgtgctaccattgagttgaagactagtttttattttcagtattcttgaaggtttatcatcattgtcatcactattattgctactactgctactattactattattactatcatcatcatcattattattggtaagtttaactttccgtggagtgaacctagaccactaagctgaactcactctaaatgtttcagagaattaaaatacaacacttctctataaatttttaagaaaaatctaagtttctgtttaaaaacaatcaaaaagtgaatgcagtgtctttacaggttgtgatgcattcaggagtagttacgagacaagtagagtgattgcattaccttccatgaagctcttggggaaaaattgtctatgtgcatgagtgttgtgtctgtgcatgtgtctatacaccacctgagtgctttgtggacatagagtctagaagagggggttagattcacaggactggagttacagacagttgtgagcctccatgtggatgctgggatttgaacctgagtcctctagtgtgcttttaacccctgacccttctctccagccttctttctgtgtagctcttactaatatttccactgcaccaatattgtttcccacgctgctagactttagttctgagcttcttgaacatgctctgagttccaggccatttccatcctcctggccagcacgatgatgctcacgtctagatttggccattttcagagctgacgcacaggcactatgtcaagcctgttaggacagttttctctaaagctctctgggtgatcctgacactacaacatagtgtttccagtggtttccattgtgattttcatatttttacagacattcaattctggactgcatttcaagtcacgtgtaatctcacatgtactttgaatcataaacatttaaatataaataaccaactcatccctttccgttttcaaaaagatttgtgtcagtgtgtgtatgagtgtgtgtgtgtgtgtgtgtgtgtgtgtgtgtgtgtgtgccacatttggatgggtgcccttggaggccagaagaggatgttaagttccttggagttggaggtggcaatgatccacgtaacatgggtgttaggaactaaattaatgtcctctggaagagtagcaagtgctctgaccactgactttctctccagccctatctttctgatttttaaaatgaaattgcagtcatatattcacatatacaaaatatatttgtttatatattatataatatatattctcatatattagacatgtttatagatttgtatataatgtattttactcctaaagatattttccaatatgttattagatgtgtcctttcaaaatctggattttaatagtagtgtaacatttcttctcatgatagcactattatctaacctatgcttgatccctacatattaaggttataaaaccactcttgggcaactttgggggcaataatctaggtcttaccttgagaatattgtagtttattagtttctctgggggttgaatgttgctcacacaaggaagtgagtggtccttagagtgttgcttatgcctggtaccccatttctcctgactcatgaggaaatggctcttttctctgttcctaaaccctcagtgcgtcaaaaagcactgcaggatgacaacaagctcacaaacatgtcctggaaatgaccattccatttctgcttctgagagaggaagagcacacagccatgaaatgttaacagggacttcgcggggtagagaaatattggagctgatatatgaactgatatatgaacaatcttttctcacatataaaaagtagaagccccctccttagaattgggaacaaaacacccatggaaggagttacagagacaaagtttggagctgagacgaaaggatggaccatgtagagactgccatatccagggatccatcccataatcagcttccaaacgctgacaccattgcatacactagcaagatgttatcgaaaggacccagatgtagctgtctcttgtgagactatgccggggcctagcaaacacagaagtgaatgctcacagtcagctattggatggattacagggctcccaatggaggagctagagaaagtacccaaggagctaaagggatctgcaaccctataggtggaacaacattatgaactaaccagtaccccggagctcttgactctagctgcatatgtatcaaaagatggcctagtcggccatcactggaaagagaggcccattggacacgcaaactgtatatgccccagtacaggggaacgccagggccaaaaaaaaatgggaatgggtgggtagggaagtgggggggagggtatgggggacttttgggatagcattggaaatgtaattgaggaaaatatgtaataaattttaaaaaaaaagtagaagctgtctgcttggccccatgaaataaataatcttgcttatcacagagatctgagacaatctctgaaagaagaggatagggagtgttgaggacaagcagaaagctgggagctctaagacccccatggggattatgttccctaataggatgattctcctagatatttacaacatgcttggaaggtaagttagttactacaggatgccaaagatcatcatttactaaagttataagattatttggggcctgcaagctaagaattccagtccatgaattgagcccattgtttttggtctagtggaaaaggcccacccaaacatgtcatggtgggctgacatgactacaataagatgctcaagaaaatcactaaagttagttagagcctgcaagcttgattccagtccatgatgagttaacgccaaagcttttgatcttgtagggaaggcccattgtaacgtgtcacgatgagatgatgtactgaaaccaaccattcactttatgaagcaaaagagggtgaaatgtgagtggggtcccatagtccacttcctgaaaagatcctctgttacctatagactgatgctaaagttccaccacctcctcagagtgcaccataggatcaagacttacatataagccagtttttaagatttttatgtgtatgcaggagtgctcacatatatgtatgtatatatgtatgcatgcatgcatgtatgtgcaccatgtgcagtccagtgtctggggagtggggggagggcgcagagaagaaggcatctggatctcctagaacttaagttacagggaattaggagtttctacatgggttctgggaacaaaaccccatgtattctgcaagaacacacagtgctcttgagcactgaacaatgttcaacctctatttcttgagtttttcaagggatgtttaaaactgaaaccatagtagaaagtatgacagaaatgatcatctctgtatgattctggggcaatgtgattatgttctccactcttttgggtacttctgtgctcatttgccacagccttataaacatttatttctcctctcatacctttattagcttgaatgcattgatttttttaagtctatactcacagggcagaacttgtcactgtgcctaggacacagtgggcacttggtagatgtttgttgaatgaaagaaacatcccagctttcccgtctggtgatctgtcttatgatataacttccaggaatgcattgtgtctaaaattgggtaccatatgtacaggaaattctttctatgtcagcatgaaatccctcccaagtaagtcccttcatacgttgctgttgattgttatatttttttatatagaaaatatactacatggttggccatgtagtaagttggctgtttggagaggggcccatcccttgccggtagatggacataggctagatggcatggctttgcaccttataaagatttggttacttctttgcaagagtcttgtttagaatcccagccaacctgtgagccatagacaaccaagccaggatgacagtcaaggtcattggacatagagagtgagacttgccatctctcctggaagatgaagataaaaataaatggcctcaggatcaatgagaaactttcccctagtgtccaagagggcattaccaagtgtgctgagcaggccttcgtcttcgtgtcttcctaatgcagtatatatatgggagactcacatggccgcactgtgatttagctcgctccttcaaccatgaagtcccttgtgctgcagtgcagatctttgttttgggtagggttcagccagggatattaaacaaaatagtatttggatggaaacttggcgtcccaatttggaaacatttttttattgggtacagtttggggggttggtaagaaaaaacaaacacaacaactatgttgtaaatgttaataaaaagaacaagtaaagcaaattaaaatgttttgtgttgctgaggcctttttgccttcccatgactttaaaatacttgtatgcttttatgataatctataactgctttagtataaaaggcaaagaacaagtgaagttaaagaaaccccaaggggcatgatgtagaattgtagtagccgcttactaaagactgggttgggtattttttgtgtttttgttttgtttttagaatgacttttatgagtccagaaattgtactattaataattgctagcatgggattctaaattatgttttcaaactgccagtactgctattcattaagcctaaaactttgcagccctacccagtgtgtgtctgtgtgatctctggcagactcttttgctgttgccaagttctaagtgattagacttgtcaggatgctgtaattggaaggcatggtcataatctgactcaggggtctctttgtgtcccactgtcatctcagaaatgtgaatgtgatggaagtagtcagatcaggaaggccgtatggtgattctgagtagcgactgggtgatttaagcagtgaggtttcccatgtagaacccatgctctctaaaaatgcattcatctgcttggtaatgggtttaaatgtgatgactactgatagattttggaatgggccatcctgtgtaatgctcactggtgacattgtagtttatggtttatttaactgtaagataaataaaagcaaataaaattttaaattaagctcttttgctatatttcatattgtgcataataacttgttgctggttgatgccatggtgaaaattgctaaagaagagccccatcataggtgagaactgaactcaaattggtactgacctggagtaccaaagtcttccagtggcctaggattgcagtttagatagcatttccttgagctaggcagtgaacttctggatatactgcatcctcaaagatttctggcttcccttgagacatgtgcaatactgtggacctggcatgcaggaaggggggcctattttctgctgaatggcataccagttgcatcaccacagatgtggaattagtgaacatgctttttctgaatttcattaaaattatttttaagtgccatatgtccaatgtcatctttgacacatttatatgttctcctctaagttccaaagagaaacctcacatctctctcataaattaagttgtagaaggcaaaggtgatgatgacatactatgctttagaagcctaacgtaggatggaatagcggtgttgggaatggggagagaaggaacatgtaagaatcctgatgctattatggattggcagaaattcatcttgcatggccaggaacatctgcatcccaagcagaagatattcctgatttctgcgtgtggcttgcttcccatcagtctggtgcatgtcttgcctgggaatatcatgttggctttaatgtcatgacacactcatacataaggactgttcacacggcctttggagtctgtttttcagcccttaacagatgcagaagcccaagtctttctcttggagcctgggcatgtatatgcacacatgaatgcatccttacactttctgatcacatgtgtgtggaaggacttttttcttgatgcatggcagtattttctggggtttgtgtctttgtttttccaacatagaaaggtacttgcaaattgcagttttaccataaactagttgagtggccttggcattactttttagtactcatacctaaaacaagaacagtaaccattcttataacagacttggaatgtggataaagttagcattctggtatgtgtggatataaacatttacatatgcatatatgccagtgagcatatgtgtatatatttatatatgagaacaaatgactgcataagggtccatatacacatatatatcacgttgaacggtttctggcatatcataggtgttattgaagtattaacttagctgtagctggccactgatatgagcacatagtcaaatatggtggtgattgttattattagttccttagctactgatgagatactttatgtgcttgggggcgaatatctgtaacaaagactagtggggctaaggcagtaggctgaacctgttgtggactccatgctagtccagatgcccactacatctttatgagcaaaggcgtccgaactttactatgctttgtcccagacttacatacagacttactgcccagctgaatgtgatggcaaggtgtcttcattagagtcatgcgtcctgactctgggcaatatgagccctttgggttgagtcttccccctgcaagtcggccaccaaccctggagttagatgtatccttcacaacgaggtaccatcaacacttggtgtttcacaggacttctactgtgctgtggaagctttcttcgccaacaatactcttcttaataatcagacaacagacccactccaacttagtagtttttcttcttgccaggtccttataaaggcccttgggtgtctctgttcctgcctttactcaggctcagagatgtcctgttcccatgctattgatgttgacagaagcagggcacatttttcttccacgtgctgctgatctctcagacagaatgtacaagatgttttctcgttgccaaggatacctggtgacataatcctacctagcctttcttttcctctttccaccccctcagctcccctctcaccctctcctcccctgggtctttatgtgctgctctatggagcgtacagcttgtcctctatagactcccatttattttgtctcaggagcagctgccagtggattgactggagaaaacactccactccagacactcccagatgctgccgtagacaggccacctccagagagagcatgcctctcacgctttcttaaacaccgaaggtcttttgggtctttgtttagttttgtattttacactatgacaatgaatccagtttaaattttctgaagatgagggcagataaattattcgatgctgtatagacaccctgccaccgtcaagttcaaggactcttgggtatgaatagaatacccaattttgatagggtagaatttgaataggcaaaagagtgtagacaaagaagaatggggcttagtgtataatgcaaaaatgctcttatctaagaaggcctgtctagagagcttagattggcacaccaggctcactctggtccagcttctgcttgctccagctcccttccttcatgtccgcagtaggttttcattgcactgtctttgactgtaattgctcatcagcaccattaactccagcaannnnnnnnnnnnnnnnnnnnnnnnnnnnnnnnnnnnnnnnnnnnnnnnnnnnnnnnnnnnnnnnnnnnnnnnnnnnnnnnnnnnnnnnnnnnnnnnnnnnnnnnnnnnnnnnnnnnnnnnnnnnnnnnnnnnnnnnnnnnnnnnnnnnnnnnnnnnnnnnnnnnnnnnnnnnnnnnnnnnnnnnnnnnnnnnnnnnnnacccattcccactttttggccctggcgttcccctgtactggggcatataaagtttgcaagtccaatgggcctctctttccagtgatggccgactaggccatcttttgatacatatgcagctagagtcaagagctccagggtactggttagttcatattgttgttgcacctacagggttgcagatctctttagctccttggatactttctctagctcctccattgggggccctgtgatccatacaatagctgactgtgagcatccacttctgtgtttgctaggccccggcctagtctcaaaagagacagctatatcagggtcctttcagcaaacgcttgctagtgtatgtaatggtgtcatcgtttggaggctaattatgggatatggcagtctctagatggtccatccttttgacacagctccaaactttgtctctgtaactccttccatgggtgattgtttccaattctaagaaggggcaaagtgtccacactttggtcttcgttcttcttcagtttcatgtgttttgcaaattgtatcttatatctcgggtatacttataaccaacttaagtagctctctctcgattaccccagctgaaagtaaatcttctgttgacttcctctccactctctttacttcctacgtcactgtcagtcatgttctgtctcacctgatattctctgtgtagttgatgatgtcttagatctaatactagctgtcagaattctgtcgtaacgttaaggtgttatgtcttctgctccgcccctttatggtcagacatagagttcctcacacactacacctgtgcaaagaatgcttcctgaaaaaagggacagaaccacatggcagaaagcaagtactgatgaagacagattccttggctggggctaatgaaaagagtctgattatctaggagatttgaatagtttttaacagattcaaatattaaacaaattacatatcacccccataactaaaccgtctgtgtgttttaagaaagagtcagatatgatggtgctggaccctatcatgagtggctaagatgtgcaccccagagccaccatcagcctagcatgttgttttgaaataagatcacaatcctgtgacatttacataccactgcccagacgcattccagggggcaatctcccactgcacggtacttgacactatagatttatttttttgctaatgtaaatagttcagactagataatattgagagaagcatggtaatttatttcatgtgacgactgtacagaagaacagaagctgagcaggcagaggaatcctactcagttcagatctttgagaaagaactgaagggatggatttttggctggcaagccattaacagtgtaaaaggaagggcagaattaatgctggccgggagtgtgtgaaacccgagaaacgtgaaggaggaaccctgcgctcagcatgggggataggtataagcccagcagtggcagagtaggagattcctcctcttcgctatttagcagccctgtgagtgaattcagagcttgctttgctgtgttccaggctgggtgcctgctggaatgtggactgtaaatctctcagcatctttttcactgacctgcaaacaaccttttctcccatctgctgcctgcacacctgcctcccagtctttgtctgcagagctttctctatccccctgcctctgtctgcctgtccctacctcacctaggccctcttctgagtgtttccatctgacttacttcaaaagaactgaaaacagagagtcaaagaagaggaatcctgtgctcagcctaggagacaggtataagcccagtagtggtagagtaagggacacttccttctgctctgggcacagtctatttagcaatatccatctgactccaggcttctctgaccagatgaagtaacctcaacccttatttttctactctgcaactattacccacacctgctatgtttctgtttcaactatactcgttgagaaaatgtagtaaaaagtagcaaatattcccaactctgtacttacactgtagtaaggtaaaaataatcagtgtgatgtatatagaatattggaagttagtattgatccaggaggaaatgggggtgatatgggaaaatgtgcttggagtctctgctgaaatggaaatcccagcactaccctttccagttgtgtgcgatccgggaggctaactcacttgccctggtctctttcatttctaggtcacgaatcctaagggacattgatgtcttcttgagttgtacagagtagatgacgtgagatcttgttccataaagaatttgatcctatgagcatttaatgattgtttttattaacatgttaaactacatctaagacacacattatatgtatttatttctgtgtctgtacgaatacatctaatcttgtagttttccttgtttcttgtggaaatttctatgagtttatgtatgcctctttctccttgcagactgtggcctatagaaggcagagccgctttgcatttggtcctgtgccctccccagtgcctgcacacaggagacactgggacatttctgttctgggcacagtaatctcgtatgcctggcagtttttagagccttcctctgagctcttgtgccacctccgggcagagctacgttgtctttcccctttctctctgcattctagtcagcatgactatcaagtctgagagaatgaccagcgggttctgtgactcgccttcccctctgacccttcatggaagctctttggatcactgcagctccactttgttcctagaactgtgttctctgcttcaggtcatcttaaccatctgtgaccctctcccactctgtgcacgccctttcccctagccgctgtatccttctatgggaacactgactaattgaagcccagcattacactctctcctttgagcctccgtgtcagttacaaacttcacttataattagatgcctttggctgtcatggaaagctcagagaggtgaagtgagaagtccaagcatatgtagctgaaaaggggagcgtctcgcctgctccaagttccctaaggtggtaggtagcgtggctggaaaatgttggtgcacagagttgaataaccagaattctctacccagctgtgctgtaaactcgacatttgaccttagaggggtccttaaagcctcagcccccacatctgtaaaataaagaagctctcgccctcctcattcaccacgatagtttcatgacccaaaaacaggttaaagaatttcagaaactctaagccatgtgtcaaatgatggggtatgagtaagacccatgacagtataatagtggatagctctctcttgggggatagacatagattttttttttctgcttccacacatgctgcaaaagcaagacctctttaggatttttacatctgaataatgatttacattgattgcagataatctggaatagagctcattttcatttaaacttactagtttagaagtatgcatgtttatagtgtctgacatcaaatattattttaaatagtcccttccaaaatgtatactagggagatagagaagaaggctttcttttttttttcttttttcttttctttttttttttctttctttttttttagcaattttcagtataccgagtcagccccagagatctctgtatccacttacacaagtcaggtacgttaaagggtgccctgtaaactcaccctgtcatatgatagagagcttggtattgtgggtcaagagcaccatgtactccaggaacctagtcacatttgatggatttcttgaattattgctgaactagatgttcttctacaaattagctatactttggtaatagttaattcgacttacagatcttacaggacagaaataatgatccatgagcatagactgagatttctctactatctttctgttaagttcctgagaaagcataagaatttacccagagatggcactaggccaggtcttcacctaagttgtcaagcatggaatgaggggcataaagggtctatccccacatactctttatgggaccagtggcctgcagagactcatagtatatcaactgtatatgaggactaattcaaggagcagtgcttgaaatattaagcagatgagaggaatctatactaaaagttgtgccaaacactgctagagattctgaaatcctttagcctggaggccagggcttaccacagttccctctgtcaggattgaaactgacagtacataagtgtatcctctttctctgtcatctgtcaggggcacactttccatgtagggaatcccacagaaaacaatctattggcctggcctcctaacacttctttgtgttacactgtgtagattggattgtgacccaggccaactattactggccttttcttgaactaaattcgaaattataatattctagatatgattcacccaaggtcagacagtaagtttacataagaactgatgccctccaattccctctgtgatgagttagtaatgcctccctctcttgcataacatataaagctacatatttcttcatacagatcataagatggctactggggaccttgagggctaataagcattcaccatctgtatatgtactgctaaatatgcatttaaaccaagaggggtctcacaaagatggcacctaatatatgtctcctagatttttggtgaggttccagtaagtgaataggaatagtgtttattctgagagactgaaaaagcaagttgaaaggaccttgttctacaagctttctatatcaattgttgtagaggacaggctctaagatggtagttctcagccttcctaatgctgtgaccctttaataaagttcctcatgatgtggtgaccccaaccttaaaattattttcaatggtacttcaaaactgcagttttcctgcagttatgtagtaatgcaaatatgtgttttctgatgctcttagatgatccctctgaatgggtcattggaaccccaaaggggttgtggcccacaggctaagaaccaatgccctaaggcaattgcagtgatctgtccttgtgggtgacttgactttattatagctgttctctgtgagtgccaggtagacctgaatttgcttccaatgcccagaacatgaatgtgtagagatgtaacttaatcatgagcacattacattatattaggatccatctcagtagactgaagagagagaaactcaccaggcaagatgagttggctctggaaccaaagatgggcctttggttgttagccagcaaaaagtcttggctccgaattgtatacctgttgggtaatacattgtgctaatagtctaaatatcttaagaatgtatctcaaagacccaaagaagcccctagaagctgtaagataacagatttacattatctaaatccagtgagatggttaggcaggtatcaaaagctgcggttgattcattctaaataaagtctgttctgaacagcctgtgatctgataaagtacttcctttatagcttcctgtgtacagtatgggtagtttttaaggttctacagaaccacctccattggcaaggagctaccacaggacattcatttctgtgttaaacaggtctgcatgttgtccagaactgctatgttgaagatagtgcattcctcaaaggcagtgtgtgatttacccatgattgacagatagactggtgaagggcacctcatcctttgtctctggactgttgcaagtgcttttctaacagagctgggctgcctcttggaaagcggactgaagaaaaaggcaagtaacaggtcgatagcactagatctcacaccccaagtttactattgccagcagtataaacgttcatctgtttaactaagctaatgagccctgttttatgtactttcctcgtggaattatgctcatcaagtgagatagcatccatgagcatgtttgttggctgtgaatcaacaaatgattgcaaattattattattaaaataatagccatttgtcagtaaatatttgttgaaactggtccacttcgatggaggcagcctctccagggacctgctgactgaaggcagggagggaagcacccccagctggagttgcatcagtagctcagggttcccagtggaacctgcaggacttgcttcaggaatttgttttttgttttgtttggtaggaacaagaagcccctggagccagttatgttgtcatcaaacttagttggtaattaggctccaaagcaaacctgtgggaagagacaaaagttgaaacatgaattcctctttgcaggtggagggttggatcctagaggcagtgtacacagcttggctatttttatgcttctgcctgcaagaaggttcaagagaatctgagaaaagcaattagcgtccctctgtctgcaggcaaaacccgtttgaacatgtttctatgctcttgaagggctgctagagccttggcagataactgaggaaagattccattgagcaaaatgtcttcacttacaaatccagccactttgcactccacatgagcccccagtttcttttctttttctttttcttttttttttttttttttttttttggtcttttctgtaatcataacccatagagaattaaatgaattcccaggagcacaagaagatgcagggtgagagtataacgaacctgttcaaggatatccctgctctctaacccttttaattagactgctcgtatgtttagattctccttacttgaaagagacaagtgtgttttttaaaatgtgtctttcaaggactatttcccatcagtgctaaatgtttccctgttgtactgaagatttgttttgcttcctttgggatgaaacaatacaagtcttattggtgaaggcaagatgttgtacaaacttacatgaaatttttttcatagccatccatccagtggttcctgtagccccaagtatttgatcccctataaaagttccctacacccagtgtggttcttggcattctgtgcacagggcctattctgttgtcagtatgattcatgttttagtaatagtaaatggtagcaacagataatacgataattatatcatcattaaacctaggttttatccaaggtttctagtggtcatttgcttgtctcagggaaagagaggcttctctagttactgactcccaaagcgagtgactgtgcttgggttccatttcccataagtcagatacaacagcctagttcttgtcatggctgtcagtaagaggatttgtgtaatcagtagaactctgtgccaatagctcccaagtcacagatgaatgggcaccacagttcatagagtatgacagattcacttatccttcccagtttgcagatgaggcaactgagccccgggagacatgtcgaaccaagtatcctaggaagagtttctggcaaggctaatccccacctacttctgagtattttctgtgcttccttctctcatctgaaaacagatatacaggttaacaatttatatactgaaactatcccaaaggaggcagagcgaatccagcactagctatggtagctcacgaggtcatagctagtgaggaaccagcgtaggatgtaccctgcccgtggtagcagaggtacccccaaaagacgctctgttaacataaggaaagtctcaccaagatgtcagtggaaaaaggacaggcaacatggctgcaggaaggtacccatcagtcagacgacttttaatattccagcaccagccttctgccccatctttatagcaaagaaggcacgcctttctaatggcctcatgcacacatcttatttctgtgtaattctttttgcttttgataaagagtccacaactgtttttgatataaacatttgtctaccaagatttataagtgctttcaggcaacactgccttttatttcacaagaattccataaaattccttctgtcaggtcgagttagcttttgcaaaacttcaggaaatgtttgttttaattttccttgagaaaagcgtagagggagacgtgtgcactggcagctgccgtttggatttccctttgtgtgagctttggcttctttacctcttgagcttttgtctttgatgttgctctttaggcataaaatgaaagattattatctttagtctataggcttggaggagggcgatgatgaaacattcctgggtattcatatttctacaacaacaattgatgtggtcttaaagctgtcatgcttgccctagtcttatataataagcatttgatgtgccatgagctttcaatcttgtcacccttccaacactgtatggctatcccatgcattgttttagtgtgagcaacccagcaggggctgcataggcaacccctagctgcactgtgcccctgcagggtgaatcattacactctacacacataggggctacatgcacgaatgagtgtataggtgaatcttctggtttgactccataagtaccttagtcctagaaaaggcatcacctagtgattggcacccacttaactgccttttggtattctgcaaatgttgctttgatatattcagcagaacccaaatgaacagaaattaatttgtctgtaattacagagtaataatttttattatcttcacacaaatagcattgagtccatgattggtctgtttgtagatttcatggccctgcttggtcactatctaaatcctataattgaaatcctatgcaaactccacattgcagacacacggctttgggagaaaagaagccaagcaaagctgaataaggaaaaacaaagagatcattgcctaagaatcaagaaaaggaagcagggtgtaacaaaccaaagggatagtagcagtatatccttttagctttggcagttagggatcgtagcagtacatccttttagctttggcagtttgggagagctgaatgctcgctccctgtctggtggagagggtgatggaacagcttagctacacagattgttctatgcaaatcctcatgtgcaggctgcttttattaaaagtactatctctaatagcctgagccaagtcttgtttggtcaggtagctttcaaatgatggccagtatttttttttttttttttttttttagcaaacgaagtttgtgaaacacttttatattgtcttacagagatcttagtcatctagcacaattattagtaccaaagagcttgttttagcaagttctgacctattcctgcctcctcttccaaaatactctagaaacaacattggttccagaaaatgacagcctgacacagaagcaggtccttccatactgcgggttctcatcccccattcgaaaattagaaatctaatctcttctcagatgctggaagttgaagtcagaatacggagtgacagttttcagtagcaaaaacacttttgtcttttagctggtgaaaattgtcaagggacattttcctttagcttaaaattctctgggaaagatagcctaactgtgcctaccagtagcaaaaggcatggcaactgcactgagccccctttgaattccaacctagccagtagtctggaatataaataagaaaatgtttttattgttgctttaataggatcgtatctaaatatctaaaggctcactacaagcatcacttgtcactttgggctacatttccaagcatacatctctcttatagtgtcaacaaggataactgatgtttgttctgtgctgtgagcccccaaggctccgacaaaacatcgtgcacttcactctgaggcaagcataaatgcagcaatcatcgtgaggctgagtagtacatctgctaaggggttatttagtcaagtaaacagcaagttgacttgggggaggacatagaccgcagaccagggaggactgagccagacagaacagcacagacctcggctgcaaggcacccctcattacttcatcttctgaacctcccctgtaccatctataaatcatgaattaaaaactgcagcttttcatataaaatggtgttattcccgtctcaaaatattcagacagatttatcaccagagagaagaggttaggctcactgaacttttgatcccctgcctcagccttctgagttgctgaccttacaaacgtgtgctaccacatttatcagaggaatttttcagtggcctctagcccctgtttcccaggtttcctcctttagccagatgttggtgaagaagcagtaatgtgttcaaatgttctatgaactccttgtatgttcaggagggattctgtatcagttgggactcactggaacttgtgtggtctggattgtcacttctgatttagaggaacaaatcataaaaaaacaatgcaaaggaagccatattggccaggactgggctgtgtgtgaagcccgccctcggaacagtggatcttgtgcacttgtagcaggtaggacctgagcttgccccatttcacccaactctcttggcctcacaaaagagacattataaccctgtcacttttactggtgaggagaataccaatgaggtggtttgtctgtgccatgacagtccacggggcagttctggtctcccaccctaccctacagtgaagcagttgctcctttattgtgctctggtctcccagctaagctcaggcctcctctgtactcaggatggagggatgtgatgtaagggctatccctgtcacttgggaagccactgcttgtttgggacttgttttgattcctctgtgtggctgtctgagtggccaggatgtctctggcaggagagttctaagagtgtcagggctgtgggtacactataggcacttcacagaccagcctgtatctatagattataactttgcaaagttccttaagaaaccaacctctgaaaccaggacactcccaccttcagtgttttagtgacagtgtgaggggatgggcaaaggggctgaatgtaagcatctgaccccgtggcgcagtgtgggtagtaagaagtcatctggaagtgtagacaaccataccccatgcatgtctcctgattcgtatactgctctttgtgagtcagctttctcagctactgcgtggaagcagggagctacctgaatgactgtgtatgacctcactttttcaaaggttcttatgaataggaattaaagtgaccccctttttagagcaaagttttcatgtgtctgcatttacagtattgacccctttttagatagtccagaggtctttttttttcttttatttttagggaggcgggtgttcccagatatattataacccatatattataatgaaaggttagtccagaggtcttagctaggcctgggtcatgtgtgctctagggggctttttccctgggcttatttattttgaatatacttacttcttctttttttttttttttttttttatttatttattatatgtaagtacactgtagctgtcttcagacactccagaagagggcgtcagatcttgttacagatggttgtgagccaccatgtggttgctgggatttgaactccagacctttggaagagcagtcgggtgctcttacccactgagccatctcaccagcccatacttacttcttctaatttgtatattcgtgttatacttatcaatggtaccaactttagtgttgcttcctagtccttcttacagtgttttcatttttattaaggcatgatttacgcgcaagcaaatacttaggttagaaaccctgagattccatttcacaccagtcagaatggctaggatcaaaaattcaggtgatagcagatgctgtcgaggatgtggagaaagaggaacactcctccactgttggtgggattgcaagcttgtacaaccactctggaaatcagtctggcggttcctcagaaaactgaacatagtactaccagtagatccagcaatacctctcctgggcatatacccagaagatgttccaactggtaataaggacacatgctctactatgctcatagcagccctatttataatagccagaagctggaaagaacccagatgtccctcaacagaggaatggatacagaaaatgtggtacatttacacaatggagtactactcagctattaaaaacaatgaatttatgaaattattgggcaaatggatgtatctagaggatatctcctgagcaaggtaacccattcacaaaagtcacttgatatgcactcactgataagtagatattagcccagaaacctaaaatacccaagatacaacatccaaaacacaagaaaatcaagaaggaagacaacgtgtggatacttcattccttcctagaataaggaataaaatatccatggaaggaactgcagagacaaagtttagagctaagatgaaaggatggaccatccagagactgtcccacccgggagtcccataatcagccaccaaatgcagacactcttgcatacgtcagcaaaatcttgctgacaggaccctgatagagctgtctcctgtgaggctttgccagtgtctgacaaataagaagtggatgcttacagtcatctataggatggaacacagggccccaatggaggagctagagaaagtacccaaggagctgaaggggtctgcacccctataggtggaacaacaatatgaactaaccagtatcccccagagcttgtgtcgtgtctctagctgcatatgtatcagaagatggccgcctaggtcatcactgggaagaggccccttaatctagcaaactttatatgccgcaatacaggagaaagccagggccaagaagtgggagtgagtgggtaggggagcagggcgggggagggggggataggggacttttgggatagcatttgaaatgtaaatgaagaaaatatctaacaaaaaacaaaaattttaaaaaattgaaaaagaaaaagaaaaaaaggaatgctaagtttgatgagaatgggctgctgtatgtatcactccagaaaactccctcaggtcctttccaaagccagccccacctgttacccggaagcaactgatttccagcctcttgcgctctgtttctttacttgcagtaagtctcggtctctttctgtgtcccttcccgtcccccctccctggaatctgccttttctcattcagcgtgcagtttctgagactcattcattcctgtagctgtatcagccatctgcttctttttgttgtctagtcttccatgaatatgccaaattccacactctgctataattagcttctccattcttctctactttttttccatttttgttatatcgtaaatttgcctaagggaaaatcatgggaactcgagtactgaatatgtggcataaatgtatcttatctcagtaacaagggcccaagggaccccagcattaaacacagctcattgtctcctgcagttgtgttgcttcactggtgttatggaaaggtaggtagagcaaggcccagcagccaagagtcttgctctgacttggcagggtaactgcctacctgtcgctagctcttttgctgtgtctgcaaacttacctggctggactgggccgccctccaggattttcacctctggcatccagttgtgctctaataaaatccctccttgactaggaatatttcatctttcatagttgctctgtagtccatcttctgcatcaaaatggtaaattagcccagttattatcttattgaacacaacatctctgatcccatttcctttaccatatgccagacttattttctctgctcaaagtccgttggatatttctgaagaacatgctgcaaagaaaacgtaagaagtgtgagttcctaagttttcatcttctcaagcccttaggctactgtccattggaaaagccattggtgggcaggacacttcactgtatttctgcccctacttcagaattacatgtgcagtccattcttcctgcctcactcccttactgcgctgctgctttagctggtacttcaggtcattttctttcctgctagttcactataggatttgtataatctggatctaggtaccaagtgcttgaacgttctggtctacctgtattttaattagtactgcagaatactcatttttcaatgtcagttctactttagggcttggcttatgtggtgtctcttctcatagaagaaaatgcctcttttatatagttgctcccctggcatagagggcatgctttatttgtttgtttgtttgcttatttacttatttatggtttgggtttttttgtttttttgtttgtttgttggttggttggttggttggttggttggttgttattgttgggcttttcgagacagagatacgctgtgtaacagccctgcctgtcctggaactcactctgtagaccaaggctggcctcaacctcatagaaatctgcctgcctctgcctcctaaattctgggactgaaggcatgtaccacccctgtctggtgacgacctgctttctatgctgtctcttgtcttaagtctgcctctccaggctgttctgtgatactggaacaaggcatgtcataaacagggtggaggagggctgagaactcatctggaaagatttactgcatgaccatgggggcccttattgtcttcacttcactccagtgtaaaaaacgtttataatcattgaccaaacatccaacatatccctgcttcctgttaaatctgcatttgtacatggagtttagtgtcccctaaatgacatgaggattcacactgttacatcaacaaaatcaactcttcaaactttatttcctcactcttgagtcaaagggcgcctactacatacctaatgctgacagatattttgctggctatgaaattgaaacaataactgaaatcatagacccataccccaaagttcaaaatgcagtgaagacaaacacttataaaaccaagaacacagtgaaacaggctgacctggtagatagttctaccagtaaggctttcttaatggcagaggagaaatgcattctgttagaggaggacttgttccagaaattctccagaggagaggacacacataatcaatgtatgaaaatatctagtcagatgtcagtgagaagagcattaagaacagctgagaagccaaagtataagtcacgttccaagggtctttggctacagtaggaagcagactatcctgttgaacataagagaatgggtgggtgtccgcagtgccaagcacttctctctagggagacctgtgtgcggttcgcagcaggaaagacatgtgatcttgtatattccttcttttggtcattgtcattccttcagagacttgaaatatatctgagtttctttgcatccaaactttattatgcacattaaaaatttaaggcatgtggggtagtggagggggaatggcatgtgtttgtgaagtacatgcatttatgaagacctggttcagctgtagagtcagaaaacaacctacaggttattcatttccctctcagtgaggaaatagatgcactgtgggtaggtaccagactcctgctgtgctgatgtcctgccttttgcccctgcttcattccactctgacccaagtctagttaatgcaaggagacagcacttatatattatgccaggcatctatgtgtttaactaccattgagttgctaaagaggaaagagaagcagctacccatataatatacactctccacatttctccaactgatgtctcgaataaccttctgttcctttgtagattattgcaactctgaggtgctatcttgagttaagatctcttgtaatatgtacacttatcatatatgtccacatatttgcagtatttcttttctcttacaaaatattgtttttaccagttatgtagataggagtcaggcaggactgtgcaagactgtgttcaatccctgtctaccaacttatgactttggatacatgtaaattttaaaaaaaagaatctatgttttactgtcttgtatgaaattctaacaatgttttgatcctggagttactttgagaatttaatgagttaaattgattttgagagaaagagagagagagagagagagagagagagagagagagcgccagagagagccacaccaagcatttaccatggagcagacacctattactgaagatctttctctgcttttctttcttcctctcttttttaagtctcctcccaaccaaagacactttccctgaaagaaattcaaggtagattattagctccttaacaaatgctttccagaaccccagagcaatgttttcagcctgtcaaacaagcagagaactgtttttaaagctgtatgtgcctggcctcctaaccccagagttaaggaccaaataggctcaaaacttactgtttttttttcaaatgaagccttccaattcaggagctgtgtgaatgtgccttatatcctctgtgtcagcatggaaaagggacatggaaatgctgagtgacatggcagatattactctggttatctaaggggatgatgggatagcacagtagaggaagcaaaattatgtattttctgatgaaaattaagggtacttagtaggagatcctatgggaaacatctttcaacatgtttgcaaaaaaacccctaagagaagaaatttgattataagattagtaatcaaaataacaatatatcacatgacagaaacctaaatgccatttgtgactgcactacttaggcaggggtatgcaggacacacactagctctagagcctacagttctgtgttctattctgggcgccatgtgttgaagggatccaagataaactggaacttgtgctgagaatagtggttggggggataagagacagaaatagcccataagaaagggtggaaagattccaggtagttatcccaagagaaggctcaaaaaagacaatattttcagtactctttagggttgttgcatagaaaagcaacagacttgcttatagaggacagaaggaagattaaatataatcttctaacaattaagtgggccagtagaatggataccttccaaaagagtctactgtccctagaaatgataatttcaggctagataagccctcaccaactaggggtgctatgcaggaaatgtactcaccaaaccgactggcacagataaagaccaagatctcacttactctaatacactgccctagtcctctgtgaaacttttaactgctataaattcttggttatgcagctaaagaaatatattgcttttgttaattgaaaaaaaattcaagaaagttctcttctctttttttcccactaatttatttatccattttcctattaatgaaagttgttgtcttcgcattcaaagatgttaagaatagcagtaggttgccgggcagtggtggcacactcctttaatcacagcacttgggaagcagaggcaggtggatttctcagtttgaggccagtctggtctacagtgtgagtttcagaacagccaggactaaacagagaaaccctgtctcgaaaacaaaacaaaacaaaacaaacaaacaaacaaagaatagcagtaggtgctctggaagagaatgaatcaccatgcatgatcctgcacccggatgctcatgttgtttcctggaataaataatgacttgcaagacttgaaaaccccatcacccactctatggagaaggaaagtctgatatgtattcttaccttctggtttgtcagtattttcactcagcataccctgtcattttgaataaaactctcttttggaatttacagtccattgatcatgagacttccatgtgtatttttcattcattattacattcagccattcatttgggtatttaccaaacaatttctactgtgttttgtgaaacatatctagtgccaccaacataaaataagtttaaatgtctaactttgaacagcttttacatatatggaagctatgctgtcttaatatgacagccaccataactgcttgataaaaaaaaaaatttttggtcacaaagcaatctttttccctcctatatccagttggtcaggggtctggtagtctctcagccaggaagctctaggtcatagacagtgctgagtgttctgaactgaggcctctcagaggcctggactactgatcagctaccttggaacaagtagggcttctcattgatgtgccccaactaaaggtggactcttcaatgtaataacactgatgtagaaccatcctgtggcaattcaagagaaaagcattttgtgtgtgctgcagagagtcatccagagccacaagactccattgactaggtctgtctcagtagcccagctcttcagcacgtgtcacaaaggatgatggagtacattttgctgtatccctctttgtagatttcatgtaaagaggtaacactctatgcaggtcactgccttaaagaatacaggaccgctgtgtgaaagggcagaagaatggagaaaacagtaacagaggtaacagctgtacgcccttgacctttggaaaggaaaatctcagagcagaggtcccaattaatgaagagcaagaacacagagaagtttgggttggtttctgagcgaagactggagaatgggatacctgtctgcaaagggaaggtcccatagggatccagaaggaccaaactgtccacttagagctggccttcgaaagccttccctcgtgtcagagcacagacactcagaatgatctcttgagcaatctcctctatactttctttcctttgatagtaaacacaccgtctctgttaaaatctgcttcccagctaaaactgaacacagactccaaaccaccaaatcactttggacttttcttttcttacaccccaccaacaactgggatggcatgcatttgaacaaaccaaaagtgatttcgctcttctagttttcagagctttttggctaaatgcagagtgagaaattcatacctttttcaaacagtgtgggttctttttcccagttcctctcatccatctggttctctggaggtcttggaatccaggaaagtgttagttcactgtgctgaaatccaaaaaagactgctaaactgtgaaagaaaatttgcattccagagacaccaaaggagttagtccacaactctgtgcagcaaggagcaaacatctgtatgttctgcctcctttgtctttgaggcagttggaaaaccctgtagcatggaagaaaccctgcattcactgagcctttcctacctagctcatctaaatgtagtgcagagtacagaaagaagaaccaaaacgtgttagtattttatttctagtgtcaaaaattattacaggcgagataccgtttaggagaacagcaaatcgctctgcagcctgttgagattccattcccgtgaatgggttcctcagccgggtgtgtggctctcccatcagcgggcctgtactcaataggaaaccacaatcacagccctgacactggcatgtcaccgtgacctttctaagcccaagtgctgcctttttgtcttccattggcagaagtgtaattagaaggacttgttttcaacagaagccaagtgattgccaaatgtgctcaaatgatctctagaggatcagaggtagctcaccgccctctggctgttcccactgccactcccaagagttagaggcttaactctaactcttttgaaagagatcaagtttggttcaaagaagcttctctgtcacatgcatatgaacaaggagaaatcttccatgaccctggtggttggctcagacctctcatggctgtagtgtaggaaataattgcaatctacacatcaggaagaaaataagcaccacgcagtcctgggtttcagaaaacaggcacgtgagcagaatggtactaagaacatttctagtctctgctcgcatatcatgattctaatggatgattcagggtggtttaattctgatctgcaatgtgcacacaggtggtcattactgtgtatacacatagctggaaagagctttgcttaaactcacattttagaatgttcccctagatgggtcaattaccattgataatcagatggcgttaagcaaaagggtgttgccctactgactgtgtgtatgaataatttcagatcatttatgctcttaggggaggttttaacatttttttgagagataccctcttgctgagatgaaaacaattaatcctaagactaaaacacacctaagatgttactttatttaatgcagttcattttcttctccatacaacaaatactttttgcaggcctgttatgattgcatgctgttatagaggctgataacgtattagtcttcaatgcctagaaacaaataatgatacaggctgccactggcaagaatgatgagaggtgggccttagacagcatgacatgagaatcagtgtctgaggtccaggccagaccctccttttccatcactgtgtattcattttctgctctcaaaggcagaggtgcagcacagaagcaatgaacagtggcttttcacttgtgttcatctggtcttcttgaaccatttgccaccacaagtttggcacttcggaaggcacccagtgattggattggggctagggaacacagacgaaaggatgtcattagggtcctggatgtgacatcttcatcaatgagagtaatactgggaaaaaacatcttcctagtgacagcatcctgctaaataatgtgaaaagggacaagaagccccaaattatatatttgtgaggtgttctgggacggcaggatgctaatgatgagccaaggcattttgtgggatggccactacagggagctagaagaaacttactgattagcagtaagtgtgaactagagaaaatcttgtttgcctttggtgtagaagtcatagattcaaatcctgatcaccttaagatgtgtagcatagaaattctccattctgcctcccctgctgactgctctggagatatctgaggtcttgtgcatgcacagttaatgcccatgtctggtgctagattttctttggtggagataaaggcctggagattactttttttaatgaagaaaagttatataagatcaacattaaagctagcattacataccagaactaaatccttcctcccacatatgggatctcaattaactattaaaaatatatggagacacttccaatcttagcaggtgaggacaccaaatgtcacttaattcttagactttgaaacccagcctcctgaagtcagcagcagttctttgactgtatgtcaggcttgctgcggttctcacgtgaataagccctaacaagactatgccttgaagatgttgtaaagacagctctctgattggacttggctcggaaggaaaggaattctattctttcttcccctctcacgatagtctcactggagttctgtgatcttttaatttgcccctggcatgaaggtagctttacctccctccatttctcagggattctgacacatccaagaaaaggattttggaagacctaccattcaacatggttacaggctttaaaatgacaaaccacttctctgagccttaaggagtagctatactaatgttcgtttttaatcaaaaggttggtttgtttgtttggatacggtctcttgttgacctggaatttgaccagtaagctggacttgatggccagtgagccacatggatctacctctcagcactaggttagaacatgtgccactacacctggctttgggaatttgcatttttcatttttttgtgtatgggtttggggcaatatgtatgtttgtgtaccacatgggagcagtttctccaaagaggatgttgaattatcagaactggggttgcataagggtgtgagctgccatgtgtgttctggatttgaacctgggtcttctggaagagcaggcagtgctgttaatggacaaaccatctttccagtccctcacacctagctttaaaaaaaaaacaaaaacctaagtcctagtgaatgaaggcaggtctctgtgcttccttgataagcactttgccaagtgagacatctcccagctctactcttttgtattttaaagctaatttatataattcaaatataaacaaaacttcatgttcctatattaataattctacatttctctgaaatgttcagttgttcatatgcatgttcttgcctgaaaatactgaattctcccacaccacttcaaagtttttgtttttttttttttttgttacaatattctacctggagagtgagttttgtttgaaggtaggcttgtctaagacatctctcaagggggcttagataatgatgaagactcttattagaacataacatcagttccaaagaggattcaagccagttttcttttcagtggcaaatcaaaccccaccaagaagagaggtgtcatcataaaccacagagagcagcctgttctcccccattttcaattagttcctcttttctctgccatttcaggttgttcatgtctttgtgaaagtccataccctgtgcttttaagcagttgtttgtagatgtgctttcttcctactgctctggaaacttgggaatgaagggagggtatctcagactttcatttctcgctgcacttccagggtgttcagctcaggcagagggagctcattagaggaggcatatgaagtgtttgtttaaagagaattttaagaagtttgaagagttataagcaacaatccaaagagttatcctcagaaagatttcatataaaaaaatgaaagttgaattttttttacagaatccccagctatgtgttttataggtatcatgtgtgtgtgtgtgtgtgtgtgtgtgtgtgtgtgtgtgtgtgtgtgtgtgtttctgcttgtctttctatgtaagcatgtgtatgagtgtgtctcaatgtgtttctgtgtgtatctgtatctgtgtgaatgtgtgtctgtgtgtgtatgtttgtgtgtatgtgtaaaaaaagaaactcatgacatcaccagaaaatagtttagagggttttgatatcatctagcaaaattgggggggggtcataatttttatcaataaagaagattttttattctgattagaaaatcacagtttagagataacactgaatttgctgtcattatttctcgtctgcttgaaacacagatacaaatataaaatatacattgtggtcaggatacaggaggagggcagcccgcagtgcaggacagtttgtggtaggaaatgtgtgctcagctgggaagcagggctgctggggttttaactgggagctcctgggagctcccagggctgcatgaagtctttgcttttggagacgctacagcattgccatcctctgggaagccttcttgatcgtcagaaccaagaagaaattaacattccataagtgagttaggcagtagaactatttgaatttaaataattacactggcacttgaggagaaatttgctgaatcatagaccaagctctttctgtggattggaactaccagtctgttttaaccctcacacttgaagtgtgcttctcacggttcacctcaccgttcatgtagataacgatggcatctgcagaacactgaaggaaatggagcatctgcgttcccagatgataacccatggactctggagaccctcctctgccccctcgtaatcctctcaagtatggtacacctgaaactcacttaagcttactctctggcaggtttttacatggttacgtaaaataattttactttaaataaattatccataatttgttggtttatcttctaattaaaattcatgaagcatcagtgttatgcagaaacaccattgtaaatgctggggcccagcaatgagttttctgtctggtggtgtaggagtttaggagacaggtggtcctaagatcacgatgtgtttcctgacttcatttctttacatgtaacttgtaggtaggaagcctgaatgccttctgttttcagtctaaagtgtgtctacaaaactacagaagaagtacaactcgaacattggagttgctccccattgcatagggaaccgggacgtgtgaatctgcttttagcaatagtcatgatccaggccttggtttctgggtgataccaggatgatagtttgtgaacagagtggtatgcatctcctagcctctatcctttgacactcctcaccaaggagtgagtttgggctctcttagaaggcctccttggcatcacttctgtaaccacagcatttcaagggaagtacatgtggaaagttgtaatctctgggctgaaaaaaattatacagacattctaggtcctaatagtttcattctccctgatattctcttgattacactaaggccaaaatgctccctaaaacatgagatgtcgcctcagcatcttataatccttcctgttctgtgatattgctcatttcaccaaaaatgtaagatcacattttaattttataaaattaaagttttaacacagctccctttctagtcttccaactctccctgcacgtctgtcttgatcgcgggcgctcacactgaccggtgtattcctgtctgacgtgttggcggtagcaccctcttccttctctctgtggcggttagtgtttgtgctgcctgcgtgcctcatttatattcagctgctccttccagctcctctgcctgggaattagaaaagttatttatataacacccagggatataaaaactacaaccagattgtatctcagatttaacaacagttgcactgggaagtcttgagtacaagtttgtttgtgattttagcttaatttttagttaaatttttgtttctcatcacaactggagcatcatcgtttcagaaaagtttatagcctgtgcctttcgactacttgattccctgattcttttctgcttctctcaaatttttgcattttaactatactttgattacagtaacttctcaaattagtatctattgtaaaattaataaaatatagatctagcattgagtttaagtgataaggtcttccacagcttggtaccagttcctgccgaggaccatggactatacaggcccagggcaatgataatgatttatgtagatgatgtagtgtgttccctggatgcctcttcgagactgatgttctcatttctccagctgctgggaatattgactggtgacggctcatagctaggtccctctgtgctaattatcagatgaaggaaagtacttcaatcagagttacatttcattcttggggacgatcttctgtctactgactgatacatgcagctataaagactctcataaagagcttcatgaaagaacagttcttcaggtcacacccagctgtcacatcctccttggatgaatctaggctttggttgtagctgcatcgtagatgtcatctacttctttaaccttctatagatgctgatcacaaggatactgctcagtaacttcctgtgtgaaaagttgtttcagaatctgttccataggctacacaacttcaaactaaagtttaatggaaagagaagagagatcactacctgaccatgtagacgccatagggaaaacatcccataagcaatcctatggtagcatagaatgtgaattatttttactataacagaaagagaatcaggaaagatttcttttccacagtaagtgacctttgagcttcaattaaaaaagaaagagagcagatatttctaagcaaagaaaagtataaggtggcctgggtatgtgcattgttttttaaaggtgtagcaatgagcttagaatggtggagaggaggtgaaactggcaggggagatcagtggtgaggaggaggagccaagtcacaaagcacactgctgattgggagggtccccaagctggagtgtgctcttctgctagctactcacctgtcagagatggcacacatcgaagacggggtctgagcagacttagagacatctcttttgcactaattctattggagcctgtttccttcaaaactgtgatttcacattctcttgatcctactttagaaaagcttaatatgtacatgaagagtccagctttctgtttaaaaataaccatgtataaaaaggtgcaaagcttccattgttgtacttaaatttttatgattagaaaatttctgaaagtctaaagtataaaggcaaacatgtgagtcccactttgaaagctctgtccagggacttcccactcgtttccagtatgtatctgctagtcagaaattgcccttttctcgaattctttctactaataaatgacagtaagctgaagaattggggtaaatcattttacccttgagaaatctgaagtctagagtaaagaaagcatacaaaagaaattattcttctgtgcctctccagccaggacactgtacagtttttaagaagctactactcagctattaaaaagagtgaatttatgaaattcttaggcaaatggatggacctggagggcatcatcctgagtgaggtaacccaattacaaaagaactcacacaatatgtactcactgataagtggatattagcccagaaacttagaatacccaagatataagataaaatttgctaaacacatgaaactcaagaagaacaaagaccaaagtgtggacactttgccccttcttagaattggaaacaattacccatggaaggagttacagagacaaagtttggagctgagacgaaaggatggaccatctagagactgccatatctagggatccatcccataatcagcttccaaacactgacaccactgcatacagtagcaagattttgcagaaaggacccagatatagctgtctcttgcgagactatgccggggcctaacaaacacagaagtggatgctcacagtcagctcttggatggatcacagggcccccaatggagtagctagagaaagtaaccaaggagctaaagggatctgcaaccctataggtggaacaacaatatgaactaaccagtacccccccccccccggagctcgtgtctctagctgcatatgtagcatatggtcctagtcggccatcagtggaaagagaggcccattggacttgcaaactttatatgcctcagtacaggggaacaccagggccaagaagtgggagtgggtgggtgggctgagtggatggggagtgtgtgggggacttttgggatagcattgtaaatgtaaatgaaataaatacctaattaaaaaaaaaaaacagaaactacggggggctggagaaatagaaaaaaaaaaaaaagaagcgcatgcttcttgctctgtctatatgcaagtttgtcaggcccctctctaaattaccaggagtcaagaaagtagaaatgccaacctcaggtgccctcatgagctcagtgacccagttaaccagtaggtcctgagtgtgagctcacctgccctagaggaagtacaagcgcgctccgccttgatggtgtaaaatggggacaaacatacaatagagggagttgtctgggaaaggttagcgtgcccttcgtggccatttgtctgagccagctactttcttggaaacttttttttttctgattttgggacatttttcatgaggctaattttagacatacttcaatttattttctttgtagaactaaccagattacccatcccctgaatagtctactcacagaccataatgctctccctcagaaactgactaagcctggtatgttgctcctggtttggagcaaatgagctgaacctcagagccaagcctcagtgcaaacaaatacgttttcgggtcaagcatattctggtttattcaactccattacagactgggttttaaaaagaagggggaaaaaagttaaagccccacaaagaagcaaaacagaagccccaggaggacaatttccagtcacgctgactcaggtcaccagagtagaagagaagaggggtgtcctcctccaggcttttgccctggacgactctggtattgtaatttcaccacttcaaggcgggggctgggggggggggggaggacggaacctaagagtttccgggagtttagactctgaccaaaggcagctttagaacctcaggcagccatagctcatcggagagaatgatggtggatttgacagttcatcttgggatgtaaagttggaggaggtggaccagtgctgagccaccatggtagttagacaagatttctttattcattctttctgtggggcattcatccccagcttgtttttaatcccaagaagtatactgggacaaagaaatatatcctttaaatataatcccttccaactggaaaacattagctgcttttccggagcactccggttcaaatcccagcacctacatggcaactcacaactgtcttaactccagtggatgtggctccctcacacagacatacaggttaaataacaatgcacataaaaataatagataatgttttgaaaagcctttaaaaaaagtcccttcctttaatgaaactacaatactttatagtaattagatagatagatagatagatagatagatagatagatagatagatagatagataagtgctgtagaaaaatcaataaaatgaaatggggtagaaagaaatagtgtcgtcaggtgggtaatggaagagctttgtaatctgtacattggaaggctagactggcccttgccgtatgtagttcatggactcatgcgtcaagatgtagaagcttggcatttcctgcataggaacgagagtaggcagtaggatgctatcacactacagggccatgaaggcctggcgtaagctaagtacatggtcacacccgtggttcaggatcacattgagcatccttgtgggttaaagggggttacttcagttttcaggcccttgttaactctctacaggcatctctcccttcaaaggctttaaagatctcagggcaggaaggcagctgctccttaattttcatgctctatccacttcggtgtctagctcttgacacatacaccctaatttgattcccgattctagtgagtcacttcagatgccttatttagagaataacatattacatgtgaaaaaagattattggttgagagcacagtctgtggggacagatgaatagttgccctggctgacttgctgaatattagctcttaaggttcacatttattcctaaggcccagcatattttcaaatccaagtcaacctttgttcacttccacaaccagaccgccattttatgttcgacatttctatcaggagttcacttagcctgaattttgagcttttaaatgggagttttggttagggctgtacagagggcatggacttgtctcagtcattacacagataaaatgttagggtctatcagtgaccttactagttctttaatgtagaggcaagttctacttgaaatcataaagcagtcttccaaacatagaacttgtgtggtgtacttcagtaaatacatctagcctaccatgtgtttttataaataaagttctactgaattacaggccccttgctcgtgtgttctcagaggcagccttttgtcagtaccacagatccctactatcggagcctttattgaaaagcttgtcatcactctttgtgtagtagaatagaatgctgtaggagacaagacagcacgaatcctaagacatgggtttgctgcctggggcctgggtgatcctctttgacccactgtgtacatcactttgatgtcgccgatgctgctgcaaaccgccctccctaccgtgctgtggtccacgctaaagccacgctgtcctgctaaccagttttctttctttcctcagaataccctggagcagtgcagtgtgtgttcgaagcccatcatggagcggatcctccgtgccaccgggaaggcctaccacccccactgcttcacctgcgtgatgtgccaccgtagcctggacggcatcccatttactgtggatgcttgcggtctcattcactgcattgaggacttccacaagtaagcaacccctctgccctctgacctgccggtcctcttgacgtgggctcttgctgcccaccactggctgtgcttctttctgagctatgtactctggggtttagggagatgttccaagagtgatctctggcgcatggatggatgtaggaagtccctgttgtcctcccatactctctctattcagagcttctctacagttgatcaagacatccctgtgaagctgtagatatggaggagttgattcagggagatgagaggtgtggccattggcacgttgcacaactcccagctcttcaatttagttattacaccaaaacttgtcctaactgtgacaacctctccaggtttgtcactgtacagttaggagctgctggtacacagatacagagaccaattccatcccacagttccagtgtgagaggcagtcgaatgctatagtcaacatatccatgtcctccctcacccttctccccaaccaaggccttatgtgcctccatgtgtttcctgatgacttcagttgtgccacattttgagaaggatcctaaaagcatatgacgtgtcttcatgtctctgatttcacagcccctctcttccatcacaactgcagggtttaggaaaatggcagttttgcatttttcttcatgtgcttgttagctggctaaccagctcatcctaccagtgtgcatgtttattatggtcaatgtgggaagcttcaggtacggcccgtgagaggtagtacaggctcccttgctgggcagatgctctgtgagtggtttgtaaggctcccaaggttgaagcacattgcttaccactttgggctccgctctgaggctcaagacgggctgtgggtttctttccccactgttgattgtcaacgtccagaaggtactttccacaagcagtgttgggacctgagactcatattttaaaaatgaatttcctgaccactctcctaagtagcagtgaaagcaaaaacctcaccaaaagacgcgaggttgaatgaactaaaaaaaaaaaaaaaaagcccagaagcagaaatttcaacttgaattggacaagaaaaggctcatttttaaagggcagtcacagcataaattgtacttcacattattgctatttttagcttgtaattacacatgaaaaaaaaaacctgcatctatttaagggaagtgaaaagaagccagctcggagtgtttttctgtcactgttctctcctctctgagactccgctgatccaagaaagacagatagctgtaagcagagcacacatgtttgtgttgctggaagagcctgagatgttacacccctcaattaaaaggggaaatcagttctgacaaatgtaaatttatatcgctgccatttttctttctttctagtggtggggagcataattagagacttgtaaccagtgacataagcgtgtgggtctgaacacacactcctgcacagcagaccggagtgactgaagggggaaagaaggctacacatctcaagccccactcctcccctttcagtgcacatgaaaaacaagggttttttgtttttgtttttgttttttaaataatgtctgcacaattggaagttatggaggcaggtggatactgcccttctatggaagagaaaaaaaaaaaaacattccagaatgcttgttgcttagctttgaaagtactagaacacagagtgggtagtctttaatcatagggtgctagccttccatcatgaggtgatagcctcccatcatgaggtggcagctttccgctatggggtgctagccccatcaaggaaaccatggggtgctagccatccagcatagggtgctagcctaccaccatagggtgctagccttccatcatgaggtgctagctgtctaccatgggagagttacttcatggtcagggagaccaacacaggggcagagcctgcttctctactttggaaagcttcattttggttgtcctgagtgggtttctcctgtgagctttcaggatacacatttcagcttggttctgctggcatttccctctacatgccagtagtagctgtgttgagtgctgaaggagaagcaggacagagagagctgggtaaaggtccatgtcagtgctgggcctgtgggaggaggcagggtgtgtgggtataaccaggatacagggcagaaggagcagcacccagaggagagctgctctatcctcctcagaattgatcatttggctcagggatccgggcaggcctcatgcaagcaggagtagaagtatactatgtaagaaacaagggggttcttgatagaggagataaaggttgcctatggaaaagcctctcaaatgtcatctcagagcttcacacttgaaggacagaattgtgaggtttgcctaatgagccatttggttaaggttggctcatgtctatagccagggaattgaactctttcacagacctgatcaccagtagctactaagaactctgtagttaatgtgattaacttaggtcctgtacacagtatgtggaggtggccagtgggtacacacacacacacacacacacacacacacacaccatacacacatacatacatacacagtctcctcattttacctatataactgtattcaaagctgaacttactatctatttttaaaagatttgtttgatcttaccccttcttattcccagggatcatgccacttctatatttgagtaattttgtaagcctatatagtgttgttggacttgtaataacctatacatatgaatagtttcacagtaaccaatttactttttctttttttttttttttttttttttttgcaacaagatagactacatataaaaagtttaggacaaatacagaagcgtggagaattcccaatgcagcctgtgctggaatactgtggaatctatgtttctagtgcaagagcactggtgatgcccgggaaagtcagcttaaactgttggtgtgtgatgcatacacagtgagctgtggtttcttggcaaagatgtcacctgtggtcttagtgagacttccttcccctatgacaaatacctgagtagaaaaggtctgtttgggcacatgattttcagaatgtttagtttgtaatgagctggtcctgagtttctggacccgtggtgaggcagtatatgactgaagaaaggcacgagagaaaagggctattcacctcatggctgccagggataagaagtgccctcagtgtgtgacttgctcgccctaacaagcctaccttctacctccccccaccccccataataccatcgcagtgtgactccaatcctgaacttaatcttttgaagtctaagctgccacaatccagtcacctcctaaatgttcatcagctagcaaccaaggcctaagtctgtgagcctgaagggaacatggcaaattcaaaccatagcactgatccatttagtcattaagttagcattcatttgttaattgccaaaaatctgttggctatgaaatgactagcttcatagctcccttaagatggctatcaacagaaaataataatgtgtgtagagtgcttaacagaacttagtacataaaaggcacttagtaaacaataaccatcaaaactgctttcatcccgtttttattaatatttattagtgtctacttggcaacttaagcactggaaaacaccccctcggatcatgagctctgtagtgacagctcctgcctctctgctttgctaaggatgagtgattggtcaaaaaggacatagcttcagactgcccagagaaggaccatgagagtagacataaagtccaataatatctttctcataaaaaacagtatagcaggtggttcatgtcattgggtattgttcaaaattctcctgtatgagccaatcatagtagtcggcaaagacatagaaataattactaactaaaaaggtaagaagagaaagggggacgaaaaggaataagaagggggggggggtaagaaagtcaatcctagaggaatacatgaacctggaaaaccagtgaggctgtggctacttctgcccttccagcagcctggtagctggggagaggaagtttttaaagctaatatcagaagcctgactattttactactgataacccagattcaaaaataatcaggtaattcaaagcagttttttctccactaaatatcaacttcttgcataaaatatcaattacaacagccttgattactactgcagttgtaccatgatcctcttaatttttctttcacagcaatcaatcgatctgctgcttaattcatatttatttagattgcagccatacagatgccttttggtgcctccaggaaaattaaaacgtacacagagagtataatgtatgtaaaaactctttgacaaccgtgaagttctctgcagagtattagattactatcattatttccttttaagtcttactacaagtagataaattttatcatcattaatcctaaaactattaccatgaaaactttagtaactttcttaatatctcaacatcccctttctctctctcactggtttttcggtgttgaaacaggagctcacccagtagcccaagctaggttggaatttaggatgatcctcctgcctcagcctcttcagtaataggatttcagacatgctggttctgtgtatcttttaaggattgtcttcagttcttatgtgtgtctatgccaaatcatatctcaattcacaccttcacaaatgatatatatgcaaatgtgtgtttgaggtttcctgtggtcaagaattcaagacacattttaacgaaagaggctgtagagattaataatgttaggttatttgtctatggcagaatgaaggaatactaatagaagcaagtcagagggtagccagggcctaccaagacctttctcatccatgtttaggcaggaccttgtttcctgtgttcagctagctcatgcccatggaatagtcctgtgcacaggattgctgcatcctacatgctgcctgctaatgcgttccctggtgttctctgtacaaggcagatccatcctcttccctgacagagagcactacacaccatctggggaggcctctgctgcctcagtctctttcggtcaaggtcacacaggaaatacagcacaggtgtcagcctttgagtctttctgtttccttctgtacccttctcctgtacttgacatctcaccagaattctttctattttcaggaaatttgccccgcgctgttctgtgtgcaaggaacctatcatgccagccccaggccaggaggagactgtccgcattgtggctctggaccgtgatttccatgtgcactgctatcgctgtgaggtctgtggcatccccaagtcagagcaatcataaaacctggagattatggtgcctaacaaagaccttaacactcacagtttctagctctgacacaggctgttaataatacacttacgtcactcaatttaccccactcttcatagccacggccctctccctgtatatattaaatgcttctatttcttattcctccagataagactttgagacctaaacagaaaattatgtcacagaatattgtaaactattaagctagtggaaaggctatgatgatgatggtggtggtggtggtggtggtggtggtggtggtggtggtaccaggtacatctaagagctaattaaccagtcactccagccaaactgaagtgacccctacattcagagagagaccccatcctaaaacataacaaggagaggatgacagggaagacatcagacattgtcaaaatctgacccttgtgtatgtgtaacgcacatgcacacacacacatacatacacatccacacacacacacacagagggagggaggaagggagggagagggtgaaggagaaagagaagatgtaaaactgtgtcttctatgaatcatgttctttagaatatttttttggtttgattccattactcacttcctgaagaaatctcaaagtatcatatatcactggttctttttggcaaagccacacttcctgtggatcataatggtgtctgctgtggcactttgggtcagccttgtttataccctgagtttattgtcagctctaggcctggcttcattcatctctttgccactctcagagagcagagggtaactctgcagcagccatggcctgtgacagcttctgtcaacgtgagcaaggcacaccgtgctaaatgtgactctgattattttccaagcagactcccatttcttctaaaggcaagggctggcttccagtgctacctaacaccttacagaacaggcagtcacagttagcaacagcagcaccatatttcacatgaatgtgactctttgcattttgctcattcatgtccattatgtgccttgaccatcccaaaagctcagtaggggagaaaatgcctgaattatttccagagtagtattcattcttgtgtgcagccttcacagaccgtgccaaacctcacaatggcacccagggagctcatctcctggtctcccataaattcctcttcaccatgctatcccttttggaaaatgttaccaattatcagtcttcccagctcttgaaattttatgtccttgctactattgcagtaaatatgcaaaagccactggtagcctttctacatgacagaaatcactttccttttatttaaatagctataaacttctattcttgttcctgtccattcttctgaagaaatcctaaaactgagtacagagggtaggctgggggaggggatgcttttttttttcttcactgttgtttaggagagaaagctaccccgggagctgagatctgtaggcattttcttctttgtactatgttttgtatttggtgattagaagagtcattttacactatttgtattgttttgttttgagacagggtcttcctatctagtctttcctggctagaattttctatgtagactagactggccttgaactcatagaggtccacttgcctctgcttcctgagttctaggattaaaggtatgtgccactactcctggctaccattgcatttatgttgttaatctctaatttagtttcattcacaatctgctactacttgtactagtgttggggtacaatgtccccattatgaaagcctcttaagaggctcggggaaagtgggtttatccctgtagttcagttcacttacatcactgtcttcatttccttaggactgtggtggtcttctgtccgaaggagacaaccaaggctgctaccccttggatggacacattctctgtaagacctgcaactcggctcgcatcagggtcttgacggccaaggcaagcactgacctgtagagtcaatagccagctcagctgccgagtgcatgccagcaagaagagcgcaacacaagaaaaagataagagaagaagtagaaaaatagaggcatagctcaaccactaggatagtctctgttcttcatgtgctattaacctttctgtagaagcgcatagagaatacgatttgtctacgttcttaccaaatacacatttcacatttaatcatgcaaggccttggtgagcctttgttccaaggacttccacatttttgcacagattatactccgtcccattcacttctgcattcctgagacttttaatcctcatgtttgtctcacttctcatgtggttgaatagatttttagtgtggtatttgctgtcacatgatttttcctgggtgaatgtgccagcctgcaggtgccttaagtcttgtcctgtctgtcacttttcctctggctgtggctacaaaaggcagtcattctgttaccaggtattgaaaaggtgaagtttcccattgcactacacccctgacgtctcttgctaaaataatggtagggggatatttttctatgttaagctataaagagtttatttgaaaaagttaacaggagcccactttagtctgcaactatccaaattcagcagtcaaggctcattggaaaacattgattagccaatatctaaaatgtggggaaataaaaccaagtttcaccactgtgctaaagaggcagaattctaggtgtatctggaaggcccgttgtatttccacaatcccaccctgagagttagctcaccacactctctggatataagactgtcaggcttgcttttggtacatttataaatctatccaactcttcatccttaaagcactgtgaaacttcacctaatatataagcatggttactgcaattaatatttatcttcagaaagataagtattaaaatgaatcaaattcttatctttctttctttcactttatagtgacccaaacctaaatctcttttgcctgaaaattgcaaatcgggacacataaaatgaaattataggaccatgtttcatcttctttaaaaaagagaaaaaaaagctgggaaagattgtgaaaccagagtttattattcttacaatcctctgtaactcaagtacatactgcaggagacattttcctatcatcaacgtgacattcacaccacactttcaaagacaatcgctgaaaaccaaattgtctttctgaggtaaaaatatgcggaatgcctgcctggaatctttatgcgaactcttattagccagtgaaacacttgcttgccaactggagccagttcgcttcgttaagaggagacacctcgctttgcagttgcagttggccattattgtaaagtcagtatctcagaatgagatttctcaaagctttctttaaatcttctacagatatatacctttaaattatggaataccttaaatattacagaaaggtataaataataatataaaggtccctctatagctaacaccgttctagaagtatagtcactttaaattttttaaactccacaaatatctttttatctcttttatatagtactgggagttgaactagggcctcatgtgctcggcatgtgccctggcaccccagcatccccagctcttccgtgtctttttcttttttttttaatctttatgacatgatgattttctagtctgacagttttaattttaacatttagagcaaaaaaaaaaaaaaacctgtttaattacttgtgcatgtttaaaattgcaacccatgcctcaggaattccataaagtttattttacttgaatagaagtcatcttaaaagtgattaaaagaagcccttaggccattgtcacacagcccctctgggtcagtctgtggcttattgactttctccacaggcagtttgcctgttagaatccccaaagctggcattttggggcctttcccttgccccctgctctcacctggcttctcttctcttgagattcatggaggcagcctgtggatctcagaattcagtgggcgctctctagctctgaatccctgtgctgcaaatcaaaggctcacctgtgctggtgacctcgaggaacgctaacagacagtcgaggtgaatacaagcctgaactgactaaaatgctcaccgtgaaatatttcaggaaatgtctttaagccaaaagtagagtgcagtataagtaaggggcaggagtaatgtctagaaatgtagacagcagaggaagagtttatgtaatatttatactatagagcaataacatcctccatgtttgttacatgtaactacttgtaaccagatgtttacatgcaagatttataggaaaatgctgcccattcttccctgaggtgttaagggcagagctcccttgctcgtagcctacccagtgctttcctgttgagtcacctcagaggatctttaccaaagatttttttaaagtaaatttctttttaatatagacttatacttttataataatgaatgtgcacatactcatatacagaaatatttaggattagatctttttctttcacaaggtctcatgcaataaagtatccaccacattattctccaattactttaatatataatttacattgctttctcgttttcttctactaagcatttgacttaagcaatactaaatactctgctctttgctcttttatctacataaagatttgcctactgtagagatataaagatctgttaccttaatgattatatgcattgccttttgatatattgccttacttatcatttaaatacataaatagaaagatataatgtctgtaacagaaaacttataaagttatacctgaattgtttaaatatcaagagcacaaacatttggttattctgtataaaatgaaacatataagaaaggaaaaaacccaccatcatgagctctgcagagaacatttaaaataattctctttctatttctggagtggtagggatggatctctgaaacttgtgtaaaatagacaagtgctctaccacagctaaacctcccatccagagtaagatttcatagctgtttgggttcccatctaagcctggctcaatatggagtctgattggcaaacaacattgcctttagaactcaaaaatacaccctcccaatcctagctcatggcctcagtactagtgaaatcctgccacctctgcagctcaaagatgtggatgttttcctgtcaatagcacactgtccctgtaggaacaacttgtggtcagaattgctacgtgggttatatgctgattaaggacatgaacttaaaaacactaaaaatgctgcaacaattttatgttggacttgaacagtgtggaacatattaaccataaagagctctcttgcatttgggccgttggaaggggagagtgctctgtgaggctgcagcagagctttaataggcaggattctgaaaacacaactaccaagcatcttcagagttactacaaatcctattaatgtgaaccagtcaggaataacagtgttatttctatttgatgtggtttaggcttctcttgtcagatctgtgtcggttgccccctgatccttccattctcaagttttgaagggtgtcagggaaattatggcagctgctagggagatctgagaaacgctgatgtaacctcccagcctctcaccatccctcttggcttggaaaggctttttttccccatatacatttctagaaatattgccattctaccttagcatttcacatttgtagattaaacaagtgattgtccatctgttgcctacagctacagtacatgtgtgttatgaatgaaatatgacagcatgttccatacccccgcttcagccatctgtagaaaaccagcaaccgaaaaagatacctctgcaaaatgtgcctcaagtccttgtcctgggatggctcttctggtgtgctttcacaagagacaatcaaaagcaatccactattgtgccttattttttaaaaaaaaatctgtttacacttctatgactattgctcagtaatggaaatgctacacacacacacacacacacacacacacacacacacacacacacaccccaatctcaaaagatcggtgagaaaaagacagagagacagagaggagaggacgagaacacacttccatcttactgtaccagtttggatggacctcatagctctaacatatgcgagcatgctcacggttgaggcgatgtgtcggctgttactagtccttaggctttggtctccccctgagtttagggggatactaaaggcagagacttgcacctgccggaccccttctgcactcacatttttacattgtattatttgtttgacttagggataaacaattttgatttctgagcaagttatcatcgtggcacgaccttgactatttcaggccacgtgacttaattggctggtcattggaatgaagctgcttgtgatgctggaggttggctagtatggctttatttccgacctttaaaatgaatctggacaaagctactgtgatctaatgcaagtgtttcacccctcgctcccttgctttctcctcttctctcctttcctgcctccctttaacctctctctctactgtgccaactaatgctgccctgtttggccttctagtaagtttagttaggatacaacagcactatgaactcattaagggagaatggctaccaggacatatacctaccagccagaaaaaaaaaacaaaactgctttatgtggacatactctttagcttgtgcttattcctagagggaggggtgctccttcaggtgtactttaatgaatctgtatcagggtcttagctaatggggtattgctttaaaattatctgtatattcctcacctatatgtaaagtgatcattctaaggctagactaggatgctgtgggtttttttttttttttggtttgtttttttaaattagatattttcttcatttacacttcaaatgctatcccctttcctagtttcctctccaaaaatcccctataccctcccctctccccctgctctccaacccacccactcctgcttcctggccctggcattcccctatactggggcatagaatctttgaaagaccaaggtcctctcctcccattgatggccgactaggccatcctctgctacatatgcagctcgagaaacaagctctgggggtactggttagttcatattattgttcctaggatgctgtttttaaactcaaagtcactttcaccacaaaatacttaatttttttttttcgagacagggtttctctgtgtagccttggctgtcctggaactcactctatagaccaggctggcctcgaactcagaaatccacctgcctcttcctcccaaatactgggattaaaggcgtgtgccataactacccagcttaatattttttaataagagaacatcattttgtcccactgcaatgagcttgataattttctttgtggcaacaagaattgactcagtacttgtaaggggtagtttcagcactaggattttctttttgtagagtatacattattttgtgggcatattttcccttagtacagaatagaaagatacgaatttacttttctgttttaattttttcttccttatgcaaagttttttagacaatattttagttagccgccatgcataatgactaattgtagagatctttgtaaaggacatatttttatccatcttactgggaaaaaaatgctcaaatctttgttctttgcttctgattggtatttgttttatagcagggtctaggcaggatgataagtagctctgtctcatagcatttattaaaaattaccatactacaagtactcaaattattttacaatacttaggatcaatggctgagctaaattttccaagctacccatccacttagggacaagataaaacttaattcatctgactgatagtcatctcctgtgccccaataggatattgttaaatagctgccagtgtactccatgaacttgtctttgaacataacttctaatttcagctttcagtcctaaaagcagaatgctgtattaggaatgcagatgtcaccatgtcaccttgtgctcaagccaagtgctaggaggtcttgttgaacatatactcaggtgctgtacctgggtgtacagacctatggtccttgtaaagagctgccttctctattgctttcatgaccgatggccgtagcatttattaatgaatatgatggccagtgtggaatccactcaaggcaacccaggctacctgatgaactacataaaatctcctaaattccagactcgtcacctttgtgggtttgataccaccaagtacttcagcttgtcatttattgacagtgcatgttatcttctgattccagtgacattacctactagtttcctgactatttccggattctctttgcatctactctgtgacccagctactactgtctgtcaaggcagatcaaagcactttgcttcagattgaaagggaaaggtatatgaatccttctagggccactggtggcctccatggaaggggattccctcctaatgatagagctaggaaaagacaggtcagccaagctgagaatacagccctctttatcttctgggctgatttttgtaatcatatctcactgctggttttgatgccaatagaatcagagtcctcaggaagggaggaagtgagctaaagcattttccatctacaagagccctctctgcctcataaagtcctttccctttcgcaccgtcttctcaaggataacacttgtctgtatttccatgatggatagagaaacaagttcttgacacttagcaagttctgcaccaatattagtcgttggttttaaactcatccatttattactaatatttgtgtctaaagcaacttctgtgatcagtttatactccccttaagacagccaaggctgagagaaaccctatcttgaaaaaacaaaaaacaaaaaagtggagtttatgatttaaattttgtcccctcagtatcttagttccttaactgattttgttttaacggccattgttggatctaagaggctcaggctgactgcattaagatccaatagtcagttcagacttcttcctagaaatgagtgaggcatgtgaaagacctcttcacagaggcctctgtgggagttcagggagatcatggaagtgaggacacctgagcttgcttactgctgactgcattgggacgtcatagttaaggcccacaaggacaacctaggctcatttctgcaaggatgccctggccagggtatggattcagaagtcttcatagcagggaaaactttcatatattcatgcttcttgagaggggaaaggcaccaagaaaaccgactgttgatctcttctcatcacgattacagcggaggaggggtggctgggcagacacaagaaacccatacagtataggtaggaaatagcaccctgtggtctttgttggtgcaaatgcatttttattggaccacactacattctcctctcttgtagcaaatgtgctggacttttgaaccctcaaaaacgaacaagtgggctctctctgcgtctttcttcttctaggaacatagttaaggctcccagccatctgctttacttggtgttccagttccgtcacgactccttgctgcatggtgaagtttgcttaaatagggcctgtgtcaagaaactcatcagcttgggaggaagtcctgttgtttcagctaccttggtcattaaaaccagtcttcggctctgttttttcctcgattctcaaaactaacccacgaaacataataaaatcctggcctccccttttttcttcttccactgtatttgttttgttttttaacgctgtattacttttaaaaacaacttccatttttagctgaagagtacaagtgcttcaaatttaagcacccactaaaaaaagtcaagaagatttccaacagtcagatattagaatttgtgtaagttttgttggtgtatttctatccagaaaacaaaatgttctgacagttatcatatagcctcatgccctaccttagtaactgtcttgtgaacaatttgtttcatttatcagatccactgataatgacctttaaaaaatttgggaaacatcactgtcgattctccagcttttacaaagaaaaggtcaaaaacaaaattcagtggtactgttactaaactcactacttctgatcagctcttcagtacaaaaggatactgttcttaaggaaagggattgggtgatgctatggtttatgtaaaagtatataaattctctcactgttgcccagggttacagtttagctagcaaccattagcctttggaagaacagggttttttgtcccttctgtatcagctttgaatttgagagccctgtcgccagaggctgctatccgcccttgggtaggcagcacctatgggtggatttctaagctgtgaaataataaaattcctgagagagtttccaagctgctttcacacatagaagagccctgggaggatggttattaatagccctgtcctagaagcaaggctgaggttcagaatccttaagtgtcttgccaaaagcaatctagctggtaagtgtgagatgtgggtatttacctaccccttgtcacacaaggccctgttagaaaaatatccatggaaacccacaaccatctagttatcagtggcaggtggtatatgtgtatcatattgctgcagattattaagagattgcacatgtctgtgtcatcttgtgagaagccatgggtctctgtgatcacctctatggtgataccccctgagcaaaggccactgaaaacagacatctgtgcagaagcacattgcagcaaaatttcccagagagttgctttacattcactggaaacatctctggacctgtcaggttcaggatatcaattgagactatattatttcaaatatagtagtgtgcagaggttacctgagttttaggaaatctctccctccaatggaccgcaatgtatatcccaaagagacagaagctgctataggttaaaaaaacaaaacaaaaaccatgattctctctgtcagcccaagagtgtgctgaggcaaccaggagtttctaatcaaacaaacccaagtccagaggccttgaaatgtctaaacaagtgctattgaatgaacagacctcctgaaatgtacccttcattgtatctatgggattaatctaccctcatcacaaggagcatgacactgtattcttagcaccaacaaaaaccctgcttggagcaccctgggtacattctagaagtcagccgacattgcaggtcaacaaatcaacactcttcttagagctgacttcctcgtgaatatgccttccaggtgcagtcttggctttcctttttctatcttctggttgtttgctacaagttgaaaatccgttgactaattaagaaaatattctctgtccacattaaatctgtcctcaatctagaaaccctttcaaatgccctagtttgtaagttaggcatttgtcttccctagagcctctcctccatcagaccaagattaccgctcataaaaaagaaatcttattttaaaagactttagctttttagaccaggaaattaataattcctaaacctgacccattttcatagcttccagaaaggaaaagaaaaagctacttaaattttgtgtggatctgtttatctcttaaaatatgtccaggcaatttgacgcaggggtagaacgggaggtgtttatctctcttgcttgattccttctgtttctatggggaaagcggtaaagacgaaggacccagtgttctttggggctgggttgccattttttatcccatctgctttgcttcatcgtgatgaggagtaattcctagttgctctcataaatcctcatcctccatcacaatggagtaaatatattaaatctgaatatctttgctcaccaaattacttagctccatttctcagtggggaaatataaagcaggcagagctggccttcaattatacacttaactccttcaagccctttttgctttatttcttaggggagactgtgtgaaagagaaacaacctagtccctcctcatcttttggagccatgatgctcacttaggaattacaggaaaagaatggcttggcttggccaggtcatgtgatctgcctaacgtgtttcattccttcaaacacagactgagaaaaaagggagtttcatcatttaaataccatcaatgggaacggtctcattttgcctaagatgggagctaatctagttgggtagtattgcattgtagtaaccttttgagttgtgcttggttactaaaagagtggcagatacatcagcctatgggattacactaccaaaagccatagtgccacagacctcaatcgctcactggcaaactgaattaccctggaccttccttctacttcaagtgatatgtgttccaaactgatatgtgtcccagatgaaatagagactgatctaatcaaaaaaaaaaaaaaaaaaaaaggtttggcagggaagcagtagcaaaatcatttctcagtgactgtcctttacccatgtgtgcacttgggacacctggggacactagcagactacctaagacatctttcctcatgaatgaagggtagaagagttcccctctaagcgttggagtcaagtctttactcccttccagaaaatatgtcaaggagaaaatagaattatagatggcacatgactgtctggctcttgtcttaagaatgctgtgtggaattatgtgccttacgcaaaacctgaaacttagaagccaagttttgtgcagcggaagggagcactgagctctgtggtggctccgcgaagtgacttagcctgggttttgcattgccttgtctggatctatgcctttatcgttacttaacagatttggggcttttctttctttaccgctaagcatgggcatgtgtgcaattatgaggtgaactttctaagtagtaagcccttgccacaaagtagacgttacacaaaggcacagagcccagggatagtaatcttgcctgagctgctcgcacaggcttcttattccatggctttgtcgcaggcttttctctttctgtgccatcacctttgagaaacatgattgcaccttctccaactctgcctttttaacagcttcagttgagttggcaagactttcccagctctgaatatagccatttcccgactccggcctctgcgagactgatttcaaatctgtgatcttctgttcagcgtacacatcagcaaagtgagaagttgggtgctaaatataggctctattaactttacttttagatgtgctgccttcaaagagtgcctattctgagcaacgtaaacgttattcctacatatgtatgtacacacggtacccggactcacactgttcgggcttcacaaacaccatcagcaggggtaggtgctgagataaggaagcatcgccaaattgaagagggtggctcatttccaatctccccttcagtggctaccatgaaatgggctaaaacaagagtctcctgcacttcctgctgacacagccactttgcatttatatcccaggaatagtggcaaattgctgaggaacccgtatttcatggaaataatacaatcatgaacatttcatcaggagagggaaaggcaattaatatgtgtcatgtgtgttttaaaaactaagtattgctaagttttgagtgtcagcaggtttcttttatcttacaggctaacatagagaaaactaacgtcttggctatagggagtgtaagctcagggggccaggcatccctgccagctccttgaagcatttttactccagctcctaagaataccagtccatgctatttgagggcttttgttcctggagctctctctgtcagcgacaggaactctaggtatttttgaggaggcagcagcatagcctgggagggtgagtggttacccagcagtcgtgctcggaggtgagccaggtagatgtgctgaggtacatggagataccgtatgatcgtacaagggttgaacggaggacatgattccaaaaaagattgttctcaatgtgtcgtctgactcaaccagctggca

SEQ ID NO: 24 - DNA, 3945 bp, Mus musculus
taactgcagatttccacaatgtctcacccatcttggctgccacccaaaagcactggtgagcctcttggccacgtgcctgcacggatggagaccacccattcttttgggaaccccagtatctcagtgtcaacacaacagccacccaagaagtatgctccagttgttgctccgaaacccaagtataacccatacaagcagcctggaggagagggtgatcttctcccaccgccaccaccacctctagaggatcctggtaccatcccacctggtcccggacacttccctcctcctccaccactggatgaaggggctttcaaagtgcagcagggaaatcctggaggcaagaccctggaggaaaggcgctctagtctagatgcagagatcgactccttgaccagcatcttggctgatttggagtgcagctcaccctacaagccacgtcccccacagggctctgctagttcaatagcctctcctccagtttctactcctgtcacaggacataagagaatggtcattccacagcagccacccctgacagcaaccaagaagtccgcaacaaaaccacagcctgcaccccaggctgcacccatcccagtgactccaattggaacactcaaaccccagcctcagccagttccagcctcctatactacggcatccacatcttcaaggcccacctttaatgtgcaagtgaagtcagctcagcccagcccacattacatggctggtccatcctctggacaaatatatggtccagggcctcgtggctataacaaccagccagttcctgtatcgggacagtgtcctcctcctccaacctgtgttggtaccgactatgcatatattccaccatctggacatccgcctgagtctggatatgggtatacctccaaccaaggacgctattatgaaccttactatgcagcaggtcctagctatgggggccgaagtgaaggtgatactgcttatgggcaacaggttcaacctaatacctggaagcgggaagctgcgtatgcccctcctgcaagcgggaatcagaaccatcctggcatgtatccagtcagtggccccaagaagacctatatcacagaccctgtttcagcgccctgtgcaccaccactgcagccaaagggtggataccctgggcctatggggcctccttccatccccccatcattccgcccagaagatgagctcgaacacttgaccaagaagatgctgtatgacatggagaacccacccgctgacgattactttggccgttgtgcccgctgtggggaaaatgttgttggagaaggaacaggatgtactgccatggatcaggtcttccacgtggattgcttcacctgcattgtctgtgatgtcaagctccgagggcagcctttctatgccgtggagaagaaggcatactgcgagccctgctacattaataccctggagcagtgcagtgtgtgttcgaagcccatcatggagcggatcctccgtgccaccgggaaggcctaccacccccactgcttcacctgcgtgatgtgccaccgtagcctggacggcatcccatttactgtggatgcttgcggtctcattcactgcattgaggacttccacaagaaatttgccccgcgctgttctgtgtgcaaggaacctatcatgccagccccaggccaggaggagactgtccgcattgtggctctggaccgtgatttccatgtgcactgctatcgctgtgaggactgtggtggtcttctgtccgaaggagacaaccaaggctgctaccccttggatggacacattctctgtaagacctgcaactcggctcgcatcagggtcttgacggccaaggcaagcactgacctgtagagtcaatagccagctcagctgccgagtgcatgccagcaagaagagcgcaacacaagaaaaagataagagaagaagtagaaaaatagaggcatagctcaaccactaggatagtctctgttcttcatgtgctattaacctttctgtagaagcgcatagagaatacgatttgtctacgttcttaccaaatacacatttcacatttaatcatgcaaggccttggtgagcctttgttccaaggacttccacatttttgcacagattatactccgtcccattcacttctgcattcctgagacttttaatcctcatgtttgtctcacttctcatgtggttgaatagatttttagtgtggtatttgctgtcacatgatttttcctgggtgaatgtgccagcctgcaggtgccttaagtcttgtcctgtctgtcacttttcctctggctgtggctacaaaaggcagtcattctgttaccaggtattgaaaaggtgaagtttcccattgcactacacccctgacgtctcttgctaaaataatggtagggggatatttttctatgttaagctataaagagtttatttgaaaaagttaacaggagcccactttagtctgcaactatccaaattcagcagtcaaggctcattggaaaacattgattagccaatatctaaaatgtggggaaataaaaccaagtttcaccactgtgctaaagaggcagaattctaggtgtatctggaaggcccgttgtatttccacaatcccaccctgagagttagctcaccacactctctggatataagactgtcaggcttgcttttggtacatttataaatctatccaactcttcatccttaaagcactgtgaaacttcacctaatatataagcatggttactgcaattaatatttatcttcagaaagataagtattaaaatgaatcaaattcttatctttctttctttcactttatagtgacccaaacctaaatctcttttgcctgaaaattgcaaatcgggacacataaaatgaaattataggaccatgtttcatcttctttaaaaaagagaaaaaaaagctgggaaagattgtgaaaccagagtttattattcttacaatcctctgtaactcaagtacatactgcaggagacattttcctatcatcaacgtgacattcacaccacactttcaaagacaatcgctgaaaaccaaattgtctttctgaggtaaaaatatgcggaatgcctgcctggaatctttatgcgaactcttattagccagtgaaacacttgcttgccaactggagccagttcgcttcgttaagaggagacacctcgctttgcagttgcagttggccattattgtaaagtcagtatctcagaatgagatttctcaaagctttctttaaatcttctacagatatatacctttaaattatggaataccttaaatattacagaaaggtataaataataatataaaggtccctctatagctaacaccgttctagaagtatagtcactttaaattttttaaactccacaaatatctttttatctcttttatatagtactgggagttgaactagggcctcatgtgctcggcatgtgccctggcaccccagcatccccagctcttccgtgtctttttcttttttttttaatctttatgacatgatgattttctagtctgacagttttaattttaacatttagagcaaaaaaaaaaaaaaacctgtttaattacttgtgcatgtttaaaattgcaacccatgcctcaggaattccataaagtttattttacttgaatagaagtcatcttaaaagtgattaaaagaagcccttaggccattgtcacacagcccctctgggtcagtctgtggcttattgactttctccacaggcagtttgcctgttagaatccccaaagctggcattttggggcctttcccttgccccctgctctcacctggcttctcttctcttgagattcatggaggcagcctgtggatctcagaattcagtgggcgctctctagctctgaatccctgtgctgcaaatcaaaggctcacctgtgctggtgacctcgaggaac

SEQ ID NO: 25 - protein, 612 aa, Mus musculus
LQISTMSHPSWLPPKSTGEPLGHVPARMTHSFGNPSISVSTQQPPKKYAPVVAPKPKYNPYKQPGGEGDLLPPPPPPLEDPGTIPPGPGHFPPPPPLDEGAFKVQQGNPGGKTLEERRSSLDAEIDSLTSILADLECSSPYKPRPPQGSASSIDPVSTPVTGHKRMVIPQQPPLTATKKSATKPQPAPQAAPIPVTPIGTLKPQPQPVPASYTTASTSSRPTFNVQVKSAQPSPHYMAGPSSGQIYGPGPRGYNNQPVPVSGQCPPPPTCVGTDYAYIPPSGHPPESGYGYTSNQGRYYEPYYAAGPSYGGRSEGDTAYGQQVQPNTWKREAAYAPPASGNQNHPGMYPVSGPKKTYITDPVSAPCAPPLQPKGGYPGPMGPPSIPPSFRPEDELEHLTKKMLYDMENPPADDYFGRCARCGENVVGEGTGCTAMDQVFHVDCFTCIVCDVKLRGQPFYAVEKKAYCEPCYINTLEQCSVCSKPIMERILRATGKAYHPHCFTCVMCHRSLDGIPFTVDACGLIHCIEDFHKKFAPRCSVCKEPIMPAPGQEETVRIVDRDFHVHCYRCEDCGGLLSEGDNQGCYPLDGHILCKTCNSARIRVLTAKASTDL

SEQ ID NO: 26 - DNA, 687411 bp, Homo sapiens
  misc_feature (1)...(687411): n = A,T,C or G
tattgcagggtttattttatatatatttgctggcaaaaagaaggaaagagaaacaatttatatgttttttatttataataaaaatatttattataattatataataattaaattatagtaaaaatatttatttataatataaatataaaatgtatattatattataattatatataattatattgtaattaaattatatataattttatatattatatattatatatattaaattataatacagcatattgtaatacaatatattttatattaatatagtatagtaaaatatataatatataatataatttcattataataaaatataataaaaatatttaaaaatgtattttatatcttacatatatattcaaatatatacatatatttatataaatatatacttaatatttatatattaatatatatttttataaatatatatatattatataaatataaatatatatttatataaatatatataaatatatatatttttaaatatatatatatttttaaatatatataaatatatatatttaaatatatataaatatatatttaaatatatatatatttttaaatatatataaatatatatttaaatatatatatatttaaatatatataaatatatatttaaatatatatatatttaaatatatataaatatatatttaaatatatatacatatcaaatatgtatatatattttttctcttttttgtagagagaagatctcgctatgttgcccaggctggtctcaaactcctaggctcaagcaatccttctgccttggcctcccaaagtgctgggattacaggcatgagcccctggccttatagcagggtttaaattacacccactttgggggaagagagagtggtgtgtgcaggctttggtgccaaaggcttgcacatggttactggctcagccacttactataaaatttgtaaaataggcaccatggacacatctgatattaagcatttaaaaagaggagctgtgtgaaaagttttgttgactacaaagagctacagacatcttcctttttatcttgatgtggatgtttatgcactgggaattggtggggccatctttagagaaggggtgggccagtgaagacactactgaccataccccaatcagaaaacactcccaaggggctcacttccccactgtgcagtaaagaggttttgcactgagatttggaggtacagcacaaggcggggaaagcatgagccaagttttgagtcctgtggaattgagggtgcactcctgcctggggccaggggttcttgtagcaatataaagggagacgtggctaaaaacatagattgggctcatcctggaggccttgagtctggcctgagggtgagtggatgctatcgtttgtgttgtttagagcactggtgaggagtcaactgggaaaatctcaatgaaatgcatctttaggatgtgccgggaatcttggcagtaactcaggagggcaacagggaatcttgcaattggagtagcggggggtgattctcaagttttggacacattctaagtaactttttgcagtgcttcaactttttacttgagtttataataacaatggcaatattttttatagttgtagagctatatgaaatatttttacacctgttggcttcattgttcatacaatatcttagtgagggggaaggtaggattgttttcgttcctgttttacagacaaggaaattgaggctcagagagcagatgggatttctctggccgcttggctggttgatgtggaagtcaggagtgaggatgccaagtttcacacttcttcctgtgccaatgacctggaggagtgtttttctcaaactcacatttctttatcctccacagtcttgggtgtcactcttggaagtgtaagatggtcatgagtttcaaagatttctgagataagctgttaagattttcaaagatgagctatagagaatttgggacataaaatgtgtttcttccagtaactcttgcttgctatcatgttgttggttcaaattgaacatgttgataagtgccagggaggaaagaaaccagtacctgctacttattgggcaccttttttgccctgaactcagtactgcctgcttttccatttgagtatctagaaacatttatggatggagtgattgtaatattgtacaattctgtcaactagtttattagctaattctcataaaagccttaggaggtagataaacaatattattttccattttacagatgagaaaactgaggtttagagagatgaaataacttgcttataacttgcttgagagaacacaggtcctaaatagattataatctttttttttttttttttttttttggcagagtcttgctctgtcatccaggctggagtgcaatggtgcaatcttggctcactgcaacctccgccccaccaggttcaagcgattctcctgcttcagcctcccaagtagctgggattacaggtgcacaccaccacacccagctaatttttgtatttttagtagagacggggtttcaccgtgttggccaggctggtcttgaactcctgacctcaagtgatctgcctgcctcggcctcccaaagtgctgggattacaggcctgagccactgcacccagctgtaagtagagtataatgtaagttttctaatttgagacttctttcttccttgctgcaccccatctacgccatgtgttgcccatcccactggtgaaaatgcagagctgcttgttaaggaggtacatgtcagaccttggaatttactggaatcagacctggaaggtactatgaagagctcagaaggctggtggttttcaagctgttctcttctgagcctgagagactccaggagtcatcttgagggatatagcacggagggaggtgaaaagtggtgggaagtggaggaaggaaggggaccgctagagccaacctgagtcgctctgctttttcctattttgtaagctaagcattgtcaaagcatccatttaaaggaaaagttctgctgctacatataaaagttaaaaaaccactgtgtctacccttccttttgctaacactgagaggcagagtggttcagcacaaggggacacaaagtggcttagcacgagtcacgagatgtgacgggtctgagacctctcagcctagagctcccttacccctgggccactttgttagacacacctcctttaattcaaatccccgtctcagtgggacatggctttttcattttttcaaggaaaggtttaatctgtccagatccctgtgaagatcttggctcttggcgcacctgctggaggttcgaggtcctgcaaccacagagtagctgcaggaccttcaggatgtcccgagccacaaggtctttgacctgcattttgcaacctggttgtgtctcccctttggactctgggaaccttgctgagattggtacaatatctgtgctaaaaaggtttgaaattatagctagtattgtgttaccttcctggtccaaccttcacagacattgtctgactaagtatatataactcttgagtgttcactgtgtacaccggctcacaagaaaggcaaggttcctgatcccaaggatctaatggagagacagaaacaaatataaacttttgtcaactatttcagagacagttatttttgttatacaagattgttatgcatgctagttatgtggagaggatttcatctcttagaaatgagacggggagaatctgggcgatgagaaagaagaccagaactggggagtacagtctagaattgcaaggggttgagtttgctatgtgaagcagttagttttggactgttgcacttactatttctgagatttgagcatctgacttttcctttaagcttttgttttctcatttgtaatatgggagtgagagtgcctagttcacagggtcattgctggggttaaatgagataatgtatgtaacctgcttagtataatacctagcacagagtaaacactcattaaattttcattgttatcgttgttatgatttggcagcgaggagtcaaaagagcctattttcttaaactcatcaatggtataatcagagctttgcatctcgaagtaaaggaacactctgcttttattatttatttatttttcactctgcttttagacatagaattcaattgcctcaggctacaacaaactggcttcaatctacctttctgagttaacttctgtttatttctatccatctgcccacttctctcactagtgacctacacattttcttttttttttttttcttttcttttttttttttttcttgagggggactcttgccctgttgtccaggcttgagtgcagtggcataatcttagctgactgcaacctcttcctgccgggttcgagccattctcctgcctcagccccctgaatagctgggattacaggcacacaccaccacgcctgtttagtttttgtatttttagtagagatggggtttcaccaggttggccatgctggtcttgaactcctgacctcaggtgatccgcctgcctcggcctcccaaagtgctgggattacaggtgtgagccaccgtgctccacccacattttctaagcttgattttaacttgctggtctttgtcatatcttctcagtcattgctggggttcaaatctttcttttctttttcttcttttttttttttttttttaaagatgggaatctcactatgtttcccaggctggtcttgaactcctgggctcaagtaatactgccttggcctcctgagtagctgggaccatagacatatgccactgtgtctggcttaaatatttccttctgtcggaatgccctttgttccttcatctgtgcccccctgctccatcctcttttaattcctagcccaaaagtctaacccacccattgggagggattctgcagaactcatagagtttacaacatcttgtccttcaattgcagtcagtctctgtcttgaactggatttgtgagctccttgaagttgtttgtatctcacagctctttgctgtaacatccctggggattcaagcacgcacacatagtagatgctcacacatctatgcaataaattactttagtgtctttctcaaatgatcagcacaggaagcaaatgataaaatgcaaaccagaaaacagacctcactgggctctgtgcttgtcagccttgggaatggatttctggcgaagatccggcccctctacaaatgacagagatgacttggctcttttcaggaattgaagagaatcctgacaagtggcatgttgggaaaggcctgaaggaagccagaccagcttgctctcagagctccttgggtcccctgcggcccccaggtgatcttcagcaagacctggtatgtaaatgagcctcatctgctggctcagcctgctgcccactgctagggatgctagaattccagggtaagcttctgtgagccgggctgggaggtttagtgggttggagattactagctttttggtatctgcagcttgaaataccttgtgcccttgattaattcatgcttgggagcatcctcagtgctctctggaaaatagctccttactgtatgtttatttccccacgggcttatttcagagagactggagcctgtgtttctaacagcttctccaaggaaaacatcgcaggccacgtttccggaactgagaatctcagggggtctttgaaacgtccatctctattacctccttttggcccagcatttgcttttagctgaaaagggagattttgtcttgagccttcctgtagacatatgtgacttggagtttgaaaatctgacagctgctgctgagctttgaactgcaagagtgagcagcatatagacataaccccgtagaacatcaaatcattttcctttaattcccagagacttaatgtttctttgtcttgcgaatgacctcactgctttttgtatttgtaatggaatgcacagtcatttgtaagtaatcacacaataatcccttacacttttataatgccttacccttttccatagggctttcactctcattatctcatatgatccttataactgctctgagatataagcagagcgcctattttaatctccaattttcaggtgtagaaactgaggttcagaataaagttagccagagttaaaacagttagtatgtagcagaattggaaagggagtctacagaattggaactggagtctcctaaaccagtgtttcttttgctccttattgctggtgtgaccttgggaatatacttaacctctctgaacctcagtcttcctatcactaaattgggtataatactacctcctgggatagttgttggaagggattcaatgagactgggaaatcatttaataaaaggtagaacacactaataatgggaggcatcattgtacttactacatgggccttgaaggcgaacagtgccatcagaactgtgaaagaaaataacattttttctctctttttagaaagacacaggttcagaatggtgttgtcagggatcacaagctcccagccccgtgattagcaaattgaccctgctgccctgtctgctggctgctttcttattctgagaattgtgttgacaagaccctcttttcctacagagctctctcttaatgttgcttggaatagccttgtgtcctggagacagttttaggtctggcaggatctgagaacaggagtggggatcttggaatgggatctgcatccctgagcttcatccacaaagggtgggaatgtggcttgggctgtggggtggaggtagatgaacagctggacttgcaggtctatcttctgttgtttctcaataaagtagacaagtccatctgatgggtgtttagtagggtatgacttgtgagtccacaaggccagcagtatatatgctgaatggactgcttagcagtaacacactggaaaaatccaaaaagaatggatttcaagttggcaaaaaatgcattagaagtcagcagtgtgatgtggtcaggagaacaaccagagtgactgtgggatgaggtcttggatagctttgtttctatatacagtcagccctctgtatccatggtttctgcatccatggattcaaccaaccaaggctcgaaaatattaaaaaaaaaaaaaatccaaccataaaaaaatacaaataaaaaaaccaatataatataacaactgttcacatagcatttgcattctcaggtattataagtaatctagagatgctttaaagtatacaggagatactacctcattttatataaaagacttgagcatctctggatttcggtatctcaggggtcctggaaccaattccccatggatactgagggaacgagtgtacatactcacctacaaaaattccaaaccagtgagacagacataggttgaaatatggtcctgagaggcagaacgtgaagcaagggatggaaggccggggaggaaccagatttcagttccgtgtaaggaagaactttctgatggaaagatggaatttgcagtggcaggagataatgatctttgcttcactggagacctcaggaataccaatggggcaggcactgggcttaatggcctttatggccacttctaattttgagatcacagagctaggaggatgagaggcacacatatattgaaggaactgaagggtctctctctatgtggatgtggaaactgatctccaaatgtttgcaagatggagggtacgtttaaaatatttcattctggttttcatattgatctctgtggctctccccttggtctttggtttttaaagcttaagaccattcccagaagctcttttccatggaataatctcctttctttgctggaatgctcctgttgggatgcaggaagggactctgagctcctgacagaatgaagaccacccctttttgctctccagacctaattttgacgtcccacgcccacccgctgaggagggttgcaatggcgagatctctgtcctgaattctggttctggcatgcagtggaaggccctctgattctgtttccttacctattttaatagtaacttatatttgtgttccttcattaaatgtacaataaataataaatgtttgcttacggcatgcttgttaagtataaaacaaataatcaaaatgaatgtgtaatgaccctttggatagaccaagtagaagctgcttttaggacacatgattggaccatttctagatatctgcctaatttgtaaatgaaaaatatgtaagctacacaaggagcactgactcgtctaaaatcttaacgactgactgatttgggcttggggtttggggcttgggtccttcatgccctgatcagagctgtttatagcttgaagacttcctgggggtgagaacaagcaacctcttggtgcagtccaaagccaggaaatgggtgacgattttgaaaaaggactcatctgacctccagaaagcctttacaaccaacagtagaacgagatcactaagaaacagaaccaccgggaagccaagatgtggtacttggattcccatctcggagcacctcctatatcccgacacaccatttcccctagtgtctgatctctctttctcctcctttaattcagtctggagtcattttagatcagattcattcctgattggcttcactgctccaacttagtcatcacagaaccttagggttggaatccatgttacaagttaaactgagcaattcacccccacttttcctgacaacagtgttctcttgagagtctggttttattctgagtcttccagcccggtgtctgtgcccatgaaggactcatgccaaattacattctcaggaggactcccagaccaagagactctgggcttgggcgtgagagacttggggctgttctttttctttttttttttttgagaagaagtttcactcttattgcccaggctgacatggagtttcactcttattgcccaggctggagtgcaatggcacagtcatggctcactgcaacctccgcctcccgggttcaagtgatactcctgcctcagcctcccaagtagctgggattacaggcacacaccaccatgcctggctaatttttgtatttttagtagagaccagttttcaccatgttggccaggctggtcttgaactcctgacctcaggtgatcctcccgccttggtctcccaaagtgctgggattacaggtgtgagccactgtgcccggccgagaggagttgttttgagactcacctgccatcataggaaccatagcttaaattcttgtgaccttttcaggtgcatctcccaaaatatctcccctccaccaaattaatgatttatttcataaatttagttgcattctggatggtctcattcttaagatgagcttaaagcctttcagaccagtcacttccttgtttggggtggaggaggttttttcctggaataggacagtgtatggaagggttgagaatccacttctttagcggttaataatttactccgagtaaggaattctttgttaaagtggggcatgttcttcaagtgccagagaagagagaagggtgatttttctgacatcctccagcctgcttctccatatttggaaatgtttacccaccaggctgatctattggaagagagggaggtgactcagggtttaggagaagcaggatttgaattcttgtttccagaaacaaagtcgtccccccaccctgcccccacccttcccccttcattcctctgtcccttgttctggaagctgaggcgagaatgtctcagttctgttcccttcaggcttcgagaccaccgccttgctgtgtcccgtagtggactgagggcctgcaagagggagtgagggctagtggagggccagctgcctgtgggggctggacatcgtgtgagtacatcattactgccatttctgctcacagacctggggcttacagcctgtgggctggctcacttgcatggtgatgggacacgttgctgggagtgctggtcacttttatttgggggtgtggacagctgctttcccaggggagtacttcttacagtgggatttcaagacaagatcggcctgaagaaaaattatatttgtatattttttaaaaagtaggtatttcctctcatctgaggcctaacttgagttgggtagaaagacaatttgggagtgctgttgtctgatgattaaggctaaagcaacaagctggaagggatgtcgggatgtctgtggacatgtagggaggggtagttttagcttgaaaacagttatggtgggatttaagagtatgcaaaatgttgatgtgtagcatttgcacagcatccacggtctggaataccttgtgtgcaggtcactgtgtagatttgatgagttgtcagagttggaagagtcctgcagagttttcagcacatctgtctaatttcacagtgtgagataatgggcagcagagacccaggccctgaagacagatggctcattatgtgggattagaacccagatcttctctctcagttcgttctccttcccctagacttaagctgccccctctattgcgagatgaggaaattgggagatgttagaactgtccacacttactaatctagttggtgggaaattgaggactagaacctacttctagttcagacctcttcccgttaggatatatgggctcagatgcctagatttgttgtttttgtatgaggctcttttcttttctttttgttctttgatttttacttacctttcccttcttttgttcatgtgaatgtcgtatgaatgcaaccttctgctctcctttgctccctatatctttctctttcacgaaaggggatgatcacttgtccaaaaggcagaatgaatagtgtggaacttcctttctatccatggaagtgaaaattatgcaattttccctgagagaaattcagcaaggcttcccatctgagcctctaccactattcttgaagctgtaagaattctggaatattatgcccattcaaaggtgagtcctgattctgattagattttaaacacacacacacacacacacacacacacacacacacacacacacacactttttaagcctaccaaagcaggatagagacccagaagacaccgacctattacgtcacctcagatgtttcacagccatcaggagtaactctttgtagtcagctcagtttcagatcaacttttttttttttctttctttcttttttagacagagtcttgctctatcgcccaggctggctggagtgcaatggcgcgatctcggctcactgcaacctccgcctcctgggttcaagcgattctcctgcctcagcctcctgagtaactgggattacaggcatgcaccactaggcctggctaatttttgtatttttagtagagacagggtttcaccacgttggccaggctggtctcaaactcctgacctcaggtgatctgcctgccttggcctcccaaagtgctgggattacaggcatgagctgctgcacctggcctcggatcaacttgagggccttattttccagtgcagggaagatggtagaaatatgttttggggaagcattttattaccagtggcattaggtggcagatgtaatagagcagaggaagtgctctgagacctatgtttgttctggccagttttaaagagaggggaagcgactctctaatctgctttgaagcaagtgggaggagggaagttgcacaggactcccaggaacctgtacacaatctgtctccttctgtgaccagctgaggctgggtggtgactgtaagccctgttcatgagacaggaggagagagccttgaagaaggaaagcctggggtgtttttctgtggtgctgagggacagggacagtaagaggttggagtaaataataccagtatgaatactaatactctgaataaggacagctgacaagcattggttgcttaatgggtgccaagcacagggctaaacactttacctaaattattgtggcactatagctgcctttgagtaggaactattttttaaaatattatttttaattttggtgtaatacatataaaatttgccatcttgatggtttttaagagtacagttcaagcctgggcatggtggctcacgcctgtaatcccagcactttgagaggccgaggtgggcagatcacttgagcccaggaattcaagtccagcttggccaacgtgatgaatccccacctctactaaaaatacaaacattagctgggcctggttgcatgcacctgtggtcccagctactcagaaggtggggatgggaggattgcttgaatccagggagtggaggttgcagtgagccaagattgccccactgcactttaacctggatgacagatcgagaccctgtctcagaaaaagaaaaaaaaaaaagagtacagttcagcagtgttaaatacattcatattgctgtgtaatcagtctccaggcctctttcatcttgcaatctgaaactttgtacctataagcaacagctacccattttcctctcctccagcccctggcatcctccattctactttctttctctatgaatgtgactactctaggttctgtatctaagtggaatcataccgtatttgtctttttgtgactggcttatttcactaagcgtagtgtccttaaggttcatccatgttgtagcatgggtcagaatttctcctttttaagggtgaattatattctgtggtaatgaatataccacattttgtctatccatttaggtactattttttaacctccatgttatagaagaacagcaaccagagacttcaaagggttaattaagtaagtggcccaaagtcacatagtcagtagtggagactaattttacctaagaatggcatgtgatcaggagtaagcagatattggattctaattggcaagagtgtgacaaatcagggtgcttctcaactggatggtgacacctccttacaccttgctatggcatttcaataaagcaagtgttccaaagggctgtacgcagctatgcttcctttcttttgtattgggctctaggaagcccatagctaaatttaaagctcacctctagcaaatggtatgagacatccagctcttattttttgtatccctttctcctttctttgctttattttctcctctccttacccactttctcacttaaatcatgaactattagcatcttttgtcaggtacctcagatcatttctggaacaaggcagaatatatagatatgtggcatgatatctaatattttagtaattattaagtctgtggaatagtaggccaaaactggccatgatttttctgacttgactctgctcgtcttcttcttcttccttttttttttttttttttgatggagtctcactctcttgcctagactggagtgcagggcgtgatcttggctcactgcaacctctgcttcatgggttcaagccattctcctgcctcagcctcccgagtagctaggactacaggcacttgccactacaccccactaatttttgtatttttagtagagacggggtttcaccatgttgaccaggctggttttcaactcctgacctcaggtgatctgcctgcttcagcctcccaaagtgatgggattacaggcatgagccaccacaccccacctaactctgctcataatgcaatgtttcatctgggcaatgccctgcccctttctgagtctcacttttctcacctgaaagaggaggttactgttgatgacagtgaacatttaggctgtgctgagttttacactaagcatcctgtctctaactctcccaacactcccacaaggcaggtgctattatccccattttacttttgagaaaattaaggcctaaagaagtgagaaagcttgtccaaaccgctatagctcttgggcaaaggcattagtgaccaatgtgtatttgactccaaagcccaggatgttagccacagtgcagggctactatccttttatacaatctgtcaggcttcttccatccgtggcatgtattcatctaattttattaaatctttattgagtttccacttaggtgccttgcactgttctgggcattatcccagtactcgatttagagcaaagagtaagacacacacaacaacgatctcttggtgcttacacgctgctgcaggtgtgtgaaggaggcagataaaggaacacttaaacaagagggactgataagtaacccaagggaggagtcacaaagggcattctgactgtgagtgagtggggaaggactctgggaggttatgtttaagctgagatctgagtgacaaggaggccaccttgtagaagttgggggaagagcactgcaggcagtggagacggtcaatgcaaaggtcaaggctgtgaagtgggaaggagtttgtgtttgaggaacagaaggagactgatgtgctggcaggatgtgggctgcaggggaagaagcaggagaaaagaatagggtctagcaggtggtggtaagtgagagacctgagcttcttagacctgagtccagatgtgatgggttatgtgttacaggcatctttccagctgctgtggagggaacctgatagtaaaagggagtcaagggtagaagcaagaaggttaggctagacttttaccgtaattcaggtgtgatgtggtggtaactttgactagggcatagaagttgggcaggagaggtaagtttggggcatgtttgggagtgatcgtctataggatctcaagtgtgatttccttcagagaaatgctgagctaaatgggcaggaatctgggatactcagagggaaatgaaaataggtgccctagggggttgcccagataagcagctggcgttccaagaccaaagagtatctgtttctcacccctctcccatttagtttctaaccttgagctttgggccagtgcacagaggatggtggcttcctgcctttggcttcccagctgagagctgttggaacgccccaaaataagccctgcagaacgtgcagcttcctttgctctccctgggtatttttgtaaaacattctttcccaccaagaatgaggaacgttcagagtgatgctgactttatgggctgtatttaacatgttgttttttcatggtgttgtctgttcatgcagagatttctgtctcctgtaaactccctggtaaggaatcttcaatctccatgtgagatgggtctggaaggctcagtgggagcccagaagagctggggtttgaaagcctctccttgtcttgaggactggactgcggtccaagggcacctaccagccctcttttttcatttacatttgaattcacagttgctgccctttggcagttccctgtaattccttttaacaggctgggctttcctgcagatacttcatttttcaggtcttggagaagttaggtagtggctgaatcaggtagagaatccaaaattctgaccaagccccatcctctagccaccaggccaaagcaacttagcttgtgacctcatcctcctgtgtatcccctggcaatcttatactataatcagcctaagcccagagatgctcagaaatcatacactaagtcatctaaaactcatttctgaggctttctcatgcgcccctcttgcagtctgtagttaccaggttttcaaataattagcataatctcttaaaaacagtgttttgttattgctcattcaagtttcttctaaaatttcttttatattacctattcattgagttgacaaacatttattgagttcttactgtatgccaggcattgtgctaggtgctggggattgattcaaagataatttggaggcgtatggaaggggagtggataattacagcacagtgagataagtgctataatagggggatatataaagagccagaaatagcactatgaataacatctttgaacaaattgccttcttttttccttttggattattcccttatgtatattgcccaaagtgggattactgggtcatttaaaagatgaaaacaatttggcacaaaaagatgtaatgacttgcctggggaatacagctcaattttcaacagagaaagaaaaaattgttgacaaatccagatttagatcactttaccaggaagatggggcagtttttatactaccctttcaacatggtggcttttaggggcggggtgggggggatttattctaaacatgttagcctgcgtgtaggaatcacacgtcctcatatttaatctcacaacttgattgttctcacaagaacctagctgtatacatattaccgtttccattttacaaatgaagaaactgcacccttgataaaaggaagtaagttgctcaaaattccatagttaataagtgtagaatccaagggtcaagcacagttccttttattctttgactctatcctgttccccatgctgtgtttaccaattgagggtacctgtgctctagccggggcccggaatttaatatttaatgagtcacggaggctcttaagatgatggtcaggctctatgaaataggtgtagattttcttacctctgaagtcatagccagggaacaatgtctttctgtatattgacctgaaaggacccaagggcgcattattcctgaccctggctcaggtgctgaaaggctatttgcatagccctactgttagagcacagaatcccaagtaaagctgaaaccatgccacagttttgctgtgaaacatttattacttttctagtacttaacagtattaagtaaaaactcctgcccctggtatccaggacctgtcataaatggacaccaacatcggtccactgtgggtccatgtgggtccttgatgctcctgcttacatatctttaaatcaaacacatttcctaccaacccccagatatatcttgcactttctcaccttcatgccttagcacatgcctttcctttagcctgagataacctctccaatcttcattcatagaactcccaatcctcctgtaaacttctgcacagacgccatcttgggaagggaataatccttgatcaccacctgctctcccatccattagaagtgatctctgtgttctctgttctgctaactcaaccacagttagctgtgaggcaatagagtacaaatgtatgctgcatatgagcatgggatatggatttgaatcccggctgtgatacttcctcactgtcagttaacttgcttgagcctgagttttcccatctgccagatgggtgtgatacaataggtgctccccctgaaacccaccatgttgacaggagtagtataaaaatggtctgattctcccggtgaggtcacgtaaatctggaatcgtcaacaattttcctttcctttgttgtcatgacttttttttatgacatcacctcatgtcaccgtgtggtatgaaaatttgcattgttacctgtgcttcttctgtggcacttgtcctcccttacttgatgtcttatctctccttctagactgggagctcttcaagggcagggagggcattgcatctttgaaggccttgacatatggatactgctacaaagtttcctttaagggaaaggaggattccatacaacctaagtggtgacatcagcacaggctcattactaatctcatgtcacgaggtttcaggcctggctgagaactctgtgagctctgtgatgttgagcttcaggcacatagagtacaagctgggtaggcctctggctcctgcttaagagacagcagaaaggctggatggagcctgtctccagaccagcttcttctgattcaaggagttgggtgggactggcagttcactgaaggcagagtggtagtcctgcttggaacgtgaaactttgtttctttcctgggccttccagtgggtctgttatgttggtgagagtttcagacctagaggaaagggtcactgaaggtatgggttaagagcaactctgaaagccacctgccccccgacttctctgtgagtggggccacagggagaagatcccttcataggtagctcccctacccttgctatgcttggaaactgaccatggaaagggattcatttcttaaagggatagggctaccatttaactttctattgtgtcacttcccgaaacgcaacacctatggcttaagatccaagtgctttagaacatgagatacaaggtcttccaggctctggctgccacatccctttccaggcgtgtgtcccaccacattcctctgcatcctctgtcactggcctcaccagattagtcactttctctgagaacaccctgaactcatccttctcaaggcctttgcacattgtgttccctgagcctatttttctcctcctcatccgtggaaatcctcttgggtgttcaggcatcgtttagaagtcacatcatctgcagagaacttttagaccctcaaaaggacgttgcatgtactcgtgcttttctacacttttcattctgtcttttgtgttccagtgtgtcccccattgaggctcttcgacacccctaggcatgtccaactcagcacctacacctgctaggtccacacactgtgttatccaagacagaaggtgttagcaaacctctctttggtgcgcccctgaatgcagaacatgtgacattctgttaactaacagttgtgccagagtggtttccatagcccatactggggttcccatgatttgtttgatcatgagcccggccattcgaattgtttttgaattggtctgatatcagctagttaattgttaacccttttcaggtttgtttcccacataccagtagatgtctgcttagtgccagggttctgagctttttatttcacttaagaatataatagcaaggtagaattcaggaaagatttacttgctgttaatgtgaacttttaaaaaaatagtttgaaatgtaggctttgtttttatcccaaagctccatgaaatatgaaaatagcaggagttttaaaggtatatttccacctctagaggaagaactgtccatattatagttgtaattataaattaataaagcctgtgtcatgaaacttgattttgaacgcctgtgttcaaatcctggctttaccacttactagcctagagatattggatgagtgtctaacttctccgttcctcagtttcttcagtgttcaattgggaaatttttcttatggttgatggaaagtttaaataaggtcttggatatgaaactgggattttattagtgtgtgtgtttcaaaatgtggatttggaggccatttaaaaatagcatttccaaaaagtttgcttttaaagcaaagtacttagatatataaatttttatgaattttttttcaaatgataaaataaatgagtttacagtcaggagacatacagtatctaacaaacttagggaatatgcttggcttacaagacgtggttttagtccacataaattagaatcacagaactataggctttgagaaattataaaagccttggaaggggtgaacgtgaattagtgcatattgtgtgcaggctttgtgccatacgtgctagatatgggatcccaggaaatggttgcatacaccttgttgggtagatgatattaaccctgttttgcagacagagaaacctgagctttgagaaaatcctttacacaagtccaatatcaaagtctggaacttcaaactgcactcctgatggcttctagaaatcctttccatttacagatatgacaagacttgctttcacattgttgattttttttttatcctctctttctctgtctctgggggcagcactaattcagggccagatagaactgtgaaaatctgcagtgttgatgtcacataacttgtttaatgaatctagattagtgtcttgacttttcctgccaagaatctgctcataaagtgtcttgttttgagctcctttaactgtactcattcatcagcctttacttattttcttctcttttggagagatacttgccattgcccataatgtttgaggtcaggagtatatttgaagagggctttatattttcttaaaaaaaatacaggtggaaaatcaagtttatcagctatttcataccatcttcttctgccatttatgggcaacatgtggaagaggtggcagggagctgggagtttggaataatgtgtctcatcttgaatttgtcgctgaccagggaaaatactcaaggccaactccatcattcccttttgggaattcggtgcttcagctgtaaagagtgagggcactactaggtgattcctaagatttaaaattctgcatgttttgtggtgtcaaaaccatcaatttctggtgagctgcgtgatcctgcagctgtttctctgatacttttcaatctttagatttaatctattcaacaatgtataattttttaaagggaagcttttatagatacttctgaactataaccgggtgggggggataaatggatgttaaaaaatagaaaacaaccaattaaatagtatatagcatgtaattctccttggaaacttaccacgaaattgagaagcactttaacaactggtaatttaaattgcgtttgaactctgctaatggtttgtttgcatgggaacttcaatcatttcacagtggttctttagcaaagctgcttgttctctttatggaaaataagaaaaaattattaaaagagaagttggctatggaaaatggagaccactttcatttgtgcctggagggaagctggagagtgtgagtgagactccctcagggccaagggtggagagctcttcctttcagtgaagtttaaaaatctgggaagtcagatgccctttgctgctgttgtagaaactgttgtgatttgtatctctctctgcaaggagaagctttggttttatgcagcttgcgggtgagggtagggacaacctttttcgtttgttttatgaaattgcattgttcacaggtctaatgttggcttcctaacaacccatttctcagtaagtttgaaattatgcctctctctcctttcagtggaaatggctttcagaattccaatgtccttgaagaccactaggtctcaggaaactccttgcttttctgggctgatagtgattatactccattttgcctacttaatttctgtctgctgttgaggttactgggagagcgttgaaataggtgttcgaggcctggatttgtaagtcctggtttggctctaggtgtgactcatgtgaccaagcacaagtccctctgcccagtgtgttttgttgtcctttgtcaaagcaagcagtcacttgatccagtggatcaagtggctcctgaagaggtcacctccttacccaggccaccgggttctcttgtcagttggaaaagttgaggtgggtcatttaaaaaatccctcccaactttgaacttggaattgttttgtacacaaaacaattgtatgattggctaggtaatgtttacagtgacaacaatgaaatgggcatggtagtttctcgtatgtggatttctcctgcatacatgaaagacaagttttataacagcccttgccttgggatacttgtctgttggcatacatactgtgtaatcattagcaaaacaataatagttgctaatgaaataaaacctgtaataagggctgtattaggctattctagcattgccataaagaaatagctgaggctcggtaatctataagaaagaaggtgtaattgggtcatggttctgcagtctgtataagcatggcactggcatctgcttggcttctgggaagacctcagggagcttttactcatggctgaaggcaaaggaggagcaggtgtctcagatggcaaaagcaggagcaagagagggagtaggcagaggagttgccacacacttttaaatgaccagatatcatgagaacacactcgtgatcgtgaggacagcaccaagaggatggtgctaaaccattcatgagaaatccgcccccatcatccaatcacctctgcaggccccacctccaacagcaggtattacaactcaacatgaaattcagaggggacacatatccaaatgatatcaaggacggcttactgggaaatgtcaagattgtttatccctctgctgctcactgattctcacttttcaggcaaggaaactaaagttcaaagaacattaggtcctatagttagaaatttgtctccaaactcatattccttttctttttttatttggtatagtttaggtttatctgttaatttttttcttccctacaatttgagtatctaactgacttgcctctttcacctccattattaagatgaagctgttttcccaggagaactaggagagctgagatatgaacactgaggcatcagcattctctttccccatcattctgagtcaaattagtgaaataagagtgccaggatctgactaggagtttaggaggtatagaagtaaaccacggcccagtcagagactttataagcctgggaatttctgaagctggttaagaccctagagatacataagcaacacccttctgtttttcataggtgggaactttgaggctcagagacagagcagaagacagaacctggtcttctgattccctgtgttctgcttttttcattgttccactggacgctcatcagagggaagatctttttcctcaattggtgagtcccgcacacaaaaagaacacatttgccttttaaaatcaatgtatatgttttaatgagttttaaacatcagtgttttccacttaaagtatgggcatcagtaactaggatgcattaagaataagagaagaactgaaatgcccttccttctttcttgagttgcttttatggcaatagacaatatataaccatgctaataaaatgtgtggcaaagcaaaggcagagctcagctcttggaaggtggtagcattgaacttggaggaaaatttggagtaacgatgatttcaggttgccagcaattgtattgcctccttctttctcatttggcatggaagaaagtgttcatgaaatggaaagaccaaaatgaaaatgtcactgaacagtgtttgggcatttacaaggaaagaaagcagtattattgagtgtctcttgtttgcccttgtgcaaagtgctgcttcttttgtgatctcatttcattttatgtatttatttttttgagatggagtcttgctctgttgcccattctggggtgcagtggtgccatcttggctcactgcaacctccacctcccaggttcaagcgattctcctgcctcagcctcccgagcagctgggactacaggcacataccaccatgcctggctaatttttgtattttcagtagagatggggtttcaccatgatggccaggctggtcttgaactcctgacctcaggtaatccacccgcctcagcctcccaaattgctgggattataggtgtgagccactgcgcccagcctcattttatttctataacaaccctttggggcagagcaggctaaatttgcttaggcaaagggtgtgagcctttgttttaaagggcctgccagagctccaccaggatgtgaggtgcaaatcctgttatgtgctcagaaaggagaattgtgaccaggtaaggtaaactttcccttgtgttttggtgtacctctgtacttaatgggtagagtagaacattatgttctaaaaaatcggggtggtaaaaagaatcaacagtgtggaataccctgggctctaaggaaagctgaggaaattagtaagggaattctgggtgcgacttccacttaggatcctgattcgatggtccccattggctgaggccaattcatatatgcccccagcattggctttgtactgagtaattaatacaccttgacatatttgtggtgtagttttccaaaacagagatgatgccattgtgattgaaaaaaaactaacttcatttaaaagtgtgactgagtttatagatgtgttttgtctctctgtcttttcttaatcagtgtatcttaaaagtacaactgactgtgtgcctattgatctatattacataaaaggctggaaaccactggtttgatgcttaaaccttagtgtctgttaaaatttcaaacatgatctggaatatattccccctagcatacgtttaagtatcaaatgaaaaatctttgtcacctcctctatgtcttgagttttttcagtgtttataattaaactgtgataagtatgaagctttgcacttggacttaaaaaaatcaagtgtgtaatgatagaaagggagagatttccttaacaagagcagactggaagagacttttatttatttattttatttttattttttatttatttattattatttatactttaagttttagggtacctgtgcacaatgtgcaggttagttacatatgtatacatgtgccatgctggtgtgctgcacccactaactcgtcatctagcattaggtatatctcctaatgctatccctcccccctccccccaccccacaacagtccccaaagtgtgatgttccccttcctgtgtccatgtgttctcattgttcagttcccacctatgagcagactggaagagtcttagaagtttttgttgttcataagctaaatatgagccaacagtggcttttgttgggagtggcttccgaaatgctgatgcagccttcacctgcgtttaatagagtatggcatctagaacaaagtgagtgggtgattctgcaaacctagaacacctggaaactggcaagtgcagaggtcatgtgagcctcaggcacagtttgaacaggactctagctctgtttttctgcagcacttcttgctctgcccttttttgtgcctgggcttcatccttggaatgttttacctcatgggccatgagacggctgcctgctgaaacccaaactatagatatccctgttcccatttaggggaaagagcctggtttgctatattctcataggcttggctgactgtatatttctgaaccagtcattgaagccaagagaatgggattatggtaatatgaaccactattctcctgaaactgaatttggacatagtcccatccaaacctcatggtacttacacagtggagaagaggtggccccgcaaaggaatatctgggtgctgttaggagagggagagaggactggaagctccgtgggcaaccacaggccttctgcagacctctttagcccccctgtcagagaccctctagagagccgggctttagttcctgcctcaccttctgaaaaggcatcagccagctgcactgtctacacgaggatgctgagaggaccaggaatgatggccaaccaagaagtgttacgggaatgagaccatggattctgctgcaagattctgggacacacgtgctcatggccatcaagaacatagaacctgggcaggacagggacagcattgcttgttcatgtgtgtgtctccagagtctgctggggtctctggcatgggataggtgctgcatgaattttcatggatagaataaatctgaaggaagtgagggtccctttcccaaagggtgttctatcgggcattggctgactctctgttagggagtataggaattgtagcacagatgaagccagactacgtgatttaatgagaatgaaacaaatgactggacaagctgggcatcgtggctcacatctgtaatccctgtgctttgggaggccatggcaggaagatcgattgaggccaggattttgagaccagcctgggcaatgtggcaagaccctgtctctacaactaaacaaacaaaatcccaaatgactggacagaaagaggcttttgacttaagaagtttgtgagggcataaaaaggcagtgagtatggtgggatgccctaacagaagtcctgacaagtatgagatgtgcaaccctagaaaaacaacatcccttcacccttatttttttgatctgagaattaggaacaataatcattgccctgcctacctctcatgtttgcttagagcaagtgcattgttaaatgccaacctgttttgtaaactataaagtgtggttcctgtatgatacattattacagttgtcttcttccttaaagactcatcttgaatataaagaaaaagacaatgtaagttcagtgcacagcatcgggaacattagacatgctcagcgtatgcccttcctgccaacattgtacctcttcctcctccgggttggatgggcactaactcgtcctcagtcctgcagctagatctgcaactttgcttaatgatgcaggttaaaattgaaatagaattatgtattattatttttcacattcatttttgcctgagacaggaggtggagggtggtaaattaagaaacccgggaagctcagtgcttgagagaacccatagaagctacagtctagcccatttggcttcttactttgttagattagataatcatacctgctgctccaggcgtgactagcccagtgggagtcaggaaggaaattatttccctctgttgataccggtttacaattgccgactgtcgccaagggctttcagttttaatatttcctctttggtcctcagaagtatcaggtattagtctctgccggaagcaaagcattggtcacttccgtcagaggtgaatgtcttggctgtctataattcctcagtcaggtgctttctgggcatgtgtgagcatttgctcagctagcttttattgcttgtatgttatttgcttcaaaaattacaagaggatttgtcgggtctgagcagtgacctatccagtcccctgaaactctatggttcttcgtgtaacccagggatgtcttgtaggaggtatgtttgctgtccacgaaagtaaaaagtagtgatatctctttctctcttttgcttccttcctcctaattccacattctcctatttcttggcttctggcacagtggagatacctctactctacattaggcatggccttaggggatccgaattctcaggtcttcctcaatgagttgctgtgtggtagacagcatctgaagtttgaatgggtagagagacctttgtagattgtggccaaatatttacacctggttcatagagtatgtgtttgctgccctgatctcagtgttggtctgggtgttagtgaacctcatgatctttaggaaactatgtgaattaggcttagtccctgaccctgagaagcttatagttagggaaaaagacaaacatataaaggagaaatacacattagaaacatattcttttttttttttgagatggagtctcattccgttgccaggccagagtgcggtggtgcgatcttggctcactgcaacctccgcctccaggattcaagagattctcttgcctcagctgcccgagtagctgggactacaggtgcgtgccgccacgcccagctaatttttgtatttttagtagagacggggtttcaccacattggccagaatggtcttgatctcctgacctcatgatccatccaccttggccctccaaagtgctgggattacaagaaacatattatttatggtacacatttattaatcaccagatatgtttcaggccttacgctgagtgcttgggaaattgagataaattatagtctcagatctcatggggcgtggatgaagagttgggagaaagaaaaaaataggccaggcgtagtggcttatacctgtaatcccagcactttgggaggctgaggcaggcagatcacctgaggtcgggagttcaagaccagactgaccaaaatggagaagcctcatctctactagaaatacaaaattagccgggcatgcctctaatcccagctactcgggaggctgaggcaggagaattgcttgaacccaggaggcggaggttgcggtgagccgagatcgcaccattgcactccagcctgggcaacaacagcaaaactctgtctcaaaaaaaaaaaaaaagaaaaaaagcattgattaatattatctcacagtttctgaaatttgggagcagcgtggatgggtgccacaagatctctcaccacatcgcagtccaggtgttgctggacctgcagtctcaccggaaggctgaactccggggaagatctacttgctaccaagcacatcgcatgatggttggcaggatttgtttccccacagattattggactgaggacttcagtttcttgccgtgtagggctctctatagggcagctcacatggcagctgccttccctcaaaatgagtgagcaagagagagtccctgagaggcaaatcacagtctttttataagttaatcctggaggtgacacactgttccctctgcctcattctctttacgagaagcgagtcactaggtccaggccacactgaaggggaggggtgaatatgagcacaaggttattaataccaggaggtggagttacacggaaccatcttaggggctgcttaccacagattccccaggtttacatggatgtgctaaggtggaagtggacgttgcctgaagcagttgaataaacccagcacacctctgtggatcaattttacttgaagacatttttgggggaaaactccatttaaaactcttaagagaagcactggtacataatagcacaggatgtaaagttggcatggcttttaagaagaaaaacacaagttttcaattcatgccgtgttcccttacctctgtatttttgccctcctcagcggtagagcttttttggtagaaatgtcgaaaggttcttgcttgagccccttgctgtatgcgtgagacaccgagacttggaaagggcacatactcttccagggccacagagccagcggtagtcaagggaggaaccatctgcagctcctctctgtgccccgccttccaccgctccacacagtctctgctgcataatgagtctgtgcaacttttaggatgttttctcttcttttctcaaactctctcctgtcccagaaacagattaggaaaaataggtcaaaaattggaatcttgagctttgattttgtccctttagttaaatttcaggggtctgcgtctcctggtgggccatgttgtgtcctgaaaagttgcataaatcaatattacacggctcagacagtgtatctctgcagttatgaataacatttgttttaggaacagagagctgatatacaacgttactttgagactgacaagaccagacataaaacctcagccaataccctctgtctggcagggagtttcttttccagagcatccttctcttcccccgaccaaagcagtccttttcaaaatcaagctccgcagtttattttatagaagatgacaggttcccttagagtccacattcacataactagaaaaattaatggaaattggagccttaaaattatggtcaagcttattagtgactttacagccaaaatgaggaacgcacagctttggtcactgagaatgtggctggccagaacgtgaattctactacctgctccatagtccctttcaactctcagcaattttttttaatactcatcttattcttttttttttgagatggagtctcactgttgcccaggatggagtgcaatggtacagctcactgcagcctctgcctccaaggttcaagcgattctcctgccttagcctcccaagtggctgggattacagatgcatgccatcacacccggctatttttttttttttttttttttttgtatttttagtagaggaggtttcaccatgttggttaggctggtcttgaactcttgacctcaagtgatccaccctccttggcctccaaaagtgctgggattacaggtgtgagctgccatgcctggctaactctgcttgttattaaagtgtttcttaccaattatttcatttttattaaaagtacatagtaggaaatagagttttagttggacaaggacaacatggtaaagaggaatttggagtaggaagactgtcacattagtcactgaatcctacctagttcacttagttttttttagcctgttttcacttctgcaagccatggagtgaagagtgcctacttcagagtctttggtgctctcaaagcagcgtaatgtctataaagtacctattgagtgtggtacttcttatgtagttggcacacattaaatgttaagtttctgatcaccttaagagtccataactctttgctggagatcacccttagttcttttctttgttaggccattatctcatgtcctgtttacactgtccccttggattggcctagacctgcagcgtttgtgtattggtcaccccagatttcatgtttcctgaataattaatagcctcaacatttctaattttgcataatgactcccaaggcctaactacaaacatcataatgtgctcatgttttctgatacctggaaatatagtggctctaggaacaaaacctttatccactgtgtttcatggggaaggcttattgggcatcactactggaaagtaagtgttgattttaatggcaagactagtccaggggtgaattctactcaggtgccattagcaacctcttcatctgtaaatggaagtgtctctgggacctgctcagctctgacctgctttgggtcctttttggacttcttcaggatgagatcacctcaccgtggttcaatgccaactggtttgagttatatcagttattaaaaatgatctaatgttttccttttaaatctgaggccctggctcattctatgattaagccagtgatttatttataatatagtgtgagatggctgcagccactctatgatgtaatctaagaatgacatgaaaacaaaataggtttttacataatgaaagtattcctgtaatacagtttatagcaaggctttttccccccattgagaatggagatatattctttacttttccttctactcctgtttaaatcttcttttaccatttattacacttaaggcctttaagtcaatttttaaaaatcagcatttacaactccacaaagtctctggttactcttttaatcttgtcattttcttcgctcccaatccccactgccaccctccatggcctctgtgtgtagccgctgctcaccccctgctcagcactccagagtcctcaccattcctctgcttatgctgtttcttctgctggaatgctcaccccaatcctaacttttcttctgctaaaggcatacttcactggttcccacaaatagcatccttctgtagcctgctcaaatgcacatcttcctttaagcctcctgtgttgctccttccccttgttagaaacccgttatctgtactcttatggaacttagtgtaatagcaaacccccacccctgctccaagggctattcacagactgtcagagttagggaggagaaatgacttagaggaatggggtaaggggttttgatagttcccggtctgctcctaatagtgagacccgggcagtcagtcatggctcatctttgtggttcagtttttctcagctgaggaatgagtggtttggattttatttcacatggccaaatgatgtgttggtagtggttccttgaggtgctgtgctgagaaggactctgaggctgcatcctgactcagctaatgatcacttaggaatatcgccatgggagtggagagtgaaagcatacgagaggtatctgagctgcttttggactaggtgatttaaatgtctctttttgttctaccttctggatgctttgatttactgacttgtgaagtgtcttgcccaagatcacgtagcccattaagttttagaagctgattctctgacacagagatggttaaaagctacacatttgactctcacattcatacacgtaggctggctgtgggagatgaaaagctagaataagaagttctagaagatccatgacttattgaaaacacaagactactcaaactctgtatgtctttgagggtgagtgaggtcacttttcacctctttgtcttctttgcttcctaggagttannnnnnnnnnnnnnnnnnnnnnnnnnnnnnnnnnnnnnnnnnnnnnnnnnnnnnnnnnnnnnnnnnnnnnnnnnnnnnnnnnccccactattcaaatttatgtcaaagttggcagttcaaggtcaaggtcagaaaggcaggtgatcctgccagggtcttaattggatcagccttaccccatgaatccattagatctcctgttccccttcttccaactccagacaaaatgcttagctctctgcaaaaagcccaattgcatgagcagtaggtcagctcagcaaccaggtgattgaacactgggacaagaataaaggaaggaaaggaagagggcattttaggatggctgaaggtgctggaaacttgaaccctagaggaatgaagaaggaactggaagtgcttagtgtaaagaagaaataaaggggcaggaggaggagagagcagagcaggtggtgctgtcctgggtctctgctgtggaacgggtgcaaactcactttttgggacctctggaagagttctggcagcagtgggttggaagcaagagatagatagtgtgagaatgttgatgttttctcaatgtttatggaaaatgcttaatgttttaatattaagagcaaaccacagatggaatgtgtgtttcaggaggtcgaagttcacaatcactgcagatgtctaggtggggttgatgcagttaggtattttctattttaggtattttgtggtggggataaaatgttatacatgatgacttttaaggtcctccctgtcttaagagtctagagtttttttagacatgtttttgtgtacatttaaataatttccattttaaaatgaaggctctttggagtaaagtgattgttcctttctccataatcttggcacatgtaagtgctgacttaccttgggcaatctcttctccacttagcattattgaaggaaaggagactaactgaggatgtcttagaattttttgtactgaatgtatttttgaagatgatttgtacgtttcttttcagggtagttccagggaagtctcttctttaggcctcctccaaccaccatcccctattgtcaatgattggctgtttttgtactaccagaatgctttgtgtatacatccaataaagcattcatgccacttcagtctgctgtataagcctgttttcacaatctttcttctcctctagattgtagaagctccttgagggcatgaattatgtctttttccataggaagtcccatgtcatctagtataatagtttgcaaatagtaataatgatgactcattaactcgagcgtttactgaacacctactatttgctagacactattccaggtgatgggactagaacaaatgttaaaaaaaagacagaaaaattaatgagtaaatatgtaatatttacattgtgatctattaggttggtgcaaaagtaattgtgatttctgccattacttttaatggcaaaagccgcaattacatttacaccaacctaaatatattaagaagaaaaataattgaggttaaaggcatgaagagtagggaggacacaaatgtaaattcactggcctgagaaggtcttgatggtaagagtatatgtgaatggagacctgaatgaaacgaggtagcaagccagagatgtgtgggtgggatggactggaggaagagtgtgtagaactgactgaaagcaaatgcaaataacctgacctgaagcatgctggggacatgccggaaaagtgaagaggacagtgtggctagagtgaagtgtgtaaaagtggtcatgcatgccaaataaaaatagttgcaacaaccagtaagacatacatgagagatattgtgggttcagttgcagaccaccaccgcaataaaacaaatattgcagtgaagcgagtcacacaaaattcttggttcccagtgcatatgaaatttatgtttacactatactgtagtctcttaagtgtgaaatagcattatgtctaaaaatacagtatacctaccttaattaaaacttttattgctaaaatatgctagcaattatctgaactttcagtgagtcctgcttttgctgatggagggtcttgccatgatgctaatgactactgactgatcagagtggtggttggtgaaagttggggtggctgtggcaatttctgaaagtgagacaacaataaagtttgccacattgattgactctgcagagaaagagtgatatcaagctgtatcacttctctgtagcatgtgataatgcataatatcattttaccttcaagaaaacttctttcaaaattggagtcaggcctctcaaactttggatctgctttatccattaagtttatgaaatatttgatatacttttttttttgttgtcattcaacgatgctcacagcatcttcaccaggggtaatttccatctcaggaaaccattttctctgttcatccataagaagcccctccttatccattcaagtttaaacaaaggattacagcaacacagttgcatcttcattccacttctaattctagttctcttgctattttcaccacatcctcagttatttcctccactggtcttgaaccactcaaagtcacccatgaggattggaataaatttcttccaatctcctgttaatgctgatattttgaccttctcttatgaatcacaaatgttcttaatggcatctagaatggtgaatcctttttagaaagttttcaatttactttgtccgcattcatctgaggaatcattatctatggcagctagagccatatgaaatgtatttttttaaataatcagacttgaaagttgaaattactccttgatccatgggctgcagaatggatgttgtgttagcagacaagaaaacaacattaatctctttgtatatctccatcagagatcttgtgtgaccaggtatgagaagaaatattttgaaaggaatcttttttttttccctcttttctgagcagtaggtaacagtgggcttaaaatattctgtaaaccatgctggaaacagagtgctttcatccaggctttgtcattccatttatagagcacaggcagagtagattcagcataattcttaaggaccctaagattttcagaatggtaaatgagcatttgcttcaacttaaagtcaccagccacattagcctctaacaagagagttaccctgtcctttgaagctttgaagccaggtattgatttcttttctctacttctgaaagtcctggatggcatcttctttcaatataagcctgtttcatctacaatgaaaatctgttgtttagtatttaccttcgtcagtgatcttagcttgatcttctggataacttgctgcagcttctccatcagcacttactgcttttccttgcacttttatgttatggagacctagtttttccttaaacctcaggaaccaatctctgctagcttcagatttttcttctgtagtttcctcacttctttttgccttcatagaattgaacagagttagggccttgctctggattaggctttgacttaaagggaattttgtggctggtttgatcttctatccagatcactccaactttcttcatctcagcaataaggttgtttcactttcttatcattcatgtgttcactggaatagcacttttaatttcctttatgaacttttttttttttggtatgcacatcttggctgtttggcacaagaggcctagcttttggcctctcttggcttttgacatgccttcctcactaaacttaaccatttctagcttttgattaaagtgagagatgtgctactcttcctttcacttgaacacttcgaaaccattgtagggttattaattggcctaatttcagtattagtgtgggagatgggagggtccaaggagagacgtgggaatggctggtcagtggagcagtcagaacacacctatttattgatcaagtttgccatctcatatggccatgatttgtgataccccaaaataattatgatagtcacatcgaatatcactgatcacagatcaccataatacatataataataatgaaaaagtttgaaacattgtgatagttaccaaaaggtgacacagagccatgaaatgagcacatgctgttggaaaaattgtacctaaagacttgcttgatacacagctgcctccacaaatcttctatttgtaaaaaacacagtatttgccaactacaataaagtgaagtgcaataaaacaagatatgcctttattagttaagtacacattgaagatgctcaggaaaaaataaattgcttttgtgattcaaagaatccacataaatctaacaaaagaatgacaaaacatatttctgtttttcagctctaagagatgggggcactggatcaggagcaggatggtagtggtgtgcagctttgaacaagtccagttgccgtggggtttccctccatggcagagggctctccactccgtttctctgcccctgcggcaggcacacctgcagggatgcctgggccctgggtgcagatgggcaatcgtaagcctaatcacccattcaggcacacacttacttgttttccacatgcaaatatggcctttttgcggatgaatttaatacagttgttgcttcctcattttatttaaaacaaaacaaatggccaaccatgtcagttgagggtagcaaatagaaacatgagtattatggtctttgctgtttgtgtcgattacacggctgaaaggaatcccaggcaaatcagtcttttctgtgctcaattttatttttactttatatcaccttttcttactatcgctattggttttaacaaaatttttaaagagggctatcacattcctttctcttaatcattttatcaatatttcaggctccttagttctattttgtggtttctacctttgacatttttagtttctgaacttggggcccattgttcaaagaaaggcattatggagtctccaaaagccattggcaggtggtgtctgtgacttccttagcctggaaataaacaaataaacaagcacaaattagaagtctttgccctattactgcactattagtattgattgcgcaacatcatgcaaaaagtcactttaatttatctggcaggtcctatgtaaacaccaatacagtcaagagggcttggatgggtatttgctttcatttctaatgaaatttcaggcctctagggtaggatatcaaaattggtagatcatttgcaatttattttatcccaaacacctcactttacagtcagagaaactgaggcccagagaagtaaaatgagttgctcaaggtctcagagagcaagaaatagagatgggacttgagcacctagatctctggtattgctgtcctgtagttcatggagctggcagatggatacatctgtgacctgggatgatggagagactgctggacccttcagaggatctcatctcaaggtggggtttatgtgtaaatgatatctgtgtgtttcattttcctttcataaactaatttaaaaatccttttggtatcaaattttaagccaaaaagtagtgagggggaacatgggtaggaatagcttacagcttgcctaacaaggttgttgactgcataagagtcaggagttttgggtaagagtgtgtgtgtgtgtgtgtgtgtgtgtgtgtgtgtgagagagagacagagagagaaagaggtaaagaggaacaaatgaagagggagaggtcagattgtttgacagtagcaacttcataggcacagaatttctgagttggaaggaagtcttatacgtactgaatttgactgctttattttgtagggaaggaaactgatgtgcctagagtagttgagagctttattcaaactcattccactgttattgagtagttaggatattagaccagcaacatatttgggtagaaactttcatataaaaaagcgtaatcataactatccaatcatgtcaactagtaaggctgctcaggtgggataacacatcaaccttctttgggattcttccctcagacatggttttggtgggaggagcatggcaagggaggggcgagctccaaatgcagggctgctctgtcctcggcgacctgagcagacacacgagcagagatcagagacactcttagtgaatgaacctccctattggctatattaaagtaatgctctgaaaaagttccgtgtggagagcaaggccagttagggaacattttgtggatcttttatatgtccttaactatatgattcttttatttttaaatgaaaaatgttaagatgttacggggtatgtatgcatagtctaaagtgatgattttagaggtagcaagacagtgagaatgtccctacatgtgaaatgggcacagttttatcagggaagtgtcaatagagggttaatgttccacgtagtggctgcaagaatgataagtggtcatggggatagcctgacactctaggagcagaaggtggtgggtatggatagaactactgatatagcatgaatccaacctgctgttatctgcgcaggcctctctgcagctgtttgccctgaagtacatgctgtacgtttctccagctgatcctgcatgactgggtataaacgcctgtccgctgtgtgctggacagccccagacaccctcggcagcctgctgtgtttgtgtgagacatgctgtgttagggatttaagcatctccctactcgttcctcatctttttctcttctcttccttctaatctcctttcatctttccctttgggggagaaaaagtcatcagagttgtttgaaggttcatttatgttgatttgtttttattttgaagctaatttgtttcctgcttgtatctgtaactgatgtacttcatgtgagaccgtgttataatatacttgagttctccttggccctctgatttcttttctttttttcttttactgaaaaataaaagatttccttctctcttcagacctacagctttctcatctacatggacaacctatttttaaagaatcttcagagagtcgttgactttgttataactactactatatacgtaatttcagatgatagaattgaaaatttaacttgtttttctagaaagagtttattttccctataacttcaaagagtaatggtggggagtaggacattctgaaaataagaagaaacatgtcaaatgaatttctgacttccagctaggcatatggaataaaggtctttattccagtgacctctgctcattggaaaactttgggctggtagatttcatgattctgacgctgtatgtcctcttgagttacagtgagtgatgaggccaaatcgcagggtggatgatgtgctttttttgggctaataggtgttaaggaggcatgctgtcctttggcgttaagacagatcatttcctcagttgggtaatgtttaaggaatccactaaatccttaaatatatggcacacataaggaatgcagagcttttagacactcagccttaacatgggttattttttagcatggctaatggctaaacttgatttctactgggtttgttcaacctatttctaacttataggtaaaagcctgctttttatcctctccatcctcatcacctttttagttgtgtctctgcttgattcttcttgcattcaggtctatattgtattataaaaagaaagagagagacagagagagagagagagaaggaaaagaagaaggaaaaaaaaaccacacacattgaatgggaaggcaggagagtagagctctgaccccagctctgtcatagccacctgtgtgactatttgcaagcattttcatccattcaacaaatacacaccaggtaccggagatacaaaactgtgaaagacacggttcttaccctcaccacttacagtcaggagtagagagttaggtacacaaatagaatgtgaaatcacttctcctttctgggtcttcattttacaaatgcaagagccagaactgggccaggtgatcatcaaggtcccttctgaggctaacatgccatcattcatgcaaaattcattaaacatctgataatcacttacctaagtgaaaattagcaaacatttcccctttctccttagtttgtaggggatgatattgaagacgaatgaggcgatgtctacaaaatgctttaataagcaagttggagaaagagattatgtaagtttgaggcattatgattaatgaaaaatgaaaacaagggctgatgttttcagagagagaacagatggttcctttgttcagaatttgagtataaaaaagagaggaagaaaagatacttgctatattgtttaggccctgaatgtgagtaactttaaaatgccaaaacaatctggttaggaaagtcccatagattcaaaatagctcttacagtgatcaaactataattaatataacaaaaaaaagacagaaaaatactaataagaaatgccacagtgacagctgacacaacctgacaaaaactcctatttttacaacaactctagaaacttgattttttctgttctcaggagttataccacactgtaaaacaaactagtgagaaccgatttaaaactgtttctaccgttccccctacccctcaggttattttagtttcccatgactcataaaggaaatcttcaggattcacaagaaattggcaattcttttccatctttgctgttgagtattgataggaaaacagcatagtttggggcaatttaagtagagaacaaacctccgggggcttggggtggtgtctcagaaggccggatctgggaagggcctttgaaaagcttgcacggaaagctgcgaaataaatcgtttctttttctctttctttacgttctaaaatctcgtgatctgtttctacaatacacaggctaattgatgttatccttttggcatgattcttgctgtcctggggtctatcacttgcaggctatgagaatgaggccatagaccaccacactggcagcactgagcaaaaggtgctagacccttctgagttcaggtgctgtgtaactggtgctgtgattggacagggtgactaacctcagtctctctgggtgtaatttcttcactgtggaaagaggaggctaactagaaagttcactctgacactaatctgagttcaggtccacatctttttttttaattaattattttatttttaaaatttttatttttttgagacagagtctcgctctgtcgcgcaggctggagagtagaggcacaatctctgctcaccacaacctccacttcccgggttcaagcgattctcctgcctcagcctcctgagtagcttacaggtgcccgtcaccacgcccggctaatttttgtatttttagtagaggtggggtttcaccgtgttgtgcaggctggtctcgaactcctggccttaagatatctgcctgcctcggcctgccaaagttctgggattatagaagtgagccactgcgcccagcgcacatacaattgtaggaaggctgagaatggcttttaatttgggagcgtttaaaagcaaacatgcttcctcaagacaacagtaacaaaaaattgacatcgttgaggtgggaacttctttaatgctacctgagcctcttgctgaaatggttctatgcagttttgcatagctaggagtggtaagctcattcacagacatggaagaggcagagtgggcttagggagaggcaccagtctagtggtccaacttgggttctgggttccagtcctgcttctgctactaaccccatgagaccttggaatgcccatctctaaggtttctttcagagctgaatcactgtttggtctgtgattcatcaaagcaattagaagactatgcctctccttcaagaccaagactttggtcagaatactccctagggactttctcactgtgtgtggcactcttctctattagacgctttattcattctccattgtattagagtcaaaagtatgattgtttgttgtagaggtgccttttccgtgtcatctctgataatctacccctctctctctgagtaacctaggcttttaaaacacatctcctttggcttaatcacactgcctggtgtctactcagcattatgtgtttgttgtctgccctgaactgtgaactcagccatgtcctgctcatttctgaagcctcagcatgtacatcggtatctggttcatggtagattttcaatgaatctgagtgaatgaatgatggatgaatgattttgtatctccttactaggcatatgttccttgagggcatggaccgtgtctaatgggtggctacctagtgtctcattcttggtccgttgttagtggtgatttttgtcctcttctttgcactcatcattctaggcttgtattagggtaaattgttagcataattctgccttgtttcccaccctgcccccgccttttttttcttttgaaacagagtcttgctctgtcacccaggctggagtgcagtggcacaatcttggctcactgcaacctctgcctcccgggttcaagcaattctcctgcctcagcctcccaagtagctgggattacaggcacccgccactacgcctgactaatttttgtatttttcatagagacagggtttcatcatgttggtcatgctggtctcgaacttctgacctcgtgatctgcctgcctcggcctcccaaagtgctgggattacaggcttgtttgcttttaaacagtttgtgggcagggatggtattttcttatgattctattcctcacagatcctggcccagagccattagcagagaaaattctcagtagatgtttgctgacctaaacttcattccaccacctttgccttccttttgccttttcacctcctcttagaaggtaccttatatgataatgtcacctatgcaataaagaccacaaagtaaatttaataaaatagaaggcatgcttccctcttttctaaccccacacttttttttttttaagatcaaaataacgttgcatttgtgtgtgccctgcttttatttatttatttcttttgtagacacgaggtctcactatgttgcccaggctctctccaactactgagctcggtgatcctcccacctcggccttccaaagtgctaagattataggtgtgagacaccacacccagcccagccctgctttcacaaaaaacaaaataatgatgaatatattgtactaccctcactgttttcatttgtctgtgaatgcttcttattttatcaggaaaaggaaaaatttctgtttcttgactgtaattgttgaaatgtattttcaaagttttttactttatttttggactgataccataaaatcgtgtgaaatgatgtgaggattttctaatggagaaatgacttagaatatcccttggatgtcctatctgctttttaattgttttatcatcccagacatgtttctctattcctgtctattcttttatctgtaaaatgaggttattgaactagatgctgtctacaactttttttttttctttcattaacattaaatctctggtacctgagaacattgggatcaggctgatatgtctaggtgtctatttctttggtctacccttcaagtaggaatgaaaacccatagaatttctgtaattatcagcctcaataactttctaaagcctttaggaagcagataccctgcaatttatctcactaatttgtttgtgattaacactctctgccccttctcatatcccaagctcagtgttttgatatttaattacagggaattctttcctcttcatagatgatatagcaattgtatttcatttctcttatctgaaatctctgctgactttccatgtcttatgaatttaaatagtctaaatagggcatgagatcttaaatattccttccagtttctacattttctattcagcaacaacattttccctggaaaagggtgaaagcctgtgagtcccccacagggcaggagcactgaatacacccacattttcctaccatctgacatagatgagacacaaagtagggactcagatgattatttaactgaatcaactggattccttaattctcacaatattatccttcctactttgtaaatagggaaatggaggcttagtcacacaaaatatcttgttcgaagttactaatcaattaagtaacttaataatttattgacatctgaggcatttctctctttctacagcctcagaccagaaatgatgggatttcagccttcttttcttagagattggtgagccaagacctggagagagaactctggttgtcttaagtcacccagatgaactattaatagaaaaagaattctactcagtcagtacttaaaagcttgacatgtttgtgtggagacctgtgtgtgactgagttcagatcactctaatttcctgggcctcacttgacccatctgtgaaatggggcaatgagctcttttcggcatgaaggcaaggaactgtccagaagacctctggagaattcttcttaccctgagatcaagggttctgtgagtagtacaactcacacccaaagtcttagttgcagggcactttagtgggaaaaaaaaaaaaacgctgaggctatttttagagccttcatctggttatagactagttggtaggagagcaatacctttgaaaagttaagaaatagttttatacactgtgttaaggatgttgtcaaaactaatactcgtgtatgcaaagactttaacatttattaataattttttctatagattggtgaaattggtttgtaatttttgtcatttcacttttgtggaaattgagcaaaggtgagagataaaatgatgtgatcaggctgggtgcgttggctcatgcctgtaatcccagcattttgggaggccaaggtgggcgcctgaggtctggagttcaagaccagcctggtcaacatggtgaaaccctgtttctactaaaaatacaaaaattagctgggcatggtggcacatgcctgtaatcctagctacttgggaggctgaagcaggagaatcgcttgaacttgggaggtggaggttgcagtgagacgagattgcgccattgcactccaggctgggcgacagagtgagactccatctcagaaaaaaaaaaaaaaaaagatgtgatcaatatcaatctaaggacactgtaaagcagcagaggattgacgattttcctaagacttagtggatgtagaagagtttaaaatattctagcctagtggtttgcaaacttggccacatattaaaatcttcagaggaactttatgctacaatgctcatctcagtcacagtgtctgtgggtgagacccaagctcagttacattttaaagctcccgagagtttagaactattgatctagtcttgatttcgtatcaatttctctgatggtatcttgcttgacatcttacttactgggctgcatttttgtgctgtgtctccctgacacccaagtgaaaactgctggatgaaccgaaaattcacccaaacaacgtgaatgtaatggaaactcttgaaaaggcttacaagccttgaagtaaatgttgggcgaagggagcgaaagggttagcgtttttttgcattgggacctgccttctttttatgcttctaggaacgtttaaaaatgagagcaaggaatatatttcattgctttaattgttcaaggtcttttaaaagcgtgtgcaataaaatgccttttaagataactgacctttgtattttaatgctttttggaagggaacaatacctagtgttcagctgcagtataactttatatatatatatatatatatatatatatacagtcagcagagcttgttttggaatcagagggctgagggttttgctgccttcccagatattttacctgtttctgtttcaacatcaagttccattcagttgatgtttcttgacctcataatgtctaacctttatatctttgttttttccctttccaaacttatccaagaaggagacttcaaggcctgattcattaatttttccttctgctgggaactcaggtgtgtggtggaaggcagcacatgtgacctaatctatattttgacaaagaagaaagctccctgccctcccttgcaccagttcgtttggtaatttttaatcccaaaagccactgctaatacgtttttaaaaattgatgctagctattacgttgttagataaagctcatcttccaactctaaacttgctctttctaaaagtgaaataacactcaggttgcaaacatagtgaactggaatttcagaggcttgaactgacctacaaaacttgtaactgtagctctagttatacatccactgtggtcttggacatgtgaggtgtttgtctaccctcaggagttttagaagaagaaattttatggaattgctttccatattaagaaattaaaatagccaggtgctattttaattttacagattcacaactgtaatcccagcacttgggaggccgagcagggaggatagcttgagtccaggagtttgagtggagtggtcaacacagccgagaccccacatctacaaaaaatttaaacattagctggcatggtgactcatgcctatagtctcagctactcaggaggctgaggtgggaggatcgattgggcctgggacatcaaggctgccgtgagctgagattctgccactgggtgactgggcctgggacgtcaaggctgccgtgagctgagattgtgccactgggcgacagagcaagagtgtctcgaaggaaggaaggaaggaaaggaaggagggagagaaagaaagaaaaaaggaaagaaaatatacaaaaatctttgtgtagctctgaaataaatatatatatatgtatgcagtgtatatattatatgaaataaaattgcttgtgcttaatttattttaaaatcatgtttgaaaatagagctaattctcagttactacattttcccctctcctctttctgatggtttttttcttaactttttattgtaaatgattttaaacttatttaaaaagttgcaaaataagcatagtccaatatagccatatacttttactcagattcgtctattgttaacattttatcccattggatttatcatcctcccccttcctccctcccttcctctctttctctgtctacacacacacacacacacacacacacacacacacacacacagtctcccccaccccatatatatatatatattttttttttttccagaagtatttcagagtaggtcacttatatcattgcctctacccctaagtacagtgtgtatttcttaataataaaaaaaataaagatagtctcatcatattcacagtatggtaatcagcttctgtacatttgacactgattcaatacttcagtctactgtctgtacttctcctttgtcaggtggctcagttctgtccttgaagaaaactgctttttcccattcagtgtacagtccagcctaaggtcaggtagtgcatttagttgtcaagtctctttagtctcctttgatttggaacatttccacagcctttctttatcttttatggcattgacacttttgttctccccctttacaattatagtattcctcattttgtattagtcactggtttcttcatgttttgattcaattatgcattccctgaaggaatattacaaagataatgtgtccctctcagggatcacatctggagtcttatgtgtccatctatccgtcattggggatgttaattttgagcaactgatcaaggcattgtccagtttctccacagtataggtattctttcctttgcaattattaagctatccatggggagacactttattcttgctccttatcaaaatattaccctacattttttcctaaaccagcatttactatgattggtgcaaaattaggattccatgttactactctcttcacattcatcattcagcatcctgcgttctactgtatgcgggagccccttccttctcctccctccctcccgctctctctctctcttttcctctttcttttctttctttctctctttctttctttctttctttctttctttctttctttctttctttctttctttctttctttctgtctgctttctctttctttctttctctttctttctttctttttctttctttcttttctttttctctttctctctttcttttctttttctttcactctctctctctttctttcttctgtttcccctcccttccttcctcccttcccttcccttcccttcccttaccttgccttcccttcccttccctccccgtgcctgcggtccgggccccccctttttgtgggggccgcgggtcgggggcccgggcgggggggggggggggggggggggggggggggcgggggcgcggcgtgggcgtgcggggggggcggggggcgggggcgcgggtcgggggtgctggccggggggtgcgggcggggggcgggggtgggtggggcgtcgcgggggccggggggggcggcgcgggcgcgcggcggcggcgggggcgcgggcggtcttcgggggccgggggccccgcgggggggggcggtgccgcggtgggccgggggcggggcggcggggtggtggggggcgcgtgccgcggcgcgccggcggggggccgcggcgcgcgcgcgcccggcgggcggcgcgccgcggccggtggtgggtggcgctggcgggggcggcggcgtggggtccgcgcgcggcggctcggccgggccgtcggcggggcaaaaaaaagaaaaaaaaaaaaannnnnnnnnnnnnnnnnnnncgccccgagtagagaagatgcaaattatagtgcgagaacgtaggagtgagtagtgagaaaggaagcggactaaagaaattgtttcgtttcagctaattctcttatatttctttctttgtatcctcactcgttttctcgagttatttcgttggtgtataaatagaattgtcttgcgtttgagctatttttcatatgacgtagccatgtaagctaacatattctcatatcttacttgagacatcgctccatagtttcattatatatctcatcagtcttcttaaattgttatgtaaaataaggaagtaaaggaaaaaaagaggagccttcccgtgccctccccccctgccctcccccccgccctccccccttccctccccttttctttctctctctttctctctctctgtctttttctttctttctctctctctttctctctctctctttctctctattttcctctttctttctttcttttggttatggtcttcaagatttctgtttcaatctttcataattcattcttgctatataattattttggccctcaaattatcccagatttggtcagtgggagctgcatcaagttggctcctgtgtccttgagacatgtccccatcatctttgttgttagcaattgattaattgctggaataaaaagatgttctagtttggtcttgtatattctctgtcccagccatgaagtcaagcatgtcttcattatgtcctcactctttttatgtggagaaagatgttagagaccaatatctgagtgctaggtgtgctcattgctactctggtgccttaacttatagcctctttcaatgactggagctaggaaattttatatataaaaatatatatgtaaacaaaacctacgtgtatatgtttatctgtaaatatatgggtgcatatacaaatatgtatacacaaatactactactattaatttgctaataccacttactacacaaaacaaatctgtgaaaaagagttgaggatttgcttatggtgctcctccttcaacttaaccctgcccaagactgagggtatattgtcaaacgctcttcagggattacctggattagttctttcttcatgtgtctttcccctatatcccaatggtcattatgttcatttaaaatacagttgggttcaaatgcttcagtttgctttgagttttagtttccctccttcccatcctagtttgtttaattttattttttgaatatgtaaaacattaacatgcttccagaagccaaaactaaaccaaaagaagtgccagtctctcagatatttgctccaccttgttattccccacacctcttggaggttttcttggttatctctctggtatttctttttaatcctgatatatatatatatatatatatatatatatatatatatatatatacacacacacacacacatatatcagattatagcgtcagattatctgtgctttccctcctctcagtaaaacctgtaatgccccttcttccccaaacatatatatatatatatatatatatatatatatatatgtttttatatttcctcttctttcttacacaaaagatagcatgttgtatatcttcttttgcactctgatttcgtaaattttttttctttttttttgcactccctctcttcttttcttcttctctccctccctccctttcccccttcttccgtttttttttcctctctctctctcctgctcaaccaatttcctatgcttggacagttggatagttttctgcaatgaataacattatgcatatgtatttccatatcattggatatatttttgggatatattcttagaaatgggtatgctgggttaagagtaaatattttatgaggtactttagttaccaaatttttctctgatggaatgtcccactagcattcccaactacagatgtctgtgaagcttatgaattgttgccaatttgatggatgagaagtggtatctcagtatagttttgatttgcacgtgtcctattaggagtaaagttaagcatcttaatgtatttaatgtccatatgtattcattttgtgagttttttgtgagttacctgttcatgtcttttgcccattttaaaattttattttattttttttgggacagagtctctctctgttgcccaggctggagtgcagtggcacgatctcaactcactgcgatctccgcctcccaggttcaagtgattcccctgcctcaacctcccaagtagctgggattgcaggtgcatgtcaccataccaagctaattttttgtatttttcacggagatggggttttgccatgttggccaggctggtctcaaactcctaacctcaagtgatctgcccaccttggcctcccaaagtgctgtgattacaggcgtgagccactgtgctcagtcctttttttttttttttttaaattgggtttttggtctttttttctcaattagaaaggtcttcggaaattagatatattggcctttcatctatgaagtatattacacatatctctcccaatttgtttatcttttgactttgattacagtgttttattttcttttcagtcatataaaatttttatacttacagagacaaatttaagaatcatttcttttattgcttctggactttgttcgtagttagagagcatttcttaacacccgtgttatctgcatgttatcttccagtacctgtatagtttcatttttcacatttagatctttaattcatctgcagtttgtgtgtaacataatgaatggatctaattttacttttttccaaatggttatctggtgtctcaacaccatttagtatgaaaatatcttctcatacttcccgtgtgatttgagattggtggttactttttaacctacaccatgactaggtgtgaaggagaatgatggtaaacagtggaacagggtagttagaggaaaatgaggtcccaggtagataatgactgaaacccaataagaacatacatatttttgacttcaacacagagctctttaccttttacaagtcatcctctctggtccatttttgtcaaaaattaacgtatttaatagagaaggtgtttaaaacaaaaggagggtttagagattatctgtgctttccctcccctcagtaaaacctgtaatgccccttcttccccaaataaattatgagaatggggctgcataaattttctgtgagcatgtgtgactatgtttcctctggttcctcgccgcatggtaattactctgtgctctctcctgcaaactgcccatgtttcactgcttgtaggtcaaagctgtattgagtaagaagtgaatttgggaagttttgcaagtaaagtgctacctgagtcagtgactgtgtcttaattcacctttttgcttccaggttcttgctcagggccatctgtgcacatggttttcactcaataagtgcctcatgaattttaatgactacacattaaactaaaacaaggtctgcccacctattcttaagaaattaaactctacaaatgatgtattccaaaactgcaaaagagagtgaaagccaaaacagatgaagctgtccttatatgggcaggaaaaactcagtaagattttatcagttcagtaggtgttgcatatggtgatttggaactgtctgccagttccaagatggccttactttattgtatggtcagtacagtttgtatctagtcctcatcaggttaggcctggaactccccaacccctgttaaaaacagcaaatcagggtttctgtggtggaatggggaggaaactggcttgcattaattgatgtataaggtagcccatgataaactcaatgccacttttatacacatctgggagcaagagcttttggttaattggcttgcctatgtttttgctctgccttggatgctacagaaatggaattgtttgttagagtcgttgcatggtgaaggaaaaatcagagccaaggttttgaaggacctaagggagaacattctgtgttctgcaggcatcttcctccttgggacacaaacagctccctgcctaccacacacagtggataggattccttcaatgcctctcctcgggtgaaagatgtggcatgtggaactgaacgatcaaaatcactggggcaactgtatgggcgccctcctgcagtgtaacatcctaacaggacttttgacaggaatggatacctaaatatttacactcctggaggcctcgtctgtctcaaccatacttaccagtcaccacagtgtctcctttctctgtgtagtactggataaatacagataaattctacaccctgacttactcctacctcatgcaaggaagttataaaatgtttgagtagcttacttaagtattactcctgccatggcttcttgacatgccttgatggagctgtggaaagcatcttggttgcttcaacacaaggctgtgagttgtttcatagggcagggtactaactatagtttgctgaccttatccactgtgtggattcatcttgggaaaggagcagagaaggtactgagaataccacatctgctgaagactctgctggatgctttctccagacatctcatacagtcttttcaacacccactcaagatataggagctgttccatttcacagacgaggaaacggaggctcagagactttgcattagtctaccaggtcataaagctagtgttcacagaactgagactcaaaaccaggtctgtatacccatgaaattggtgcttttcctctatgcctgacacatgacacatcatatcaaggcatcaccttttcttgaatcttattcatagattctgggcaagcagcctcagcttggtcctatgaaacctttcctgacctcctccacacaccccctacacacactctgtgaacattgtaatggttagttgtatacacagttgtttccagtgctggactgtgagttcttctggatgtcttcctatagtgtttaattcatagctggcttttgatacgtatgtaatgaaaattctggttttctgcaccatactgtgtttccatgctgacactaaaaatctagacatgctttcttagaattaggcaacccatttacctttaaggatgcactgactttggtttttgccttaatatttggccaaaacctgctctttgagttcgacctctgctttgcctttaggagggtaaagtagccaaatacctacctcattaacattgtaggcaactctgaaattttgcaggataatcattgcattgatgcgaacatcacactggttaccgtcataccgtatcagcataaaaatgttggcaatgaatacgtatatttttcaaatttgttgttaataaccagatatgtacttttaaatatagtgagcattttacttataacttggaatggaaaaccttcttaaactactttgtacgctgagactccaccaactaattgaaatataaaggaatatattatattaagagtaagatgctacaatatttaatgatgactgtgaaagctaataatgtatgggttaaataattaagaactttcaaatagttaaacaagtagggaaattagttggtaattaatataaaaattagattaattaaaccttagttaatgaatattagctaattgaggttattaaatcttagttattacagtttgttagctagataactttgggttgaccaacacatcttttttcagctaacaagcatttataaaaatataaattgtaatctaagtattgttatagaactagattatacaataattataattgttactgggttgtttgtggaatgcatttatgacaccaaacagaatgaccattaagaaccatttttaacttttagttatttaattacacttaaggtcatcagtctttcaagaaaaagcctatttaagattttttttcacattttctgaagataaattaaaagtagagtgtctacactgtctctcaacatttcctgatcaggaaaacctcccaaattacgtatagcaacatcaatgataaatgatttttaacacagagaaatttcatgtgtattcttatatcacaaaaattcagacgatgataatgagagatttcagtctcagctttggcttactattgattttaacattcagtcatttggcacttggcccaagtgggtaatgggtgcatatctatcagtggctcttcatacatttgtgcagggaggtacacatgcatacgtgtgggtgtttcaaagtctaactggaataggcctctcacatttatctcctattaatttgcagattgtttccatggtcaccatccagaaatttcccagtaatccttgaggaagttagggagtgtgataccattagggagagggaatatgtggcatagagacgtgatgggcattagttgtctgaggttatgaggtcgtggtgaagcctgatcatgtgaccccatctccatactctatgtccagtgctccagatcccatagacctgaatcttagttctggtgctagaactgtccctgatgcacatatagtaagactttaatttccattttccctgtcttatgaaaagaagtgttgataagctcattaattagctttctgctcatagcttttttctgactgctaatgacttcttgaggatgggcaggctttgatgagctgtgtggtcctgggaaagccttggtgtcctcttttacctgcacagtgagggtgacggtcgtgttacctcctgaggccacctttcagctttgccattctgtcatttgacaaagactgaatagagaaaagacaagatttaacgacagttaaagtccaagccagtttgtatttgctgaaagacacaactgagggaaaggaactgacatgtagtttaaacagactggttttttgttgacatgggaagtgtgaataatacttcttcctggtttatgagatatgaaattggttgtctaccttatctgtttctcacttttgttctcagttcatagtttggtcatggaatgcaattttgaagacaacttcaagttgtttttttgctcagtaatcatagtagtatttactgttgttcactgggcacccagtctgtgtacacacatcattcctaatcttagaagaaaaacaacgtgcaagacatgtgttttctttcccactttgcaaataaggaactggggctcaaagagattaaaagacttacttaagttcaattagaaagtggcagagccaggattcaaatgttggtttgcctaactgcaaagcctatatccaccttccacccagtgctgctacagcattaaagcctgtaaattgaattccacacactcctactttcacctgtactattacagtgataagtaaaaccagcgctgagccctactaacaaggtgtccttgatttgtgtgctgatgctcatgacacttctgtgtggcatctgctgacaggcccacggggcccagatgttcccactacaaagagctcatcctggactccccaaccagggaaagagacctgaaaaggaactggtttgtgattagggattattgtgatacttgaagtgaatggtcagtcagttcttcccatttatttgagttcttacttcccttccctttgaacatttcagtcaaacttctaacagtgactttcaacactggctgcgcattaaaatcacttggggaggttttgttttgttttgttttgagacagcgtctccctctgtcatccaggctggaatgcagtggcatgattatggttcactgtagctgcaaccttctaggctcaatcaaccctcctacttcagccttgtgagtagctgggaatacagggacacgccactacgcctggctaattcgtatattttgtagagacagggtttcactatgttgcctaggctggtctcgaactcctgggcacaagtgattctcccaccttggcctcccaaagtgctggaatcatggagctttttgtttgtaagcatgtcagccctcaccttccagagatcttgatttgaatgggctaggttggggttctcgctattagcgcaaaaaaaagtaagtactgcagggattctaagattcgtctagagaagacgatcaccgcattagggggcagaaagtccacttttcattattttgttggtacagtatactttttttctgactctatgaaccctcaatcttatgatgttaccattccattgaagggtgggatttattcactgagaacatttatatttttttgagatgtcttaggctgtggagagggtgttacagggatggacacagatgctgaatttagtggccccagagaagaggaattaaccactttggattggattattgggagcaaccaaaagtcagtgctgtggcttttgctgtcttcccttgtaatctcttcccctcaccagattttcaacacagaaggggtgtattttctagttatggggtattcacaatcacatctaataattttactccagaacatactatggcttgtttatactagcttgaatatttgtagtctctttgatttttgtttgctaatttaatttactattgcatataaaagaatggcttccatggagataatcaccgtggctcccagagtgcatccagagacatttgccttgcttctgtggaaatacacccaaattccccagcatgacattgagtgttcaccccacacctgacaccagtctctcttgctctaattaaggccactctttaccattcttgggcaccagccagatgaactataccctggtgtgggatctgcccgatcctgctgagacattaactctgtcctgaagctgtttgtccttccagcagctagaaataatctttcctttcctagaacttccacactgcattgagcaggaacacttgtagaacttctcacattgtacctcaaggtattcttatttatgcatgtatataatttctccccttctactactgtaagcttctgcagggtggggcagcctcttcttaattttgatatctactgctgtgccaagaatattgtaggcatttcctaaattatttttcccccagtgtatgtgttactttgttcaattcagcagttgtccaaagctaatctcttgagctattggtagctttggtgaacatttggagaggactactgtgatggcgtaaaatccggtgacctagttacagaatatcccctgcaggctcactggtaaggaaggctcatgtttaaactcagtgaaaggagagcctggcttatttatggtggtggttgtttacatgtctttaaatgaccttcttttttttttaatataaaggcaatatattctcatagaaaattcagaaactgtaaacagggttaaagaagaaaataaaaatcaacactatcactttcacctatttattattcttattttatttatttatttatttatttttaaggcagagtctctttctgtcacccaggcagtggcacgatctcggctgactgcaacccctgcctcccaggttcaagcgattctcctgccttagcctcccaagtagctaggattacaggcatgcaccaccaccaagtccggctaatttttgtatttttggtagagacagggtttcaccatgttggccagactggtcttgaactcttgacctcaagtgatccgcctgccttggcctcacaaagtgctgggattagaggcgtgagccactgtgcctggccacttccacctattattaatgaaacctgtcctatttaacaaaaacgataatgtggggtgtcttgtgcttggagcttggagaaaggaatttgcctctgtttttttaatgacttatggcaaggccagtatgaccagtaagtgggctgtttattattattattattattaatcaccattgtcactgatagaaattgtcactattgtcactgatagaaaccaagatagaaattgtcactattgctatagccccaagaaggacctcatggctgcataacgattgagcaccttatatttacacaatgcttggttgttgttttttaaggcaactgtgactcaacaacagctgtttgagaacagctccatcccagatgaaatcagaggaaccgaagtttaaaaagaaagtgtttctgggctgggcgcggtggttcacgcctgtaatcccagcactttgggaggctgaggcgggcagatggtttgaggtcaggagtttgagagcagcctgaccaacttggtgaaaccctgtctctactaaaaatacaaaaaaattagcagggcgtggtggtgcatgcctgtagtcccagctactcaggaggctgagtcaggagaatcccgtagtcccagctactcaggaggctgtcaggagaatcccttgaacccgggaggcggaggttgcagtgagctgagatagtgtcactgcactccagcctgggccacagagcgagactccatgttaaaaaaagaaatgtttctgagcactaaagacaatttgaacaaggcagaaaagtacaaataggaaaacaataatcttactagattgtttgtttttgagacagcatctccctttgtcatccaggctggaatgcagcagcacgattatggctcactgtagctgcgaacttctgggctcaatcaaccctcccacctcagccttctaagtagctgggactattctgtagtgataatccttgttaaagttttggaaaataccttttttagagtctctctttctctctacacagacacacacacacacatacacacatgcaacttttatgtgaatgacggcatttacaatttacgtaaattactgcaggtgctatcatttatttttttcactcagcaatatgccttgaaaaaattttaagtcaatcaacatacagatatttgtcatcttttaaatagctatagattttctctcagacttaaagtctaatttttaaagaagtgactgttatatttaaatcatatatagcttcatgatgaaaaaaggaaaaacaattcttgggaccggacatggtggctcatgcctgtaattccagcagtttgggagaccaaggtaggagaattgcttgaggtcaaaggtttgagaccagcctgggcaacacagtgagaccctgtctctccaaaaaaaaaaaaatatatattagctagatgtggtggcacatatctgtagtcctacccactcaggaggctgaggaggtgggaggatcgcttgaacccaggagtttaaggctgcagtgagctagaacggtgccattgcacttcagcttgggtcacagagtgcaactctgtctataaaacaaagacaaaagcaccacagttcgttagatataactgaatattatcttcatttcctactgtagtggttcttagaaaggttgtttcttaagttagaaactgttgcctaagtatttaggatgtggcaggcactgtgctacatgctggggttgacgaatgcatgggattcggctctctcccaggctggtgggaagaggacacatctagaagccagggtatataccccgaaggggtttgaggcagtgcagagttgatgatgatggtctccagcctgcctttcctttacaaaaatgaggagactgcatctcacattgccaacgagctgcttgactctaccgatattccctaccaagcacgattatgggtagtcttaaaattcttaataataaaatagatattgaaaatagtgtttttttttttaacagtgaaagtaatatgtactcatgtataggttttcaatatacaggaaactataaaatgaaaaggattgtacctgtaatcccaccccttacagctaactactgtgacattttatttgtagaagtccattttgctatcagacctcaagttttaaaatcttaactcaccctctgtaacctagttctcagctctattttatgtaacgtttttaaaggattcaagatttaaaataaacttatctcaccccaaatgcacttgtatatttttgacaccccctcatctctctctctctcttgtctctctctcttctctgtctctcactctatctcagttctctttctcctcttctttctctctctcctctctcctctctctctctttctctctctgtctcacacacacacacggggaaaaaaaatcactcgagttaagaatcagtctctcattttacagataggaaaactgaaatctagaacttgtctgaaatcatgttaaaaaaaaaaaagtggtaatctgtgctcgaacccaggtctcctgaattttcgttcagtgctttttccattctacagtgatgcctccttactaggtcatagaaacagtggcagagggagaaaaggaaaaatacgtcagctccaaagagtgcagtttttttttttctgtgtcctttagctgagctatttttgtgactattcagtacatgtacaatgctgcctcttggagtgttccggctagactaagaggccattcactgctgactgcagccatgccatccctccatggaatcctcggcccggaaatcagatgggaacaaactattccaatatacaaatcaaatttcagagtctgagtgtacacagaaaaattactggatatcctgttggactatgtacataacaatgacacagtgatttatgagggtatgatggggcagagggtagcgggtgatgttggagttgattcatcacttaagcgctaatccattcaccagctccagtcagacttcaacacaaatgccaaattattcatcttccctaaatccaaccctattattttctctctcaaaaccttcagttgcttccttttgcatatggaagagagcgtggactcctccatctggcatttaaggctttctatgatctgtcctcccagacattgataggctgtggagatacagtaaggtagttgttatgagccacaccttgcagccaggctgctccagcaccaagcaacactttccccgggaggttgctgcacctccctgctcctcactttcctcatttgtggaataggaatagggtcattgtgagaattaaataagttaatatttgtaaagggtttaacagtgactagctcataatccgtcacgtagaaagttttttcttagctcatttaataagtacctttctaacccatcactgatagcatttttcttttgcaccagacttctttctagtcattgctgggagcgtcctctcattttcctgcctccctgtagctgtcactctcactcctaaactgttggcgttctcattttggcttgcccaaatcttacgcattcttttaagtccatgttcaagtgaatcctcactgattttgttcttcattcatccccttaacagacttttatggagggtctactgtgtgcaaggtgtattatgtaggaagccttccacagttcccagagctaggtgagctctgtcatgtaggcctgtcttgtacatatcaccttcgacattgctgagcagtttgtgttggacatgtttgatctcctcccctagaatataaacagctggagagtaggatgcttattagtaggtgcttattaagctttctttaaaatgagtaagtgcacatgctaccttttatagatctgttaccttctaatgaaggcaagaacaataggaacaaacattagttttgtgtgtgtgtgtgagagagagagagacagagagggagagagaaagagagagagagattttgaatgggaataattatgaggccacatctgagggcaaataaccacttccaagttgaagaaaggcaaggagaagacaggaatgagaggagagctgtagcagtcaaaggaaacgggatgagaatatgttattctctgaatcataaagcatttgctctgagaaatgtttttccttaagtggtataaaatgtaaaatgaattgggtcttagtttttcttttcctctttaggaggttggagctgatttttaaaatgaggtaggggagggaggtggggtttggagaaagaaagtgaaaattgttttctgaaactctgtttgtcaaataactctctggagagaaagttcagagggtgagggcctgccaaagctgaccagcagcacacaggccaaatcgttctttcgtcattgtcctggtcacttccccacccctgttcgccacccccaaacaccttttttcttctctctctctctctctgtgtgtgtctctctctctttcttttctttccttttttttctttttataacatatgaatattataagtaagtagctggagaaaataaaaaagcaaaacaaaacacaaagtaagcagatgatttcaacctgcaattatttgtcaggtcataaaaatgatgtgtcttagatttatttacctgatctcctcatctgttttccactggaagccttctgctcgcgtcacccttcttcatttagttccccaaacttccacccactttctgactcaaagcaggagagaagcattgaacaaaaccactggatttggagaagagagaaaagcagcttttaagaactgactttagaggtttagcacgaattaaattcctggtcttttctttctgcagatttttcagctattgttgttgtttgttttgttttgttttgttttatgtttcttgagtttatcgctaaagatgcttttccgtggatggcacaaaagttcagctatggccatgtgcttactgaaggcctgtatatggaggcatcacagtggctggccttgaagaaattaagatagtgaaagaggacccctgtctgcgaagaaagagctcatgtttgtgtgtgtgctcatgctttgggtgctacaaggagactggtgtctggggaagggaggaagggtgatggttacaggtataggtaaataagttttccaacagttaacaatacttggagacaagctacagagtgatcaatgctagagttaggaacgctgtgagaaggcaaggtgttctgtttgtgccattggggagggctttgctgtggggattgggggaaggatattgttttaggctttgctagatggctaggactttaacaaataagaaagaaagagctgagtctttaagacagagggaatagcagagacatgaaaatatctagagagattgggagtgggaggctgagtctggaggtgagatatctgtatccaatcagagaagtttcctatgccttcctgtaatgttggaggcttcttttttttttggtaatcagtaaggagctgtcatgggctttgtaaaagggctgtgataggattactctggtgtgtgtgtgtgtgtgtgtgtgtgtgtgtgtgtgtgtatgtgttctgcttttactttatacatttcagagtctttttaggaactcttaggcaaccttaactctggggagtgtgnnnnnnnnnnnnnnnnnnnnttttaaagctctatagtactctggtgtgtgtgtgtgtgtgagcgtgtgtgtgtgtgtatgtgttttgcttttactttatacatttcagagtctttttaggaactcttaggcaaccttaactctggggagtgtgcattgcctgtctttatatgtctttacttctctgttgctgcctggttctgctccttctcatgcttctgtaacaaagtgcggcaatgcaggcttctagaaggtgatgtgagatctctgagcagaccatgtgtgtgttcttcccatccttttttcccctccctttctcttcctcctcctctttctatatcaccaccctcaccagcagcagcagcagcactcccctccctaaaataaataaaccagtcactccaaaggttccaagcacattagtcacatatcccagaagtttaatacagaattattttgacagcgagaacaagaagtgttttctagttgaacgcacagaacttgcttattccaactgggctttctgccgcacagacagatgatacgttttttagatggattggccgcacagcgcaggagactgtcgcttcccttggatacacagcaaactgctcactaccaaaagtggctggggagaagatgtgaaaggagagagagagagcgcgagagagacagaagagaagaggagaggggaggggaggggaggagaggagagacggggaagacagagagagagagagagagagaaaggaaatcaagttcttattatgtacataactttctcattaatggcttccataagtcactgagagatttctttgtgtttatttatttatttggctgctttggagccatgagtccttttttaaacccgggtttatgtctgttctaaaaaatgaggacagatcgagttattgccatgcgggtggctctccaagcattccagttgcatagctcttccagaaatatttcttgacgcacttatttagcactttctattgccgttactgagcagattacagaatcctcccggccctttcaccaaacccgtctagagctggtatggatctacttgtgcctatctggcagatagaaagatagaggaatgggaaggtgaagtccattgttactcatgaaggattttgaccagtaacctcagaagagtcagaagaagagaaaaagcatgtgctctcctctttcctgctttgcttttctgcttccaagtccctcctccaagcaggaagatctttcctgagcagcagcgtacctgggtgtgagaacccagagggagtgtggtggagagacgtgaaggggtcagttcctggaacattctgttccctctagctcccatgatcattgacttcttgcctctcaagtccttctagggatctccaggcttttgagaggctcagctgacctcgctcactgctgtgcatgctctctggagctttcttgtcctcttttggttgtttcttactagcccctcattcccaggactttttctgaggaatctctgttagttcaggtaataactggctgtgaaacctacaatagtaagttctttggatgtcggtgttttcagatgtttcttcttcatggaaactctttataaatccctcacaaaatgggatgtcaaatctcaatatgtaaaataatcaaagtgcagttaaatggtggtgctgttgttaaaaggtggaagatctcataggcttctagccagggccgagttatctccccagaagagctctgtgcctctgtggacccacttagtaagccattgtactggagttgctttaaggctccctacagccctgatgacctgtgctcagcattctttcagctttctgcctctttgtatatctttcaagcttgagaaagatcctctatagatcaggaagatgtgtccagtaagagatttgacctttgctggtttcttgacatgggctttgatgaaacccttttagcatgctcactttagatgattcttctcaagggggatgtcagccccaggaccccccagacctccatccctaaacccgggcttgcgtgtctggcaacccagggccagcacttcgttcttacactcagctgagtggtagtcctgccaccattgctgtggctctgggactatagcctctgccttaggaacacttatgagaggaatcgatggaattccaactatttttaaggattttttttttttttttttttttgctgagtttgcattgcaaaaggaaggtagagcacgggccatctctccctcctccacttatatttattctgcacctacctgcacgtgacactctgctattcttcagagaaggttctgacctttgtgaccacgctttacattttcacattgcaaggcaatttctaaagagcttttcccagctaagatctcatttgagcctcacaacaactctggggcaaaggagactgtaaaacaaacaaaaacaaaaacaaaaaaaacaaaaacacaaaaccaaaacaaaaaacaacccccaaaaaccttagacaaatctaattccacagtttaattaagcaaagaacaattcgtgaattgggcaggccccaaaccagataatctggcactgccatttggttgaagaacatttgtggacagaacaaagaaggtgacggacagaaaacacaagtgaggtacagaaacagctggactggttacagcttggtgttttccttatttgaataggtttgaacagttggctgtctttgattggctgaaactctgtgaatggtacaagagtaggttgcatcctgtttacacatcctgttaggacggaggaggcagctttaggctaaacgtaatttaacaagattcaatgagattatacctgtacgcccaagttcacagttaggtagagaaggattgtggggatttgaagcttaggcttactgacttacgccattgtgccatatcattcattctcctcgtggcaggaataatgaatgaatattctattaacaggtactacctattaaccgcttacatatatttcaaatgttactaggtagatactttttacaggcctatttcatcttctcaacaaccctataaggtagaaattattatgtccagtttgttgatgaatggctagaaatatagagaagataaataacttgctcaaggttatacttcacagaattgatggacctcgaattctaattaagattgctgcctccaggggtctatcagtataggatgtgatctttacccatcctgagtcctaggagatataaaacatgctgttgaaataacaaagctggtttgtgggtgatcatatactatagtaaatacgacatactgttaagggttaataggtggctgttttctgtgtttgttcctggagatcgtaatatctttatgctgttccttctacttcctttttcaattttatgagctccatgttgaaattatgagtccttaaccctattgaactgtgtgccattgggcaagttgtttctatttctggggtattgatttccccgtctcaaaataaatatcttttcctgctccgatcattctttccttttaagtattacctggctggtgaatgtttatattgaattctctttgtacaattcctttcaacaatattgcttggaattataaaaacttaataattgttttaaattgaaatgacaattgcaggttatccttgctttcaaaaagattttgtttctgaaatgtagcttgttaaaagtttggaaataaagcatcacatgaagaaataaagttatatcaagaaagatgcctaacacatgttctgattggctagctggttgtgcctttttttttatgtgtgtgtgtgtgtgtgtgtgtgtgtgtgtgtgtcactctgtctcccaggctggagtgcagtggtgcgatctcggctcactgcaacctccgcctcctgggttcaagcgattttcctgcctcaggcttcccagtagctggtactacaggcgcgtgccaccacgccctaatttttgtatttttagtagagacgaggtttcaccatgttggccaggctggtcttgaattcctgacctcaagtgatccacccaccttggcctcccaaagtgctgggattacaggtgggagccactacacctggccgtgccttgttttttagtatcagttttttcttttcttttcttttcttatcgtttcttttcttttcttttctttagggtatgattctatttatttgaagttccagaaaaagcaaaactaatctgtggtaatagaaaatcagagtatagtggttgttcgcaggaaagaggtggtatgagattgcctgagaataggcaaaagagaacttttcagagtgacaaaagtattctgcatctttgataggagcacggattacttagatgctttcctttttctcaactggcctaagtttctttttctttctaatgcttgtataagaacaaccttcgttcccaaacacacagacgtgtgtgtgtggacacacacacacacacaaacaattcttcagaaagaaagcctcttacgtgtgttaaacttgccacttttttctcaaaatgtgctttgtatttctttgggtgagcaaaagaagaatcttcctcttctcaagttcagagtttgaatcaattcttcctgtcttttgcatttcagtaaatgtttcctagatggattcatcggttttccagtaaagacaaacagctcagaagccagattacattcatacccaaggcctgagttctgtgacccaggcatcagagctcagtgccatatatggcgaaaagaggaacaggagcaggagtggagggagaatgccagacatgcaatgcattcctcagaaatgtgcattcataactggcaaaacaggacccttgctggtttccatcttatgcagaacatgaactgtgaagttttgagaaagaagctaatgttccaagcatctgccacagggaacagtttattttcccttttctttttggtcacatgtcggtttaatttggagtcagtgtttaagtcaatgctggcatggggtgaagactaagaaattgttcttgcagtcagcagacatgggttctcagcccaactccactgccacccagctgcaaaactctccttggcttgtttttaatcaatggcaaagtagcagggttgaatttgatgatcttcgagatttctactatttctgttttctttggttctaattttgcccgagattttccagttcctgtggaattccccagtgaaagcattttctaattcttccaaatactttttgtggcttgaacttaaaaagacaaaaacaaaaatcccagtcttgaatttttctttgtgatttcctgaagtatgttttggatgcattatgaatcttcaattgacagattatttcttgctcggggtagagaagaatgcatttcctgcatcttcatggtcttctttcacttgcccctcttattgttggagaagaaatgtaggtatgttcaacacatagttgcagggacagctgtgcactaagcaaatgcagacttttaatgaccttgatagttgtctgcttctctcatgcattgaagccttttctgtggaagaagtgggagcagcagaaggcagattccacagcttcctcacacctcaagagacggaattagggatgtgagactgaggtgttggtttcccagtcagtaatcggatgagacactttgctgtcacagatgttaagaaggttaacaagaaatagaattgtaaaactctggccctaaggtggactacggtcactttcactttgagataaggcatgattttaaatgctcctattggtctttatgggttctgtagtctattttcaacagactaaaattgtcttgttgcaaaagtttgcaattttctgcttctttgggagagggttcaaaccaaagttgacctcttccctttctcttctgaaaggatgacgttagtttctcagctgaaataaaggaaggaggaagtttccattgggtcttaggaaaatattccagcattgggctttaatggcagctgatgtcccaaacttgtgcacaatggctccgagaaggccatagtggtttaggaggcacccataatagtcccttttattcatgctgagaatgaagaaccaggggcaacactaaagaaacctgcacttggcttttccttgctgcttgtggtccctttcctggaagctgctataacacagccaccaagtcctgggaggaagagaaggaggggattaattcttatgatgcagggggatggctccagagagagtggaagcaaagacatctgtgttctgatgacagctgtgccacgagtttgctctgtgacttggtcaagatgctttgcaatttgaggccttcatttctccgtctggcaagtggacatgctagtggaccttgaaggcctcttctagctcttaaaagcatgaatttaatatatttccagattgtctgtttatgtttcctattgcatgtacttggtatgcccggtgacactgagctcatcaacttgtaaaaagaccgtgccattatcttctttaacggcaaacagaacaaaaacagaatcctctttgtgggtgcctgctcaccgtaatattaggaccaaattcttttgtgtaacattcacctcctttcccagtctagttccacctaacggttctagtttttgggaagcgtttgcttccatgtgtgacattcatctttactttgagctctctgtgagccttttgctactgcagaggtatgtgtctgttgaaagagaggaagctgtacacgatgacacggcagagtcattgggtcaggagtggtgttgagaagaatgaatcaggatgctggggttctgtgatagactctacaaatagtttacaagaagatttagggacagtaagcacaatacatcttttgcttcagtcaaaagcataaattttaatggttacaaatgcctggtgctattatgagaaaaccacaggaaagaccattatataaacagtaataatttgttgactatgactaatcctttggggagtatgatatgtgacataggcgtataagggctttatgtagactaacccctttaacacctattaacttgttagaccctgctaatgggtccacgagggtggcaggctaaggaatgctaccctctatttactaacgagcaaagcgatgctgaaatacagtgaagaagctgtccagtgtcacatggtgaagagatggcataacagagactcgttcagtgcttttatgcctgcgtcgtgttttctgcctttccaggcttcagcctacccagtaaagcaggataaaaacacacaataactgcccccaccacccacagccagaagatggtagaggatgggattgaattagtcatgaatcatgtgaaccatagtatttggtgaatcagtcttggtaattggtggggtgatatgtcagtcagtttactttcacaactgaattatcaactagggcaccacgatggaaaacagaattgaggatttctactttcttattattcatttgtacgtgtgtactttcacttatttaaggcaatgaagaactaataatacctaatatggtgccaggctttgtagtaggtgctgacctgtagaagtgaaccataaaccctaagccaagggctataaaatactttaaaattcatgtagaatcctctctcaatcttacccccctttcatttttcagtgtgttctctgatacttttgtacttttgccaggtgataagtccaccttgacttggctattttatatcttttttttttttttttttttttttgagacggagtttcactcttgttgcccaggctggagttcaatggcacgatctcggcttactgcaacctccacctcctgggttcaagcgattctcgtgcctcagcctccctagtagctggggttacaggtgcacgccaccacacccagttattttttgtatttttagtagagatggggtttcaccatgttggccagactggtctcaaactcttgacctcaggtgatccacctgcctcggcctcccaaagtgctggattacaagtgtgagccaccatgtctggccgtctattttatatcttatagtaaaggatggttgcctcaaaggctgtaaacgtcaatgtttagagatatatatgaaattatttgtaacttccttcaatagtaactttcaaatgccacccttacatggctttatgaaaagtaaacccttctcttaaatgtctgcttttttcttagagtaagtttcttgtgttggctttcttttctctcttctctttatcagtgaattcatttattctaaatttttttctgatgtagtttgggacttcctaacttaacaatggaaattgaaaattggagaagctcattctgtattctttcctttttattccatttttgatactggattatgtctgtataattgctcaaattgtgagtcatgtaggaacatgctctgtgtttctgcacatgatatttaaaacctatttatgctttcttaaccacaaaggggaccataaaagtcctgtcaaatagtcccagactgtaaattccttgaggtcaagagctgtgtcaaatttatttttgtacctctttctgctacagctcccagcccctagcccagtgccaggtagctctggcaaatgagagtgggattgaattggatttctcgttctgaccactctcttggtgcctttatcaacttgtccaccccattgggaggaggggcatggacctgtcaagtgtgatgaattggtagatcatggagttttccatcctccactagaactttagctgtgtttagacttcagaatgctgagtaactaataaaaaacgattccaaagcactctgcagatagaaagtgcttcatgtgtaataaataataatagcctcttaagattaggcacagccacacaaagaagtgccagtcttgcaggccgcaagaattcctgatagaccttatggttagagtggattggttgagactgacccttgtcactgttttgtaataagcagtttcacctccaagttaccacgtattttccattatgggaaaagggtagtttctgaactatctaggaattaatccttccaattatcgttaggagtctgactgaaggaacaccatgaaaattgacagtcaagctttctaggtaagcctaattcagtgcttaaatttagttctaaatcctgtccccttctccaactgttatttctttaaaggaatcagcagtcacctctattttagttctacagcatgtggtggtcttaagaggtggaaactggcaccttttcccaaaggagagactggaatggccagagcccatcctgactttgggtcatcactttcagattaaaacataactgtacagagtacatttcccttgattctctgtttccacagagaggcttttctgctttagggtttcattgatgggatgacttcttttcctttgtcctagagtgcgggtcaatctaattcaagtttggtgaataaatggagccataaactgtgttacccactttatttatttatttatttacaaatgaggtctcccctccctctgttgcccagcctggagtacagtggtgtgatcatagctcatctcagcctggaactcctgggctcaagcaattctgccgtatcagtcccctgagtagctgggacggtgggtgtgcaccactgtgcctggctctccaccttattaaagtgagttaagagaagcataaacagtgttttgctattcttcttggtaactttaaatgatgctttcttctcagcaatgatggtccagtctaactgggcatcattcatttagctattatttattgagcacctgctgtattccaggaacttttttttttctttgaaacctagtctctgttgcccagactggagtgcaatggcaccatctcggctcactgcaacctccacttcccaggttcaagcgattctcctgcctcagcctcctgagtagctgggattacaggcacgtgccaccacacctggctaatttttttgtttttagtagacatggggtttcaccatattgtccaggctgatctcgaactcctgaccccgtgatcctcctgcctcagcctcccaaagtgctgggattacaggcatgaggtaccgcgcccagcctccaggaacttttctaggtgctgctggtcagtgaagaaaacaaagcctgctgtagttaccatttgaaagactgaacagaagtgtgactttaaaaaatgatttggcaaaagtatgctttaaataaataaacacagcaaacaaaaaacacaacagctctttcattctgtcctttcctctattctttctcttgtctcccatttttgtcctgtgtgtaacctgactccacaccttttattctctcactctgcttatcaacacagccatacttgcttctcaggctcttctgtgtctctttgttgtgtctgctgtgcttcatcatgtggcgatgaagtagatgaaggttgttggtggccggaccccaacttcgtattccttcttagctagttccttgattgatctccagacatggagtggcaggtaggtgctcttgttgtaagtcacagaacctggaggaaagagtggttcgtggccctggggcctctgggggctgatgcttggatatttgtttagatatttgtttggatatttgtccccgtccaaatctcatgttgaattctaatcctcagtgctggaggtggagtctggtgggaggtgttggggcggatccctcatgacttggtgatgtctttgtgatagtgaattcttgtgaaatcttgtcatttaaaagtgtgtggcacctcccaccctccaactctgtctctctctctctctctctctctctctctctgtctgtcctcctctcctgctgttgccatgtgaagtgcctcctcccttttgtcttctgccacgttgggaagcttcctgagcctccacagaaggagatgctgctatgtttcctctatagcctgtagaactgtgagccaataattcaacaactcaaccacttcttttcttttttttttttttttttttttttttttggagagacaggtcttactctgatgcccaggctggagtatagtggcatgatcttagctgactgcaacctctgcttcctgggttcaagtgattctcctgcctcaggctcctgagtggctggacttataggcacgtaccaccatgctcagctaatttttgcatttttagtagagatggggttttgcccctttggccaggctggtctcgaactcctgacctcaagtgatccacccgcctccacctcacaacgtgctgggattacaggcatgagccacctcacctggccaacctcttttcttttaaattacccaatctcgggtatttctttatagcagggcaagaatggtttaatacaggggcccatccagcagcactgcattaccaggattctgctgaagaaatggacgtggccccaaaagccatagcctggctgccaggtgccccagagtattgtcaactcagaggaacatctctcaggaaatattccttgattctctcttctctattagttttttaaatgcttctatcccagaggaggtgctcagtaaattttagtttctttccttttccggaaagtctcatgactctttatctgagtttgacttaagagaacttacttaataataattaataataaagaataaaacctgctaataataagatttaatagaactttctgtttaattccatggttattatacctatttcttaatctctctaagagacatggactgtgttaaagtgtgtttatgaactggtggtcgagggtgcatttccctcctaagaaaactcattccttgttttgggataaggttcttggagctacatttaacactcagtcctagacttcagtggctcaaatgccgagacatgacctccatattgaccacacggttgatcatgctgaccacagatttctgctaaagcttgaggtgcctgaccatccctggctattgtcattcgccctaaactagctgtttgggaatggggccagtgatgaccctttagtagagataaggcagagcttgtggaggaaaaatcatttcttctccattcccatgatttagccctctgacttcatgcatttctttttgccctttttcttgtgctggattttaacccccagcctctctttcgatcatgataatttgcatttattacacacgtactatgttccaggcactgggtaaattgctttctattgttcatttcatttaatcctcaaagccagcctatgcagtagatactagtgatccatattggatggatgaggtatggatggattagaaaggtttatgtagcttacccaatgtggcacaacttgtaatggcagggtcagacttagaaactaaatctctccaatactagcttttgattttatttttaccctactcacccctgatattcgtcccctggccttttctgcttacctggcttggagcaagtcctcatctgccaaagactatgtaggtggttggaaggagtgctctgtcctcacctcttcctcccatggcacctgcagccagagacctgctgtgtgtgctatatactcttctgacctctctgattctgaatcgactctcaaggctgaattggctgacatgcatcttctagtggattcattgtttttcatggtttacttggtttatgacaagctagggacagcttgacatttgctttcccgtcagtggtctggggacgtgcacagagctgcttgtttcagatctcctctcggtgtttctctacacttagtgaagactatataaccatggctctattataatacaatacgttataataagatctaggggcattctcgagaacttgggagcaatctaagaaaggagagtgaggttggagagaggcgtgtcctttgcatcttctggtagatgatggtggaggctgtgtaataacatgccaaagcctagcccacttgaaagcatcacgctctccagggaactgcctcagcctggggcacttatattatccatgcttagcatttttgtattactttacatttgtgaactgctttcccatgatttattagctgttcttgtttttaatagcccctggaggtacattgatattcaggcttctgagaatgtaaatgcacagggaacgttcatctcatcagatatttttggatctgggttcaggactctgacctcctgggatgaggccatttggggtcactgcctcccatggattagtaggagatcaagtggacttaacttcagctcctaaagtctccaaggcacagccatggaatgactgcagctatttaaggaaatggcgtagaagccattatccaaagagctggattccagtcctgactctgctgctgaccagcttcactggccttgagtagttgctttgcctacctatgcctcagactcaccctctataaaacaaaggtaacctctcaagtccctttagaccccccattgtattaaatataattctgtgactttggactccttctctggaaccccttgggtagccaatgaattatatgacagggaacatgggtatagatataacccattaggggacttgaattgagaaggtgctcaccttcctttctctaggattcaaggaccaactgacaatgatatgctttcagattcattttaagaagcacacaatcctcattcactataaaagtaagatagcgagtggagctgttagaggaaagtcagactggagccaagaccatcatttctgtatcttctgggtgttgtagaaagtaattagcaggcttgattatctcactggttcaacacacattttagggatgtgatgtaatgtgaggaaacatttagttgtcagattttagggctgtatcaaatttattcttgcaggaaaagtctagttgtcctggcaacctaaaattgatttctttttgctcttgtcagctgaaactggtcccctttgaatcattcctctaatttaatatagagagctgtgtgtctccacctggtgaccgaatcatttttaatgacaggtaactccagcaaatggctcctctttcctacctgagccagaagctatagtttattactaccttcaccctgtgttgttctctttgtgtttatttatttgtctgtggagtgaggtgtgtaagtaaagtggcattcaattaattaagagtttaatcaggcctgtagagcagtgatgtaattggcagccaatcactgcctttcgttttcagtgacctcctagacatgagtgggattcgaatgggctctggaagagggagtccttttgtgtggatgtctagcatttttgtaacctgaagagggtgatgtaatggcccagatgaaaggagaaagcggagctgcatggctgctttctgcctctgtcagtcatctctatcaagggggtgggtcatctatgaagggtggaatcgacatcattaggaagaaattgatgcctatgacaattgaagaggttgtgagagagcaattcgctttccttaaatggttgcaaatttcatggaccacgaatgccgcatctcaggatacagaagagaacttctgatggggaacggctaccagtaattttgaggaaacccagaaatcagcagaaatgccagaaagtgaggagacgaggaaataggtattatcaaaaaagtccagcgcccatcccccaccccgcccccaaacgaaacaggtatccagagtctagaatctgctgatttcattgtgattccagttgtcgacggtcctatgtagacaggtgatttgtgagtctttgaaaggaagtagtgttcaccaagagccagaacagggtcttaaccagttcccgttttgtctgggttaaccaactggtggattaacacgatgacacagacatagtggggagaatgtgggctttggagttggattgtctggatttaaatccagagtccaggtcattgtatacaaatgaccttaggccagttgtttaatttttgtgactcagcttcttcttcatgtcagttctatcctggggctaatgataggacgacaaaggaattttttttttttttttttaagagggaatcttgctgtgttgcccaggctggagtgcaatggtgcaatatctgctcactgcaacctctgcctcctgggctcaagcgattctcctgcctcagcctcccaagtagctgagattacaggcgacaaaggaatttttgaagacaaaatgaaataatgcatgtgaagagcttaaaacaatttgcacatatgaattatttaataaatgtggttcttactactgtttgtaggaagacatttgaatttagtaaagcacataaaagccttttacatatgtatggataagtccgtaaacaaatacacacttattagtgatgcgggtttagaaagagtatatttcttggtggcagaagttccaaagtcaggccaggcatagtggctcacacctgtaatcccagcattttgggaggctgaggcagatggatcacttgaggtcaggagtttgagaacagcctggccaacatagcgaaaccccgtctctactaaaaatacaaaaatattagccaagcatgatggttcgtgcctgtaatcccagctacttgggaggctgaggcaggagaatcgcttgaacccaggaggcggaggtttcagtgaactgagatcaccccactgcactccagtctgggcaacagaggaagactctaccaaaaaaaaaaaaaaaaaaaaagctccaaagtcatattgcaaggatgaggacataggtagggaaggggaaaatttgtgaccatttttgcaactttccaaactcctttctcctcccccatctttctttcttccaagaagttaccgtcattagcaatttgccatgtgtctagtttttgtctcacatttatatacctgtaaatatatgtttattttttgctttaaaaacctcaacagttatttgtataaaatttaaattctttgttctttcatgaaatatcatgactacaaacattgaaatagttactccgaattgcagtcacatgttttacttgtatataatcattcttataggcagagggataactgtaaccttttcccttctccttctcaccttgccctttgggagacgtttcttccctttttttgtgtctttctaccttgtccttctcctcccctcctctcttttcccttcccttatattctgttttcttaccgttcgtctccttttctctctccttccctccctccctcccttgcaatactttcctacctttcatactttctttattatatttttagtctcttgtctttagcttaatatggggctcagtggccaggcgtttacataatattgtgggtccttgaaacatcaggtcttggacacctagtctcagctctgaattgtcaggttcctgctgatatactttctgggtccactgttgctttgtatttaatactggaggttgtgataacattgtccagcttcaggaggccatggtagcgcaggagggatgcatgtgttgtgtagttccttgtctggaatgcagggtgacaggaggttggcttgtgtacacatgttcatctccttgggctactggagagggagtctttattttggtggggtgctcctaagagcagtgagctcagagcctctgtcttgagacttgctgtgtgttttcttggcctcccaatgctcctggcataagtgacatccctgcttaggaccctacactcatgatttcaggcaacctttctgccttccttttggcccctgcctctccaccccatgttcatattcttcatcccaggtgcagtgccaccctgctggctacctctgccaggcagcatccttcatgcttagctcaaattccaccttctcagaaacatctgacttcacatttggtgtcagtctctctcctcctccatttcccatcacacagtttgtactttcagagatactttcatacaccaccttgtattcaatgggtggtatctgtttctgagttctgatcagagggcagacatctctgatcctttggaggctagctcagtagctggcatttataggcactctgtaactgttaaattgaattactgaggaggcctgaggggttggaaggtcaaatgcagttaacccagggaactagaagggcccctgggaacttggttttggagcatggcttttatgagcagctatcagcttttccccaggctccttcttaatcctgtctctctagaggcacaaggagaggtggtgtttgcttaagatgctggtggcattcctagtgaagttaggtcagaatgtgccatctcttctttagctctcaacttcttagagtgtcaaccctcctcatattggaaaagcttagcttttaaaaaggagaaagtggtttacatgatgacctctgaatttttgactttgattattaatcttcttgaagaagactttgcagttgcccctgttacaaggaaagcagacatgccaagttgctgcatttgtgaaattgaatgaaattctggctgcgttttatggctctgacctttgggaacagtccagggtcagactgctcacatgatgtgcttgataaatccgcctcccaacagcactgttgagatcttaactagaattgctacttgcgaaacacctttttctgacttgcagttcagattctgcatgtactgctgactactgcttctagtggctcattcagataagtatgctatatattaggtagaaagaggatgcgtgatactaaggaaagagaaaaagagccagcccaggacacttgggttccagtgctaagtctgcaagagacatgtttgacatggggccttagttttcagatctataaaatggagacactaatcattattaggaagggttgtcaggagttcgagactagcctgaccaacacggtgaaagcccatctctactaaaatacaaaaattagccaggcgtggtggtacatgcctgtaatcccagctactcaggaggctgaggcaggagaatcgcttgaacccaggaggtggaggttgcagtgagccgagattgcgccacggcactccagcctgggtgacagagcgagactccatctcaaaaaaaataataaaaataaattaataaaacaaaaagagctcctcctatgaaagctctggaaacatcctccaccaaactggttgcacttctctaggcacaatatggtttacatccttctaaaatcagcatctcggccggacgcagtggctcacgcctgtaatcccagcactttgagaggccaaggtgggcaaatcacctgacctcaggtgatccgcctgcctcggcctcccaaagttgttgagattataggtgtgagccactgtgtctggccaggaggagctcttacagagctggaagtatttactcagagaaagatggagttagaagggaaggttgagaatgagagacaagttagtgtttattcaaggtggaggtgcacaggcctaatgtaggacaacggcaagtgggttggagaagaggggcttacgggaaggatgggcaggagaaatgggatgggacccaggaggcccaagggggaggtggaggattcaagtcagagcttcagatgctgggtctggagacactttctgaatgcctaggcaggtagctgtggtgttttgcaggataagaaagacagaggctttctgtagctaccatcctgctaggtgaaatgaagggatggtctgggatgtgtgtgtatgtgtgtatgtgtacccacatacgtgcatgtgtgcatgagtgtgtattggtaacagaaccaaggagatcagggacttacccaaggccatacagctgggaaacagctttcatttgattacggtgctaagtttagtaatgactgcgagagacaaaaacgggcagggggagcatgtagggaaagggcctcggccccatttcctgccctctcaggcaggtagtgagtaggagttttaggtttcactgtttgatagcatcacctcctctgctttcccagaaattattcctcgaagtatgactcgaatcattcctctgttgggagatgtatcggttcagagctgactttctgctctggttgtttactgaaaaatggtagcactggcaattcagagggggcataagcaagtgaagaaaaaaaaaatgaacaaacagggcatgtgaggtcaggggccctggttgtgagtcccggccctgcttttagagacccatgtgaattgggcagatcaatcaacttcttagtgcctcagctttttcctctgtaaattagaagatagtgatttctgcttgataaatttattgtgatagtgctttgcaagttgtattgttggtcgtaggataataaagataaaggggtatacagacttggattctgtttctatatatgtgaagcgttagagagaggtggtaaattgtttctctcccgtgggttgtgcacatctctgatattatggtaatccccatatcttctccttttgcagggtggggtgtcttggatagtatggttactgaatgtagaatctactaactcctcttttttatttcctgagactgggtctcactgtgctgtccagggtggagtgcagtggtgtgatcatggctcactgcagtcttgaactcctgggctcaatcctgagtagctgggattacaggtatgtgccatcatgccagctaattagaaaagtttttctttgttgagatggggtctcactatgttgcctaggctggctttgaattcctaagctcaagtggtcagcctgactcgacctcccaaagtgctgggattacaggcatgagccactgtttctggcctcctttttaatattctgccctgtgcaaagcaccagcaccaacagcctccctcccacaacccccaacagctgtgcattaagtatcactttggtttgaggatttcctagcttgctgtttatcctgggagaatttctgagtttcttggtctttgtttctttacccaaaagttggggatagttcagctttgtctgcattgtggacactacctccagaaagcaatgggaagaccctttgtaagctgtaccgaactctttgtatttttggagcacattttgtcttttttctcccttcttctggtggctgaggtacctctttggtcttgaaaagacccacttatatggaggcggaaatgggcttatagagggaagtgactttccaagggccctggaatgaattggattctgagatctgtgcccgtccttgtcacaacgtgtcagattccattatttagtgtgggcctgatttgtccatgcctgggactttcccagaggaagtcatactttctggaaactctctgaggtcttgaaggggtgggagaagtctctgacacaagtgctgctgtggtcatggaggcttccattcctctctccttgtgttgagcagggaattgctccttggatattttaggtttgagtgactcaacatgcttatgacccagaggatgctgtggtgtgtttggcagcatgctggaattagtcagaaggcaaaactgcttgtcctgaccccagaacccacttactctaggtggatgagaaagtcctctcagatcctctatttcctaattcatggcaacttctggagaacagtattttctctgttactgctttatggggtttagtgtggaaattaaagaagagaacttcttattttttgtaaataataatgcaatattcagatactgttagtttctgaaatttaaaatgggcatctcacttctgtgttccctccccaaataaatgtattgatactaaaaaagaaagccagctaactttatgaggatggctggtaaatgagccattctgtttttgcttgctgtccaaggcctctaatattaagcctggaccatttcaagcatatatggaggatatatatttcaaatatacattaggggtatatatttcaaaatcgaggacacattaatagtaagaggagaccatgtaagacaaagcacaggtttatttttatttttgtttacctgtttattttttatatttttgagatgggatttctctcttgttgcccaggctggagtgcgatggtgctgtcttggctcactgcaacctcctcctcccagcttcaagcaattctcctgtctcagcctcccaagtagctgggattacaggcacccatcaccacacctggctaatttttgtatttttcttagagatggggtttcaccatgttggccagcctggtctcaaactcctgacctcaagtgatccccccacctcggcttcccgaagtgctgggattacaggcgtgagccactgcgcctggccaaagcacaagtttaaaaattacaagtttccaccagcctcatatctcccttggcttataatattcaagtgttcatggatactggggcttgccatcccccgccccgtgtgttaatgcagcccatggaggcttctcatagagacataaacagtgggctccagaaggtctctatttaagaaactgaggtctggcaaggtcacacatcgaggaaatggcaaaatcaagactaaaagccagctctttggattctcaattccctgctctttctgacacttcactcttccctcctgtcaggtgaagagagaagccagatggtttgacaaatggttctcgttgctgtcaaatctgccttctttctttgctcagacagacagttcttaccttccctttttcgggggactggcggaggtggggtgaggagagaggtaggaaggtggatgaaggaaaaaaagaagcattttattgcttcattctttatgtagtagtgatggccaataagttctttttttctctggcaagaagctaagtaaaggcaaggagtaatcgtcaccttgaatttagagcacatagaggcctagaaatggcaggctgtattaggagacaacattgatttcatatatattcatctctgaaaaaacatgtttaagatgccatattcataaatactaataaggctgtctgattccaattttcaggtgagattagcattttattgagtattttatctgtcagattcaatgctggatgtaccatcctcccaggcttattagcataattgctgtgcttaagcaacaataaaaaaatcagcagtaaaatagcatttagtgcaggcaatttgttatcaaaagcttttacttaaggacagctccagcctgcatttattagcaagttagggttataatttatttttattttgaaaaacaaaagtgggagaaagatttggcttttttgttttggaaataatagagaaattagaaagcattgcctctttggaaaattgtccacatcccttcttcctttgccgaaagcaggctgtgatgggaatagattccacttgtgagcgacattggctcagacaaaaagttgctctccttggcattggaacaaacgggtagtaacgtccctttatgcttgtacacacatttccaaaacactttcagatctcgtttgttgctcaaacctcacaccagtcccgtgaggtctccattcttagaaatagaaaaccaagttgaaatgacttgttccagatgaggcagttgagtggcaaagcggaggtgtaaaaactagtcttccagcctccagtcctgtctcagcattgctcccccttcacgtcgttgtccagagctcctggtggagccttggccttttccatatgtacacgtgcacacacacacacacacacacacacagatctgtgtatctacacctgtctatacacatacgtgcacacctatgcacacacatctatgcatacatacatactttttcttttcctaaaagttaattatgtactcttgcatttgtttttcatttgatgtccgggttgaaatacttctgccacatgaacttctcttgatgccaaatagcctcttaaaatcaatctctctctnnnnnnnnnnnnnnnnnnnnnnnnnnnnnnacccccaccccccccgcccctctagctagcaactgtatcaggaaagcacttgtgattaccatctgttaaggacctggaacaaaataaatgatgttataagtttttgtagggaagatagagataagattttaaaatatggagattgggaaatcatttttcttccttatttcttaggaaatgtatcagaaataaataacattaaattgatgccttttagtgggttttaggcttcaattatgggtaataattttcaaattgagaataaagttttgagtgaaaatggacaactgaagcttctaagctttgagaggagttattttagcattttagattttcttttctcagtaaattcaaacaaagatcatacaatcattgaatcatagcacgtctaaaatccaaggctctgtgctggccactgtgtgttttacagactagctcagacgtggctatgagccccaagacatgtttaaactattagagaggatactaacgatacattaataatgttcttggttttgacagaatattctagaacaggaactctagtaggatttttgcttatgttacatcattgaaatttaaattcactcaattatttattgactaaatattgagcacttatgtgatgttcactcttgtattttacatacatcatctcatgtaattttttaacaatcatatgaaatatgatctgagataatagtcagtactgttattattgttctcatcattagatgaggaaattgagactaagtaacttgtccaagtcattcagctggtaagtggtagaactgctgtggtctccctgtaaacacatgtttttttcatggtaccacttggcaaaaaacgaataagcaggtacatacgtagacagatagtgctaatgatgattagagaacctcagaactcatgcagaacctggatgtttagagagaaaatggaacttgaaatcagacaggtgttcaaaccctactatgcttcttagtgtttgtaaaatcctcaatttaaggacctcttaggatttcggtgtcttcctgtgaataaaggattataaaatctttctctcaatatcataatgagaataaattacaaaatgtatgtgagtgtctgcaaaggtacctagttcatggtgggagttcaccctatcttggaagtgctcataaacatgcagggttttttttttgagacggagtcttaccctatcgcccaggatggagtgcagtggcgcaaccttggcctcccgggttcaagtgattctccttcctcagcctcccgagtagctgggactataggcgcatgccaccatgcccgactaatttattttgtatttttaatagagacgaggtttcaccatgttggccaagctggtctcgatctcctgacttcaagtggtctgactgccttagcctcccaaagtgctgggattacagacgtgagccaccatgcccggttcaacatgcagttttgtgtactgtttagggacagatgccgaagccacattgcttgggtttggatccatcctaccacataatatcatgtgaccttggacaaacaacttcacttctagtgctgtactttcttcatctataaaatgggcttacatcatagggtccttgtgaggattaacaaagttagaatgcgtagagcatgtagaacaatgcttggcacacagcatgccgtgcttcagtggtagcacttactattccattatactacagccaccgagaaggacaggtacacagtgaatagtttaggactgttcatgttcccggcctcttcactccaagagcatcagcaagtttagtttagaacataggagttgtatttacacagctactaatgaccttggaaaagttcttggcttctctgtccttgacctttgtttatctgaacgagtaaacttcagatgacagagtgtgtggggaatggaatgcatccgcatccttgataagctgccctagtggaatgttgccatgtggctactgagggtcaattcactggtcaaaggtggcctgctggttggtattttttctgtgtcttccgggcaagttctgtctttcctcagtctgcacatgcctgggtctgtcctcagagctctctcccatttccctcttctctagaaagcattgatataatggggccacctcttccttggactgtttctgtagcatcagaaggaggtgggtgggaatttggcataccactttttgaaaggtaatacattctaacatatgtatttcacccaccttcaaagagtaagaatacactgaatgatacttaattttaaagatgtgttgctgaggtgaactctaagacgaacaattcttcagaatcttttactttcttgggcttcttgtcccaaacaacaattatctttataaagcctgtgtgtgtatgtgtgcgtgtgtgtttgtgaaacttcctggaattggtagtgttgattttgagatgtttctttggcttattcaaaatataaacagaaaggctaaagtgtttttcatgtcattaagaatgtctttataagaaaggacattggccgggcgtggtggctctcgcctgtaatcccagcactttggcaggcccaggcgggtggatcacgaggtcaggagatcgagaccatcctggctaacacggggaaaccccatctctactaaaaatagaaagaaaaaaaaattagccgggcatggtggtgggcgcctgtagtcccagctactcgggaggctgaggcaggataatggtgtgaacccaggaggcggagcttgcagtgagctgagatcatgccactgcactccagcctgggcgacagagcgagactctgtctcaaaaaaaaaaaaaaaaaaaagagaaaggacattaagatgataccttaccttgtgtggggggcttgtagctttcaaaacacttaagtacccattttcttatgtgtgctttatgacatctctatgatgtaggcaaggcagggtttatcattatttcccttttagaaatggtggatctgtggttcagagaagtgaaataagttttcttaaagcagttctggatgcaaacccagaacatttgactctagggtgctttctgctccaccaccctgatttgattgtaaggaggtaattcttaccaagtactgtcagattatatagagttgtaatatatcttaaaaatgcccattttaattttctttaaacagatcagttaaaaagttaactgtgatttgataccatcttgtttctccccaagtttaaacagcaatgagtctctaggaccttcggttaaaccagcatgtgtttttcaaaaatcaaatgtcaaagcatttcgtgaaccttgctttaatgaacaagagaagtgaaggtacaattccttttttgcatgaggtaattaggaaacaggatgtgcaaacttgctatatgaatttaaagaggagcacttctactgatgtacaaactggatgggcatattacagagggtttcatgctggtagaaattttaagtgaaataagttctcattaagcatatcaattatttttggactgtgtgaaaacttaatctgtttcatgagttggatctaaggtggtcaatacctctacactccaaaaaacagaagcatgactcaaacatctagttctgattgcagagtgcctttatctggaagactggacatgtcgtcagaatatagagcaagagggatggaatatgctcttaagtttcctgatgacttaagggtctgcactatacttgcttgggaggtgggaaggattgaattctctttggaaaatgcctttgaatctcttacacacatggtacccaataagcctagtgctgtattattagcatcatgtactagagtatggtttacctgacataggttttggaaatctatttcttttatttacactacatggtttcttaggtggcaattctcagtgaattaccagcttcctgatagtgtcttgaaaagcatgctttataaggaggcagaaagtgtttctcttttgacagatgacctccttgaccccttgactttccatttttgatggtttcttttgaggtctacgtcatctggtaattttattggtgtgatttatgcccccagtaaggatcaacttgtatagattctacattctcatggaagtctatgtactgtctctactgtgtaataattagctccaactctacaaacaaggttagaaatgaaatcaccagcattacaagtgagacataacaaatggaagattcccttctctgagtttctctcataccgttaattttatttgagctggcattgactcattctatatgtctcttctgctagattttgaactctggaggactggtctcatatcttattaattataatggtggcgcacagcacattataggtatttattactaagtggttgggtttaatatcttaagaagcagaaaatgtggtttttcttgagagagagatggttttggatgttgttcctctagtatattctaagcctgcccgcctggggctctgtaactatggctcctaacgtggggagcccacaatctagctatatcatgttagcgagagctctttgtatactgaaacaataaacttaccatcttgatgagttttacatgtagaatggcttaggttataaggtactgccacctcattccactgttgagaattgtctaatgcaaagctcactttttaaacatggataattggacagtcatgagtggatcatcgaagggataagcaaaatatatgtcaaactgagaattaatatctatcaaaacacttgctattatttggtagatgggagattattttatttttaagaagtagattggctgaatggaaaagcaaaatgtggcataaaataaaatgggatattgttcagcagtgaaaggaataaagtactgatatggactacaacatggatgaaccttgaaaacattatggcaaagtgaaagaagccagttacaaggccgggcaccatggctcatgcttgtaatctcagcactttgggagaccgaggtgggtgaatcacttgaggtcaggagttcgagaccagtctggacaacatggtgaaacccccgtctctactaaaaatacaaaaatcagttgggcgtagtagtgtgtgcctgtaatcccagctactcaggatggtgaggcaggagaatggcttgaacccgggaggtggaggttgcagtgagccgagatctgccctccagcctgggtgacagagccaaactctgtcaaaaaaaaaaaaaaaaaaaaaaaaaagccagttatgaaagaccacatattatatgattccatttatgtgaaaagcccacaataggcaaatctatagagtctgtagcgatagaaagtagtggttgccggcagggttggggtagaggataggtagtgattgctaataactgtgagtttctttttgggatgctgaaaatgctctttatatggtggtgatgattgcacaacactgtgaaatactaaaaacagaaccgtaaactttaaatgggtgaattgtatgtaaattatatctcaataaacctgttttaaaaagtggatttccctttaatctattctctgaggattgcttcagggattcaaaatagtgcatagtgccaagttttaaactcatattgatttgtttttggtaaataagtcatgcatgcttaacaatggtgaacacacttaaggaaaaagtggtaacacaactagagccaccaaaccgaagcaagtatatttccacctaacttcatgcacgtttttttctcagaagctttaaaaatttatactttctcaaatgttgattaatgagatatctgataagaaataacagggtactgacagtcctgattgtataaataggcattagggattgtgttcatggtttgcttgtcagcacaagagaaatgtgtgattatgttgaatgatagttaattttcttatccacccattttaaaaataaagatgtacagctagaaaacaggtgcccagggaatagaggagacctgcagctttgataatgagccccagaaagaaactagaaggaacaagctcccgcttaggaggtgccgttcgagtcctggccagtgtctgactgtagctgatgggtttagagaactgtggctggcttctcacaaaggattttttcatttactcttgttttgtgtttgagtatagacagcttttcccatcctccatcagggtcattgtcccaccttctctgactcacttattgtgtcaacagaattaaaagagcagccggtggacgtgtgtagaggctgaaggagagctgtgttgctagctttgtatttgaacggttcgtacacaaacagttttctttgattaagtatccggtgaaaccaattcacatgaactccaattaaactttaatgaacaagtgggtgtattaatatcagctgagtaatgcaggcagcacagattccagtaagtgactcacttctctgagcagctcattccccatgcacggttagagttactagaaagcttccagctatatttgagtggatctggtctgggccttgtaattctaacaatcctcagggctcgctattcatctagtgacaaaaccacagtcatccagacctctgttttcagagcaaagattggggatgaagagttttgttcacattgagcaattaggcccttcgttgagcagtgaccatttggacttttattttcctcatcttcccatttttgtttttttgttattttattttttagagacagggtctcactctgtagcccaggctggagtgcagtggtgtgatcacagctcactgcagcctcagcctcttgggctcaagcaatcctcccgcctcagcctcccgagtaacctggaacaacaggcatgcaccactgtgcccacctacaaaatttctgtagagatggggtcttgctatgtcgcccagcttggtgttgaactcctgagctgaagtgagcctcagcctcccaaagcgcttggattatagatatgagccccgtgcccagcctttattttgtttttaagtgagaattatttttttcttaaacccaggggcagtgtaggtgaaggttaaggcagtgaagatagaacagtcagttttgaaatgcacatagccttcctgagcctcactttcaccacatctgccagtctgcctcaagtctttaagtttccctacaccagaggcagcaaggtgtgcctggaatgatgaattcctttgagcacagaccctgttccatctagagactgatgactgtacctatttcctaggaaaggttaagcaagatcgtgaatataatgctcttcgtttcatgccggcacataataagttcccactaaatgtttaacttggtccactgggggaaggatgagaaggaggatttggagataaatgagacttggcccttgacaattcaggagcttggagtcttatagagatttgacttaaaaatgtctgtgtaactccagagtgataaagacaaaaatgcttgaaaaagataagtgaggattcgggggatggaggaatcccagaggttggccccgtctgagaaggctggaggttagggtaggaagaggtaagggtttgggaaggtagttctaggctgactgaagagtgtgagcaaaagcagaggcagggatgtatccaggtatcagatagtgcacatttagtgtggttacagtaggtgataatttaggaggctgattgaaactgaatttagcctctgccttagtcaccaagtcctttcccagctccacttgctgttctctctctcattctctcctacctatattgaaaccagttgaaaataatggagtcacacagaggcagatggcaataatgtccaggttgtggaacattagctcattgggcttgctaatgcagcacccatgaatgaaatttaccctcttcctctcagatagctcctgcactcaataactcccatttagggcacactgtgcataaagctcccaaccatgaagagcagggaggatctgcctctaacagtcaggtaactcacaaagactggaaggaagtgactgggttacacatggccagtttcttctccaaactcaataattgggtaactctctgcctcctcatctgagaacaagggagtgggagggaggcaaacaagaaaagagaagaagcagtggagaaaggagacgttctgcagtgccaggcttcttgccccacactcttcccaaatgtcaacatagttcctttaggggaaaaaagtgggaggctagaatggtaggacagggccacaatatggaagtgaaaaaccaggggcagtttcctgagcagggaatgatgtcattcgatctataattcagtctggttaatctacttatgcaacaccaattgaaggacacacttagataactcagccttgagtcaacaaatcttgtgtaacactgccaaggtccatagtgcaagaatcagcccccacttcggaaataacaaccacccctcagtgccaaattttggacattgcttgtaaatttcagactccttccctccaagatactgttttagagaatgtcgtagggtaaaaaattccaaggggtaaagacataaattccgtaatactacaatagatgggaggctctaatcaagtagataaattctatttttggaattgtgaataaagcagaaaagattcttggaaatcaggaattgaatagattgatggtacaaatgagagactatatgttgcttaaagaaaacaaaagattgcctatcaggttttaaaatgtgagtcagtagtttatatagtgattcaagctgaacagctatcttggttattaactaaaatcttttctttccccttccattttatatatgaagaaactattaatacaaaagtcattatcaaaggacactggggctaggtttcattacccagcttaatccttaatttcatattgagcatttcatattgaagtgaaacaataaggatatgtttctagagactgatgagacaactgaattggacttggttttgacattcaaagggatcaggtagaggtacttagttgagctcactacttcattttggcaaaagacatatgtcatagaaatgtagtagccatgatggattatgtatctttgaattgggagcctatgacaaattttctccaatgggaagtttcttcagagcctatcattgtttcaacaataattaaagtaatttacagagaatgtgctcatctacttttacctactgttatcttttttccaagttaataaactgaatatattgtatagattggttgatagccttcctgaaatgaacatcctttgcaaacctatctctccaaacccaaatcctgcccaaatttcccaattgtggtagcaagcccaatgagctcctgatacgatcctaataggatcctcttctctggaaatcctcgacagatcacacttctcttttcttgggaacagctttctgtttccttgtccagaatggatgccgttctgttatcctggtcactctctgggccccctccctttgtccaccatgagcacaggctactggccactgatcctcctgggggcactagcctggctaccccattgcttattttacctttgcttctcttaaataccattgttggtgattgctccacacagcaattgttctcacctaagtctgtggataagactcacttagggaggttttaccagaattcagctcatctccctaaatgtttgggtctggactagggcacacacttctcgtgaggcgcttctcatgagtaccccttctcaaactttacgggtatcaatttacttatggcctgcagtgcataaagtgaaagctttctgaaaagacatttaatccatcggtatgaggatgaaaaagacacactcagggcatgaaaagagtgagaaggtcacaaaaagggtgtggtctcagctggagaggaagctgaacaatcctataaaggaacaaaagctcagnnnnnnnnnnnnnnnnnnnnnnnnnnnnnnnnnnnnnnnnnnnnnnnnnnnnnnnnnnnnnnnnnnnnnnnnnnnnnnnnnnnnnnnnnnnnnnnnnnnnnnnnnnnnnnnnnnnnnnnnnnnnnnnnnnnnnnnnnnnnnnatcttattctataggcttcagcctttttatgaagacctagcttctactcttgccccaggccctaagcaggcccagacttttcccatatacacacactctctctctaacttatgtgtcttacatcttaataaggcagcagattgtatcagaatcagttaactctttatcaaaaaacccagagcagacagacgggtgaacttgctcatgggctgagctagaagggaggccacttttccttcacacagcctcggactctccctgggcttttttgtgtgtgctgcgtggagactgtgttctaacatttcagtcatatcttccttattttaaaactacagaattgatcttaccaacttactggggagcacgtcgtcagtaaattctaatggaaaaacctgtctgatcaatgggacaggaaagcgtcacagcaataccggtgagtcattccaagaccaggcacatttgagctgtgttgcttcttcgatgctgactataattctccctcagcattacgtcgtcttaagcagcttttgaatcttcgtctctgattccctttctaggtcagactgtgtctttttttaaaattgtgcctggatatccccttaataggttggacaagtcccattaggataattggctgtatgaatatgcgaaaatagcaacagtgaattttaaagttcttgaatagtctccccgtcccactgtgaggtgaggcatctggggtgggctatctgttttttgattcttggttcttgtttttaaaaaaataggatgttggaccttgggatgagagggaagtaaaacagttttggaacccttttagaaagcaaactaagacaaaactcctttcttgagaaaaatggatggacattgtaaagaagacagtagggcaccaggaagccttgagccaggtctgcctgtgtcacatttcgagttatgagcttcaccgctctgctgtctgtctctggagatcatcatcaaacccctttctctgagttgttgaatggctcagatgagttaatgcctatgaaagtactctgtaaacagaaaaataccttcctatttgtaatctcaacaaagggacttttatcatccctaaaacagaacagacatttctttttcaattatgaaagttacatagactctttttaaaaagttaaatgcacaaaagtatgatgaaaattaaaataaccctaatgagtccatcatccagggacatcattgttctaatttaaacatttgggtaatctgttctctttttttaagaagggttgtgtgtgtttattttttttctttttttgtgtgtgtttgtgtatatctatgtgtatttttattctgttttctttacataacactgtattgtaaacattcccaaaatgtaaattttaatcattgcataatattgcattatctgatatatgcacatgcattttgagattttgtgacgaacgattgtgactattgtttccataattaagggttagctgcttaccaagaaaggaacttactttaaaacatggcaggcacacttggccattttttttttttttttttttttggcagtaaaggaatttgaagtatccagttttttaaataaattaatatgtattgaattggagtttagcagtacttttagttaagatctcagttaaggtaaaaaggtcagacctgtagagttattaatttgtagaaaattctgactacagcaaaacatattagcccaagttctctttattaataaaacattagttacagaaatactaaaaaatagattggttggtctcctgaatgtcctgcgttaggtaagttgccttatgccatctggaagacttttttattttctcttcatagaaggatacaatagatttgttttgctcaaagagttcattttctgttgctgggcacatatataatactgtaaacacatttctggatatgacgacataatgatgaagagagacctttgaatattttcttaaatgaagattgaaggagtagtaagctgtgagaggagatttttctactatttcagtcctaagattgatcttttttgtcatggatttatccctttgtctctatgcatttctatgtgtctgctcagcatcttatcttctacatttgccctagttccatccttccttttttccatgcttgtttttccatacacctgcccatccaccctcctgcctctctatccagtcgtccgtctaaccatttctggcaattcttacctccctgtttcatgtatatctctccatttttacctgtcatttatatttatctatttgcctatccatatctacacctgcttgtctgctcactgtctatctataaagttaatggagatgattttgatgaaaacttatgaatttctttattgcattttacactgtgggttacaggggccaaaggccatggggaccagaaagtggaaataaccagagctcggccatttttgtttcatttcaaaatcaggagggaaggtcagaactaacctgattatcctttctgtgatgctaatcaggatgttcttagtataatgccttttggagactgttattttaaggaatgttttgctaagaatcagttgccaggacatagaatgaagagctattgtatagcttcagagtagttctcttttaagaaggatataataaattaaaaataattttcttgaggtcagactaaggaaaagtcaaagatatacaattgccatctctccaaatttattgattttatttatttattatttattattattattatttgagacagagtctcactttgttacccaggctggagtgcagtggcacgatcataattcactgcagcctcaatgtcctggagtcactgaagcctctcaagtaccttggactacagttgtgtgccacaatgcccagctaattttttttgtactttttttaaagacagtattttgccatgttgcccaggctggtgttgaactcccgggctcaaactatctgcttgccttggcctcccaaagtgctgggattataagtgttagccactgtacccagcccaatttactgacttaaaaaaaaagaaaaaaaaaacaacaacccagaacatattgtaacattcttcagggagtttagagacaacataatgaaggtattttcaaggtttggggagnnnnnnnnnnnnnnnnnnnnnnnnnnnnnnnnnnnnnnnnnnnnnnnnnnnnnnnnnnnnnnnnnnnnnnnnnnnnnnnnnnnnnnnnnnnnnnnnnnnnnnnnnnnnnnnnnnnnnnnnnnnnnnnnnnnnnnnnnnnnnnnnnnnnnnnnnnnnnnnnnnnnnnnnnnnnnnnnnnnnnnnnnnnnnnnnnnnnnnnnnnnncatcctttactgaaaaccatttttcttctgattctgagaaagctgctttgcatttactctctcgtttaattctcccatccttccttcaatgtaatttctattatcccaatttataactaagaaacagagactcaaagaggctaaatgatttgcctaagtttacatgattaatgagtgccacagtttttgtggaacagagacttgtttgaatctaaaactgttactctttgcagtaaaccacaatgaaaccttagctatatatcagttctccactttaaattttatggtaactcaacctctgaaaaggatcctgcaaatagcacagttttcagttcttttcttgagagaaggcagggctttcatatggacatgataaagaagacagctcttaggatgtggatataagattgcatttatgaactttactttagtatttgacagaatggggttttcctcacatgctgctgtgtgtttttgtttaacctaatctgagtctcattaggcagcttgatccagaagacagaaaggtctcctccacaagatgcaccttatgaagcaaacaaaccaatgaaatgcagtaactcccttcaaacttttgtaagctctggaaagccagaaaagacagctattgtaatatattttgccaggccagctgttatcatcacaaacaagcctgaaatagcaatgacttttgaaatcacagcacatttatttacttcttaacttttccataggtttgaaagcttgctccctccctttttatcatgctaaactgtagttgctaacaacattctattctgggtgggaattagctttggcataattaagaatggagatgggggtggataaaagaggttctgccaaaggacttgtcttatatgattttattcttacttttaatctgttttattctttaagcatgtattaactgcctactacgtactcaacactgtgctatgtgggaaaaatatactagaacaagggatggtcaactttttctgtaaagggacagatggtacacagcttagatttgtggtccataaggtgtctgttgtagctactcactctgctcttagataatacacgaaacactcaagactccaccataaacaatacataaataattgcgtgtgaatatgttccaataaacttttattcacaaaaacatgcagtaggctggatttggtctgcgtgccacaggttgccagcacctgtactaaaatgtccctgaaaatagagaactttgttttgttcattggctgtgtcaccagtgcctagagtagtacctggcatgggataggtgaccagtaaatatttgttgaatgaatgaacttataaatgaatgaatgactcagactccttctctgatctcttctatacttaaagagagtacaaagaactgtgggaggtaaaaggtactttcctggaagagagagtgtggagggtcatggaatcagttggtatttgagctggaccctgaagaataggtaagtatatgtcaccagcggtggtaggagaagcacactgcaggtaggagaaacatgcaaataggataagaagcagggcacttatggtgaataatgaggagatcagatgttttataacaggagtttcctgacttgcttgatcttcaaaatcacctgttattaaaaataggttcccagtaccctccctggagattctgattttgtaagacagggttggccaatgataatttacaaaataaatatttgaaaaggtgtatggctttggaaagttatactggaaccatttctaatgggaaataaagttctcacttttcttagtaaaaggactagtatcaactagtaattgctggacctataattaccctataccttctgtgccatagaatggaggaagtgccctggcggaaatctaccctacttaactgcctgtcttcatacgtcccctgttgatgttgtaggagtaccccagcctttatgatggaacagtgtgtaatttagtcagtaaattgtagtcatataaattataataaatgtatcaaatttgtagctactagctttgttgcttttgaatttctgggttggcaaacctctcagagggcaaatagatttaaatggcgtaatagaaaatttgcattctcttgctgtacctccaattcagagtgtagtgtaatgcccagatttgtttgtagactaagatcactggaagggctgtatagtttaagcctcttttttaataatggggggaaatctgaagcctaaaaggtgggcagggacttgctcaagttctgtcaccaaattattttggcagaaccaggagtataatgcgaatgttaagttactaaatttagttttcttttcatggtgccatgccacatgtatcaataaagttcctaatttacatactttctctcccctttaaatctcatagctttttgctcatatacctcttgtgtactgcttaccataaagttatatcttaatatcttatcctgaacgagtagcccactgttatcccaaataaaggctgagctctgtttccctggagagcttaacatatttcctggcacttagcatgtgttcagcaaataattgtagacttgaaatatcttgagcatcttttcttttcccatgtgttttgactcaagttcctttgcagttatattgtcagaaaagtcaagctcttccagaattgctgaaatacaaagataatttctcttaagcttccttaaaaaagttgaattccctattatggctgagacctttcttaacagctcttctgatagttaaatgtcagttgcttcaaaaaagaaatgtcattaaattatcagggaaataaattacatatttatttgggctgaaatattttaattgaccacttaaaataaagataatagcaaaagactgatacatttcctagcttgcacatttctctcaattgccaggacttttttgtttatatctcttaggagatttcatttttatttcttctgcattatggttatatatgtgcttttgactctcccagtgggtgataagttctttgaagtcaatgtacttaaaaaaattaatctctatatacccacaaagcctagctctgtaggagctaaatactaaatatatttactttaaaaaaattgttaggaaaaggtcagtgttaccttgatttcagtgttattttgcagccctcaagtcaacaaccattttactgaacatccagctttgtgcctttctgtgagcttaacattggtagcaggtgtggattgggacataaaaaagtaaataaaacatagttaagttgacataacccataagtataatgtgatgtggaaatctgagataggtacaaataacctgtactagaatctggaggcaggttaattctgacaaggtgagtccagagaggctcacaaagtgtcaatatttgagatgagttttactgggtcttggtcttctatttcagttgctggttttgatttttctcaacgcaacacacacacaaacacacagatacacacacacacgcaaagtgatttgttttctttttataatctctttgactatagacttaagagaactgcctttatgtaagattaaaggaaaagaggagcaggttttattgtgttatttgaaggtttttcagagtctgaaacacacagcgaccgaaagtatttgggatggatgatgccagtagtgtcatgaaacaaagtacgttggccagagagagacatatactattgtaaattaacggtgttcttttccaaggattttctcgtttacctgttgttgtcttcaatagtttaattacactaaatattctcgttggtgcggggagcatagtatggtggaggaagtttcaactttgaagtcagacagttctgtttctgtacctaacttttcacttattgtatatgtgactgaaggctgttgcttatcctctctagggttgtttcttcatccttgaaaaatgttgtgttttctttttcttttcttttattttttttgagacgtagtctcactctttcacctaggttggagtgcagtggcgtgatctcggtttactgcaacctgtgcctcctgagttcaagcgattctcctgcctcagcctcccaagtagctgggattgcaggcgtgcaccaccatgtccagctaatttttttttttttttgtatttttagtagagacggggtttcaccatgttggtcaggctgggcttgaactcctgacctcaaatgatccacccaccatgccctcccaaagtgttgggattacaggtgtgagccaccgtgcctggcctgaaaattgtgatcatggaaagtacctcacagaattgtgggatgaatggagctaatgtttgcaaagctcctatttcagtgtccaggatatgttaggccatatgcctacagagtcaggcacattttcttgaaacacaaagccctttatctagcttaacctcttcccactttagagtcgtgggtgcaggaaatattttgttttcctctttaccgtaaggaaagtaacagtgctagtgtgttgttgaaatgccatgctctgggcatgtgtttggggagagagatgcagtgcgtggtggggaatgggaggtgctcaagagggcatcctctctgaaaggggtgacagccgcttggcgctagctaattattgccacgtggagatgcatcattgccagatttttatgtaaactctttggtttttaaaatgttggcagctcattcaagtatttttaaagcactatgagagatacttcctcatggaagaagaaaaatgcaacttacaatcttactcagtagcatcaactttggctcaaaacaacaacaaagcacgttgtaagtccacactgcaaatggcaaacagaacccgtctaaggaccagatttggcctgcagccctcaatttgcatcttctgtgcatatttttaactggtagagataacagtaaatgatggcaaaacttactgagtcctttgcatgtgctagaaactttgctatactttgcatatatcattcaattctcacaataacccaaagaggtgtctattactattattatcccattttacagacgtgagcattgaggctcaaggaaatgaagtatctttcctgaggtcacacagatgaaatgtgacaggtagctttgaaaccaaagcctgttctcttttaaaatcatacataccagtggatctcagtcctggtggtatgttagaatgattggcgtgcccttaaaaacagtgttgtccaaagtccacccccaagctcattaaatcagaatatctgtgggtgggactcagacgtggctgttttttcgaaagcctcaaatcaatgattagaaatagctgtaagatagataaaatttgtgcctccacatctggcactacctatctcctgtactctattttatttttgagtatttattgttctctgaaaattatgtgcatctttacctgtttatgaattttctacttttaccacactgggatgtaagctccgtgagcgccaggatttagtctttttaagttgtttgttgtatccccacctaggtcagtgcctggcacataatagatgctcagtaagtatttacttgaatgaataactggttcttcatcacagggagcttacactctagtgagggagatagataatacattcttagtcctatgagataagctcataactgggatgttcaatatgactttattaacacagggaatacagctgattatctcttagacattgttaggataaattgtttctatacgtattgaatggactgtggggcatttttggtcacctgcactactacactggatccattctgtgctctgggctgtaagtgtgtgtgtgtgtctgtgcgtgtgtgtaatttcgggaacgggtaacacattcgtattacctctgtttggacacgatttttagtgacagagctaggaataacaggtggaaccttctaagttttgttgcttaaatatcaggccccctcagaattcaggactgatggtagaggatttaccagtttacagggaattcagatattctcttctctttctaggaaagccaaattgttggtcattctgcccccaacatttacagaagcagtttctcggttttatttatccaagattcttatgatgaatagtgttaatatcgcagcacactatgggctgtgatatgcctatatcacagagaaggcaagctgtggtgaagtggaataaatgaaaaactgtctataactctgcttctagatgccccacttaagcaagtaaatgggaatgtgagtgacaatatcatagggataaccttgaaagagtgctagtttttaaacaaaaacaaatcatttggaacgttaggatttaaacagttactgataataaattgcttgtgacacatctgaaaattgatggatcatagtgatagtgaaaatatttaacaactgctatggcccaggcaccgaacaatcgaaaccaactccagtgtaaacagtggtgccatcaagtatgcgctggttgtcagccttgctggtggagtcattgtgtcacgatgaagcaactaagagccagtgctgcacaaagtgttgagagaaacaaacaaaatccagggtgctccccttatgcggagtagagagtagatagagccttgtttcagaacgataaaacttcggtcaaggacttgatcttcccacttattgctgggggctccagggcaaatcatttgttctttctgagcctgagttgttgtttcttcttgttcttcttgttcttgttcttgttctcgttctcgttctccttctcctactccttctccttcttcttcgtcttcttcttcttactctcctcctcctcctccttctcccttctcccttctcctttctccttctcctcctaccctctcccttctgcccttctcctttctccttctcctcctccctnnnnnnnnnnnnnnnnnnnntcctttttccttttcctcctccctctcctttttccttttcctttctccttctcctcctccctcctctccttctccttcttctttttcttcttcttcttttttttttttttttttgatatggagtctcactctgttgcccaggctggagtgtagtggtgcaatccctgctcctgcatcctctgcctcccaggttcaagcgattctcctgccttagcctcctcagtatctgggattatagacgtgcatgaccatgctcagctaatttttgtatttttagcagagatggggtttcaccatattggccaggctggtcttgaactcctgacctcaggtgatccacctgccttgccctcccaaagtgctgggattacagtcatgagccaccgcacctgtccagagcctgcgtttcttctaatatacagtggaggagagtaatttttgcattacctactttgcaggctctggagttagattgagcgcacctgaagctaaggttaaagatgatggctatgggcatgatgacagtaattgttcttctctggttggggactgattgatgatccctgatttctctgtttaaacgttgcccaaaacaaaggttgagaggtccttaggggagaggcgagataagcagaggtaggacttgcctttcttctgtgcttctccagaattagttgtgtcctgtggcatccacagacaaaaattgagcaatctccttcatagttgagttgagattgtataattcgataaaataggtttaaatagccttatgcctgtataatattcatgaaaagtgtcatgagtgaggtggcttgcttgttttgaaaatgggctgattttgacaaaggggaaaaatcgggattcatttactgtaagttgaaagtaagaaacaacaaagttgaatattagaagaacttggctatcgcaaaaaccacatactttcacatcagtaaaacatggagttctgatctgagtgaaatgtgaaacttcttgcagaccacagagagtaaaaaggagtacttttgtttcattattaataccattgtccttatttctttaaatgagaattgataatacccataacagaatctttcacacaggccaaaaacaggaaaggataaattaaacaaaacaaacaaacacccaaaacctcaccaccaccaccatgactgccaacaaaacccagtgctgtgaggatgcatcagctttaagatctctttaagtcattgtgttctagagaaaggggttctttatttgtttctatcaggatagagtgagtttttgttaaagttgtctttcttttttttttttttttcttcttctggaagactgacgaagttggccttttgggatattacaagaaagataactttgtcttctaatgtctgcagtgatatgaggcaggtgactgtgtgtattctgtggtgatccatgttcacaaggagagacaggccaaggatgcccggttgatgagtgcgctataggtgcttgggagtgagaaggcaagaaagcaaagtgaacttaaaaaatagctagccagtggaattgagggagaaatgctcattctttgctgacacatgaaataattgttgagggagagttgctcaatctttgcctacacattgaaataattgtgttgaagagtctatgaaaagggggtcaatagatttgagttttcatcactttggccaccacctaattatagatggcctccactgtgaaatatgtgagttgaaatagatttttttaaaattcattttctggactggcatttagaatttgagtttattcaatccttgcttcttgggcagttagggtgtcaatggcaataggaagggtagctgaggccagagtggtgggggtagatgttgggtggaatgtgtgtggttgagcagagcattattattattgctattattattttttaaaagaatccttatagtaaagagagccaacattgattgaatatatgttccttgccagaacttgggctaagtgctttattataagttatcttatttaattttcacagagacctgttgaagtgtaagttttagctttctgtttcacagctgtggaaactgaggtgctgaaaggatgaagaacttccaaaaagtcgaagatattaagcagctgtattagtcttcagatcctgatatctttctcatagttattctgatatgccgtattaagttgcagaattgaggccgggtgcagtggccccaatttttattttttagttattcttattttctaattattttatatgctctctctctctctctctctgtctactgtcaaatcccggcactatgggagtctgcagtgggaggatctcttgatgccaggagtttgagaccagactgggcaacatagtgagaccccatttctacaaaaaaatgaaataaaacaattagttggtcatgatggtgtacacctgtagtcctagctactcaggaggctgaggcaggaacattgcttgagagttcaaggctgcagtgagctatgattgtgctgctatactccagcttggataatggagcgagaccctatctctaaactaaactaaactaaactaaactaaactaaactaaactaaactaaactaaactaaaagtaagataaaataaacttacggagttggaacattgcaggctatctatctggcttccctgccctgaattcatcgttctctttgatgtgctattgtccaacatttctttttttttctgtttttttctgttttctgtcttgctgtcacccaggcttgagtgcagtggcctgatgttggctcactgcaacctccatgtcccgaattcaagcgattctcctgcctcagccttctgagtagctgggattacaggcacccgctgctatgcccggctaatttttgtatttttagtagagacagagtttcaccatattggccaggctggtctcgaactcctgagctcagatgattctcctgcctcgacttcccaaagtgctgggattacaggtgtgagccaccgcaccaggcctttccaacatttctttaaagaaactaaaaattaatttgaataagtaacacaaaaatatagtttaaactatagtataaaattcaaaactatgcaatgacaagtacatctttattttatctctttacttctcccacccagaggaaagtataagttctttatatatccttttagaaataaactgggtataaataagcatgtgtatacacacacacacagaaacacacacacaaacacacacagatatgtatttatattccagtgtatataaatacatttatatacatgccatttatatacacatttgcatttctgttattagcgactctaaacaccatttgaaatgagccgtacccatttgtaattccgttttctgaactgtccttcacttccttttccattggattgctgaatttttgcttattgatttattacagttaagaaaattaacttgtagtctgtgacaggaattgtaatgctttaccattttgcatttcttttttaacttgcagattaaaataaaaagttttatatagttaatccttttttgattttatgtttctttgattttgtgtgatgcctagaaatgccttccccactttgtgatatttaaaaagaaatttccaatttttcttctagttatttcttctgctctttctcaaatctttgaaccattgaaattttattttggtaaaaaatgtgaggttaggatttattttgatatttttctggatctgcatttctaaacactgtttattgaggagtccatctctttcacactgatttgaaaagctacctttattgtatattaaatttcttaatacttaagtatttaatacttaagaacaccgtggaatactatgcagccataataaaggatgagttcatgtnnnnnnnnnnnnnnnnnnnnnnnnnnnnnnnnnnnnnnnnnnnnnnnnnnnnnnnnnnnnnnnnnnnnnnnnnnnnnnnnnnnnnnnnnnnnnnnnnnnnnnnnnnnnnnnnnnnnnnnnnnnnnnnnnnnnnnnnnnnnnnnnnnnnnnnnnnnnnnnnnnnnnnnnnnnnnnnnnnnnnnnnnnnnnnnnnnnnnnnnnnnnnnnnnnnnnnnnnnnnnnnnnnnnnnnnnnnnnnnnnnnnnnnnnnnnnnnnnnnnnnnnnnnnnnnnnnnnnnnnnnnnnnnnnnnnnnnnnnnnnnnnnnnnnnnnnnnnnnnnnnnnnnnnnnnnnnnnnnnnnnnnnnnnnnnnnnnnnnnnnnnnnnnnnnnnnnnnnnnnnnnnnnnnnnnnnnnnnnnnnnnnnnnnnnnnnnnnnnnnnnnnnnnnnnnnnnnnnnnnnnnnnnnnnnnnnnnnnnnnnnnnnnnnnnnnnnnnnnnnnnnnnnnnnnnnnnnnnnnnnnnnnnnnnnnnnnnnnnnnnnnnnnnnnnnnnnnnnnnnnnnnnnnnnnnnnnnnnnnnnnnnnnnnnnnnnnnnnnnnnnnnnnnnnnnnnnnnnnnnnnnnnnnnnnnnnnnnnnnnnnnnnnnnnnnnnnnnnnnnnnnnnnnnnnnnnnnnnnnnnnnnnnnnnnnnnnnnnnnnnnnnnnnnnnnnnnnnnnnnnnnnnnnnnnnnnnnnnnnnnnnnnnnnnnnnnnnnnnnnnnnnnnnnnnnnnnnnnnnnnnnnnnnnnnnnnnnnnnnnnnnnnnnnnnnnnnnnnnnnnnnnnnnnnnnnnnnnnnnnnnnnnnnnnnnnnnnnnnnnnnnnnnnnnnnnnnnnnnnnnnnnnnnnnnnnnnnnnnnnnnnnnnnnnnnnnnnnnnnnnnnnnnnnnnnnnnnnnnnnnnnnnnnnnnnnnnnnnnnnnnnnnnnnnnnnnnnnnnnnnnnnnnnnnnnnnnnnnnnnnnnnnnnnnnnnnnnnnnnnnnnnnnnnnnnnnnnnnnnnnnnnnnnnnnnnnnnnnnnnnnnnnnnnnnnnnnnnnnnnnnnnnnnnnnnnnnnnnnnnnnnnnnnnnnnnnnnnnnnnnnnnnnnnnnnnnnnnnnnnnnnnnnnnnnnnnnnnnnnnnnnnnnnnnnnnnnnnnnnnnnnnnnnnnnnnnnnnnnnnnnnnnnnnnnnnnnnnnnnnnnnnnnnnnnnnnnnnnnnnnnnnnnnnnnnnnnnnnnnnnnnnnnnnnnnnnnnnnnnnnnnnnnnnnnnnnnnnnnnnnnnnnnnnnnnnnnnnnnnnnnnnnnnnnnnnnnnnnnnatgggaatgctcataatgttccctgttactagtgacattggctttcgatttgagaaatgtattgtgttgaaaagtatccacacttattttgatagtgttgttattgttgttgttttaattgagactggttgttaaaaggttatctagcttttttttttaaagaaactttgaaagtaatcatatattctaaaaaaattttatgtttttctcttttgtcctgtaaatttgctgtaatatatgaataaaattttcaaatatgaaatcttgttagtattcttgctaaaataattatcaacttgttcattgtttctgtattatatatttttagtgttgctagatcctagagatcattaatatattaatgatctgtgcttcaattttcataagtgagattatttgaaaattctgtgtgtgtgtgtgtgtgatcgagaccatcctgaccaaaatagtgaaatctcgtctctaatgaaaatacaaaaattagctgggcatggtgtcatgcgcctgtaatcccagctactcgggaggctgaggcaggaggatcgcttgaacccgggaggcagagtttgcagtgagtgagattgcgcccctgactccagcctggcgacagagagagactccatctcaaaataaacaaacaaacaaacaaggaagcctttcttttttctttattttgaaatagtttgataacatttacatgggttatttctttaaaatatggtagaattcccttgtgaaaataccttcacttattgccttttttggagtgaagaacggagtgaagaaagttatttctttaaaatatggtagaattcccttgtgaaaataccttcacttattgccttttttggagtgaagaatgtgtttgctctttaaaattttttacattttttttctgtagtaattggactaattagcttttatatctattctgtgattacctttgttaaattatagtttttttagggaagtcacctatttcaaattcatttgcatggtgtaaaataatttctcatgattattttcatttcctctgtatttatggttatatttcacattattatttaaagttttatggatttctgctatgtgtatccatctttctggctaaagcatcagagtttaatttattatttatttaaaaaatagcttttgcatttatgtgttggctctaccactttgtaattctttattttctctttaaaatcttcaataataccttctactttttctaggtttattttgttgtttttctcattgtttgaacttggctcttaatttccatatttttatttctgcttttttattcatataaataagatataaattttcctgtaagagatgcttatttgtatgccttaagttttgctaaatagtgtttttaatcttattttttagttatttgactatgcacaggttcttaaaatcccagacccattagaatgtaagctttgtagggacaggaaccttgtctgtttatttattttgggtctaccgttgtgcctgtcatatatttcttaagcacttgctaatgtgcttaagaaatgcttttgtgtgaataaataaatctccagggaattatggaatttgtggctgattcagtcctgtaactctagttcgtttctgcctcatttggatattctctctaggtatctactaatgtgtaggaataagaacatattagacatgcttcaaattacctttttaggtcatgatattaatagatttattttaaaagtctacatagtttttctcaaatcaagtatacctgggtaaaaatgtctttctaaagattagcctgtctgggcgcggtggcttacgcctataatcccagcactttgggaggccgaggcaggcagatcacctgaggtcaggagtttaagaccagcttggccaacatggtgaaacctgatctctactaaaaaaatacaaaaaaaccagccaggcatggtggcaggcacctgtaatcccagctactccggaggctgaggtaggagaatcatttgaactcaggaggcggaggttgcagtgagccaggatcgtgccattgcactccagcctggacgaaaagagtgaaactctgtctcaaaaaaacaaaacaaaacaaaaaaaagattagcccaatctatttctagctacttgggagattgaggcaggaggatcacttgagcctagaagtttgaggttacagtgtgctatgatcatgctacttcactccagcctgggtgactgaccaagaccctactggaagaaaaaaaaaataagaattgctcaagaaaaaatacagttgagtagaattagaatgctagcagtgttgcaatagcagagatcacatgatgcccatgatgtttgtgaccttggacactttaggctaaattttgcacagaagcccaagtccaggatagaaatgataacgatgaacctgctgtagtgcagggaaagatgcagagctgggggggagcccaaacccctactgatggccactttttcttctgacctcttcctatgtctcatttaaaaaccagtagctttacttcgaaaactcaattttcagatgagaatcaaaacaaaaatgcaaagaaggcaaatgattcataaaagttgctgagtgaattagaactataatgtgggacaaacactccgcctttctgtctctgcagctagtggtatttccaggttcccagggaacctcctgtcccttgctccactgtgcatttttagatggacctgatatttggttacctcccttgacaggcccaacaatccttgctaaggcacagacttgtgtatttgctgatccctgaggggaaagctgtgattcaggctctgaagtctaagaattgcagacttagtttcttgtctcccgatgaaactgctaatctgggtgccaatggtgtttctgctacatggacacctgcccacacagcatgattagaaattataatgatgacgacgatgagtcttccaggacacccacgttctttgcaagatatttctgctaatcgtttctaccagaatcagttggaaaacttttttttttaagttttttttttttctctgtatctaagtcaaccaaaaatgctggtctaattcaggtatagattaaaggtttgtcctcaccattaatggtgtgttattattcatgcagggcatcctagaaccttgggcacatagtgtaatggaaagcacgctgggccagggagatgtggattcaggcttgagcagtgccaaaaattttcgttatggccttggtaaaggtgatttcccatctctgtgactttgtgtctccttctgttaaatgggcattcaaatcttttgtacctaacttattagggccctgataatcaaattagccaataagtaagaaaatgttttcttaaccacactgtaaattaagaggattcatattgaaatcacttttccattattgctgtcttagcctgctaaagttatatttagtgtagtgcaactaagcagggttgtgagagctgggaaggtagactgttgtattgggcagggtcagggcagataaaggaccaaaataatgcctgaaatgctgtattaacctgctctaccttgaactgctgtcttgaattggggggaaaaaatgaagctctgaggggatggtgcacagggagaaaagagagaatctcaggaattgaaagtctcaatggagaagaggtgggagaagaataggaggctagagtgagggcatgtgatcgtggagtaccgatctggagacaagagaagaaagtagaaaaatgccagcactgtctttggaccctgtgtatctggagtgtgggaggacaggcagacacaaatagagaggctctagggaaaacagcattctcatagaagatccttctccacaaaaagccctccaaatgtcctccaggagggtagaagctggttttaaagctcctcagggtcaggaagatccttctcttatttttctttgcatcgtgcagtttaatttagcacagtactttgctcacagcacttaaaaaattattctgggccttgctttttaattttaggcccaaatacctgaaaaaatgttcaggaggaattctgataagaaagagctaacttaggcaattccatttctttttttggttcactgtttcctcatctgaaaagtgttgggctccatgacgtggtttctatgacactcagtacctttgttgaagagaaaacatttttctaaaactaggatttccaaaaaaacaacaacaaaaaaaagaaaaacaaaactcatgaatatgtggatatttttgtgatagtgatgaaggtttgggaatggagtagaatgtttcctaaagtccttttcttttagcagaagacttgagtttgtaaactcggctcatataatttcagcttgcctgtctaccttccttccatctacctacctacctacttacataagtacctacttatatatggagaacacggtggaatttaatttttcttattcttttcgactttggttggcttggtgaatcaagtaaactgtgttgaagaaaaactaacttttgagggaaaaaattgaaaaaaaattatgattcttttttttttttttttgagacggagtctcgctctgtcgcccaggctggagtgcagtggcgcgatctcggctcactgcaagctccgcctcccgggttcacgccattctcctgcctcagcctcccaagtagctgggactacaggcgcccgccactacgcccggctaattttttgtatttttagtagagacggggtttcaccgttttagccgggatggtctcgatctcctgacctcgtgatccgcccgcctcggcctcccgaagtgctgggattacaggcgtgagccaccgcgcccggccaaaaattatgattctttgaaaaggatttttctcaggttagtttatatagtttcacagatgcttgagataaggattagaaagttcagacactgaatctccacagacccctgtgaatgtgttggctaagcaccttgtcttctcaggaacacacactggaacagactttctttcagtaaaacagggccagaatagtctttgaaacatccaacggtggtttgggaagaggattctctatataatgcctgtccaaatacagaataaaaattttcaacaattagcaaaaatgtggatttttcagttaccaattccttatttggcacagttggtctttctcatcttattcattcattcatttatttcattttatttatttacttttaaaatacttgtttaattcacctttcttgctcccattgagccttttaactaatcaaatgcatttgaaatgctattaatttatgataacagtaagacccaagacatcactttatgtaatatcttgtattgtagttcattgttgtcagctctttttctgatggggttttgatttagctggaggcagtttaagggtgttcattccccaataatgtttgtctgttgaagctggtgagctagactaacagtacaaagagttcctgtgtacccttcacccagctttccctgatgttaacatcttatataaccaaagtatgtttaagcaaagaaattatcattggtgtaacatgactaaagaagtgattatatcttttattggcagttttccagtttttccactaatgcctttcgtttttttcctagatctagtttaggatgctgctgtgcatttagtcatcctgtcttctttgtctcctcctgactgtggctatttctcagcctttccctgtttttaggaccttgacacttttttagtgtaacggtcaggtattttgaagaatgagtgtcttgcaacttgagtctgactgatgctttctcatgattaaattggggttttagatttctgggaagaccaccacagaggtgaagtacgcttctcattgcttcatatcacagcgtacatgatgttaatgtgagttattactggtgatgttaattgtgatagtggccagttttgttttattttattttttaatagaagaccagttgtctgggactatacacactccaacacatttgcaaattggtggcaatgattattgactagtcctcaaactactaacttcatgataatggaaagccgaaactcccaaatcacatggacctcaaagttcaattagaaaatttggttaggacctgacgacaatgttgcgatttgctacagcctgccctgcagtctcaactctggggtcccctcagtggtgagctcagtcacagtgctgcttctgtgtatacttacccagtaaacaacccaggcattggggcctgtctcagaaaccacatctccaatagaaaggagaacacttgggaaagcaggaaggagtaagaaacggaactcgcccattcctgacaactaatccttttcctttctaagtatggcttagtggatgtcagccattcactgttcaggacaggatagggatgaggagagaattctttttcatttgacaaggacattgaattttccttatccatggatcaagactagaaggtatggagaggaaaagggcttctcatctctttctttcagtagcttcatgcactgatgcatcgtacttactgaatgttttaccttctctgtgctcttctcagaggatgcacagaggattgggaagaggaagtattggtgacttgatctagaaaaaagagattgtttcaagccacaaaaagtttgagggtaaaatctcaagtcctgtgtgtgatgaatcagtagaaaaggtatcccagtggccagtgtgagtaagctgtcatattttcggtagtaatccttggtcctgtttgattttcctcatcctcacatataagatggagccatttctccctctggcgtttgccatcacagcgtcctgcagtctcttggtcttgagatagaaggttgagagaaacactttgcagtattgggagaactgggtctgcctgtgggagtacttgtatctcaatcaatattacagaacttggctccttgtttccaacaaatgttttgctctgttctcatcctgggagttgaaggttgaggcgaggtgggagatgtgctgtataatatggcagccactaaccacatgtggctgttgagcacttgaaaggtggctagtgccacatgttgaaaaataatattttggatatatttgtaaaataatttttttcaatgagccttttgaaatgtggctactagaaaattttaaatggtgtatgtggctcctatgataattctattggatggtgctggcttagagcctgggaagaacatggatcagagtcaattgaccttgtgttctcccctgagttctaataatattgtcattaaaaggagaagcttcaacagccataattttcattttaaaaagtctaattcagaagaattggctcattttatattattgcttggactggagaaaaatctgacatttggtattttcataattgagaacataacttgctgacttaaaaaaaaaatcacaacattttgtgcttggccttaggtaccagcctttgagctctttgaaaatagggattgggtctttttctctttctaccatcctttttcccccaaaaccacacactaacacgtagaagatggttaactggcatttgttgaaaaccaaaataactttaaatagagaaaactttgtgaagctaccttgtatttatggttggaagagtgaaatacctttataaggcatcccattttcttaagatagccagcaaaaatgaagaacattgatccaagtgtttatttacttattgatttaattaccattctcatcaggtgtccctgtcatctcagcttatgataaggaatcttttcaagatgcttcacctcatcactctctaggtaaagggggacagaaaaggatgctgcttacatatacgaatccccatctttgctcagatattatgtctaagggcctaaggactggataatcttattttttctgtggcttgatcctttccaacatttaatctatggaggttgtgaggataacaatgaaaaggcaagtttaagcttggactgtagatacttttcactgggtggttttattttattatgcttcattgtgaaccagagcctctgtgaacatatgacttataggccctcaggcttccactgtgtccctttccctgattcgtccttcttcactgcatgccctggtgttgggtgagggagcaggctttatgtgatgtcattttctcagagccctgagctgggaaattcaagagtctccatgattcctagttagccatggaagagaccctaactggtccctcaggaacatgtttggttggtcagaggtaactcttatagaatctatgatggcttagtcgttcactcttcctagaaaagacctctttaaaaaggccttttggttatatacggcctgagttttaagtaatatttgcaatgttgattctctggtagaagagaatgaaaagttgtgagtgctcttggaagagtgccggacagctgtagtgatgggaaaagtattggccttggagtcagacctgtgtttacttcctggctctgctattttctagttgtatgactctatgcaagtaacttctcatctctgagcattaatttcttcacctgttcgacatagacaatgtctgcctcacaaagttgtgatatgttaatgtatgtgggatacctatctcaggacccaatacttagtctttataaaacactaaatgaattggttttctcatgtatgtcttatggttttgctggtgatggaccaataatcatcttccatcttcactttagaggtgggggaaaagggcattagagtgattgtgtggtaaaatccactctaattctagctgtgagaaaaagagcagtgaaaatgtggtaagcaagtgcttctaaaaagcttggactaaaagcgcttgatggatttgtgctggcttcccggtagactcatctctgtactgcccgcacagcacaattaattgttgttactagagaaggaacaaataaagaaaagagagagagcagacataaaaacatcctttcatctttctgaagacagtcccctttgtcagatcagtggagctgtacctgtgaatcaccttgggaaagcacagtgtgggtaactagaaggaaggtcttgtggctcattttgtacccacttcctgggctggggaaatatctaaactaacctttcttacttgtcaatatctactaccgttcaccatgcatcttcacagatgagggcctctttctcacatcttcactccaaacacattactgtgtagacagccacttattttctgggaagaaaactttgcaaagcagtagcagaataaagtcgagggtaaacagaggccatggaaaagcactagagtttgagtgcagagacatgagtctgagcatgagcagtgaatagctcatgaaacactcaagttgcattctccttatgtggaaataaaataagtcatggttgttctatgcacgtggcacctgaccttgggtccttattgctatgctgctagagtctatgaatcaagatttgccagttgtgatcttgaaatttagtcagattaaaagggaactctgactttgagggtgaatgccccaagtgggcatcttattctcctatggattcagcttgttaggcagaatggaagtggaggtcatagattttagggttttctcctgggattgaatccagctgaagcaggaatgattctgggtgagctatataacgtctctgagcattagtttgtcattttcttacataggaatagagttattgccagatttggagatagtacatgttgcaatgtggttgacacagaataagctttcaataaatgattggtattgttgttgttgtcgttattatctataactacaataatttccctagccttattttatagggataggttgtggcaacatgaaatgtgacttggaaaactgatttgcactagatagatagaaaccatgtttttctatctatataatgaacaatgtcatttaagaaagcttagaggcaattccaccagcaccatcttcttttttatttccactcctagattatttgccctcaagtctttggtaatttctttttgccacatctcttgaatgtttcttctttactatattccatctattattaccataagtccaacgttcatcacctcctgctccactgttgttcctgtctcctggctctcctagagccttggttctcaaagtgtcattcacagagcagcagcagcacccgaaatgcgtcatctcaagatctaccaagacctcctgaagcatgaggcatgttcacccccgtgttgtaggacctccatataactcatttaactacttctcctgctcagagtacatgcttggccagtgcgtgtttgttctgcctccagaatgttttctgactctgattgctatcattacttcttttgaatctacctaaattcaagttaccatccattgccatgactatggcaatagtctctgaaattgtcttctacttttatggtttccccttgtggcctttttccacaccatctggagagatctaaaattgttggtcagatcatatcacacccctccccttaagccatacggtggctgctgtagtatctgcagaaggtccctgacttatgatggtttgacttacaatttgtccacttcacactgagtttatctgggtgtaaccaaccccatagaaatcaaggagcatctgtagaaatgtttgaaagaccctttcatggcctgcaaagccctgtgagatgactctatgttctctcctttttttttctttctttattttttttgagatggagtctcgctcttgtctcccaggctggagtgcgatggtgcgatctcggctcactgcagcctccaccttctgggttcaagcaattctcctgcctcagcctcccgagtagctgggattacaggcaccagccatcacgctcggctaatttttgtatttttagtagagatgggttttcaccatgttggccaggctggtctcgaactcctgacctcaggtgatccacccgcctcggcctcccaaagtgctggaattacaggtgtgagccactgcgcctggcctctctgcttttttcataccactcatcactttacacagtaatctgtagacacactgaccttcctttagccctctgtataagccaagctttttcccacttgatctttctctgattctgtgcaaaactggcttggaagtatctttcaaggcttagctcaaatgttatagccttacctagctcttccccattctttagctaaagtagcacacatacccccctccccatcattcttctgtcattatcttgctttatagtctacaaagcatgtatggttctctaaaagagtgattaccatgcttttgttttctttatgtacattgcaaactgttttggtgagaaatattttagtaataataataatggtgaagatttagtgagtgtttgctataggctaggcacactgtatggtaaattaaataatttaatagatcatttatttggattatttcattctatttagctgattatatatttatattttttgtgttcctcttgttttaggatatcagcttcttgagagcagggtccatgtttgttgcatctgtatctccgcctgtagaagattctctggcatagggatttttgtgcaggaagtgtttattcaggaactgaatggatctcagaagattatcatttgggaatagatctacatgacaagaaagaacaaagagtctctctcattctttttcccagatatatcccgggagaaaataccctcgactttttcttatctttaatctgagaaggaagcagttgttggaatctgatttaggattggctctagtggccctgtgtgcagacacagatcttgggattcatctgaccatttggggagagaggttcttgaggggcaccttgatgataacgagtctttctaaagctttaagtttggcgtttgaggtggttggaaataccaggtcttccgacttttacgttctttgtgcgcacgctggtgatgtgcgtatgtgaacctttattattatggactcagccagcagtaaccatggtgagtagacctatcacacagcatttttctgagtcagtttaaaatgctgacaattaaatataccgtactcttttaagcaatccatcagtctctcttgttgtcatggtgaccggagtatatttagaaatgtgacaagtacactgagttcaattgcacttttgccaaaacatagttttgcagctaaaattgaatttcctgattgaagatccaagtgctgttaagggggcatgatcgtttctatacattattctggaagtataacttaacgttattctgttaaatccacagttacgagtcttatcaggtattgatagttaaagtggttgtacttaaagttgatgaaataaagtgaaataaaagtgacatgatgctttttctattgaaaatgaaactgggccttactaatataactagtttaatgattagtttctttatatatttataaagacattgtaggtatgtacctgtctgttcttcagaattatatttctaatttaaaattatatatcatggagatcctcccctgtttcctgcttgtattctattcttagtattgtgagggcattcttttttctttgggtctgacctctgtttgataagcattcttatttttcctcaatctcaattcttctggattttaaatgaagtaaagagacacaatgaacgtgactttttgcccaaacaaaggaaaaacgaaactcttctctttattcaagaatgtagattaaattcttactttcttatcatcctctgtcctgtcaacatagtgctgagaatgatgttgtgtatcaactcatttgaccacataaagtttaggaattaatgtagtggctgggtcatgattacaacactgatttcattcctggccaaagactgattcttctgctcttgaggtgagaaaagccagtactcctggatactttcgcttctctatttttatctgactgaatgagtctgcaactgggatagtttatgagcctctaataatatacggttagactaccattatctctttcgtgaacattgccaaaagtgtttttttggtaagagatatcttagttataataacagtttgtaggatttatggagtgtttactacatgctaggcactgtatatagtaagctccttaatggatccttatattggatctacacagaaatcttatgaggtagttcccattgtattcttattttacgttaaagaaacaggtttggagagatactgtcttttgaagaagcatataagtggagcagtagtggagtctgaattctgatacaggtcctagtaaccactgcctgttccatggaaggcacacagtgagtattttttttactgaccagtggcctcttgtatggtgacatcatacagatgtttcagtgtttccagaggctcaagaaagtagcagctatataaagatagacaggtagcagcgtctgaaagtagagatgagctactctttatctttcctagtggtttagagccaaagtagattagtgctagggagagagggaacataagtcctgtctagttcagtggtttcatctctgaactcctttatgttcttaaaaatgagcttttgtttgcatgcattatgtataatgatatttaccatattcaaaaaagtaagaaatgaaactacaattttaatgaaaaatatttgtataaaaaataaatatatttgtgaaaaaatagtgacaaaagtgggagctggattctgcatttaatttgttgtgaaatattgttttgattgatgtttatgaagaaaatccagcctctcacagctatgtatttgaaaaaggaaggataaaaagtaattgtggattttcttctttgatactataccaaaacttgacagttttcacattacctaaagttagtagtttcttataggttagtttcaatgtggaatgtgaaatcatattaatggactttttataccctattatattaaaatccattggtcaaattttcactttgattgagtctcctatgattttgtaaaatcatgcattggtcatttagaaagtcgttggtcactcacttattcagttcttgcaaacactgatcatttcattctataatataaaaagtcatcttcattaatatcactgctcattcatcaaaaaagcatttgaaatattagaaaggtgtcaagtgcacagtagtagatgtaaggttttcaaaattctgatttttacttgaaaacatgaattttatttttggctacaaatactgttgttttccttgaaacgataagctctcttgctttatttttgagaaaatctccggcaaaacccacatttaaagaaccatagttcgtcagtcattgtttcaaataaaaatgatgttccatgaaaaaagcgattggttagcagctgtcaatttaaacagttacacaaagtgcatttcttagagacaatcatcgtagtttgatcttcagcaggtgtttcatggtacttcccagaggtcacacagaatgtaaaaaagatgtgtactcaagaatattaaaaatatgtctactttttgattatgctaacattttatgtgatcaggtttctttagtaaaacctagtcagacagtactcaaggactgagatttaataagattgatacgtttcaatgcattaaagagagtcttaagtgaaactggctccctgtcccgcttattgtatgtgtcttacagtgaaatcactcccttgattcactttaagactgcaacagtttttttacccactgttatttttgtagcattaatgtaaatttcaacacagggaaacggcttcttagtatgattatgaaaataattttgaacttgtggactcttgaaaggtctaagggactcctacacatgtatgggtcacacattaacagccactcattgagtccagtcccttcatttgacaggagaggagagtggtggaaagatgtgtctaagatggcagcacaagttagtggcggagctgggacaagaacctattgttacttaactcttctttcttttcttttgatttcctgctccactttcaggaatttaaaggtaactcaaggaattccaaacttctttgtcagagatggtgatgacaaatatatatagtttgtatatcttttatctgaaatgcttgggatcaaaagtgtttcagacatcagatttttcctaattttggaatattttcattaaacttactggtttacattcctgatcaaaaaacatgaaacccaaaatgccccagtgagctttcagcgtcctgtctgtccttgaaacttctggattttggagcattttgaatttcagattttgggttagggatacaaaacctgtataattattgaactttttgggaataattccgttttttaaaaaatgttaaaccttttgcatattttccctactctccgctcaccactactatctcttctgcttttcaatggtaaccactcatgcctttttaaacaaaacatgtgttgtatttgccaagacacaggggaagcgaagttaaaggtacagttgactgttcattttctgaataagatggaattctagctttgtggggaaggaagaatcagtgagttttcgttgaaggacccatgccattctttacctaaattaaagttgttaaaagtcacaggaaagaaaattgtgcaagcaattatcatcctttatatcactataacccatcttactaggcaaactgtgccctttgctccccaattattctctattaaagtttcttgctctccctccccatccttctctttctctctccctgtctcctcccctttccttctagaaagaggttgcccaataaaacttgctcttaactttgcttttggttatgttgatattttatgtgacttgttttcttcactaaacagtagtcagtctatgagactgtattgaagaatgctgagaaagtcaatagaagtggacttagaatactacatgttcttttaaatatgtctcttatgttatagagtaactttttggggagctaaggtttgcagacaatgctgcgtgtgaacatatgtgagtaaatctgataagctgtggaaggaggcttgcaaactttcaaatgtattgtgctttcattttcaacttaattggatgttcttttgcaaggtcttgtttttttcctagttctcattcaccgttcagttgccttcccccacctgtgagctttttgagtcaaactttgtttattagcttttttcctgattcttctttcatgtctttctttcctatcccaaagtatgatttgattagacctcaggttacccttctgaatgagctcttcctcaatcctaggcctggccaggcatggtgcctcatgcttataatcccagcaacatggtaaaaccttgtctctacaaaaaacacaaaaatgagctgggcatggtggcccatgcctgtagccccaactactcaggaggctgaggtgggaatatcacttgagcctgagaggcagagattgcagtgagccgagatcgtgctattacattacagcctgggcaacagagggagatactgcctcagaataagtcagtcagtcagtcagtaagtaagtaagtaagtaagtaaataaataaataaataaataaataaatacgtaagaatcctaggccttggtgacttactctttttaattttttttcccacaaaactgatgtgttttgcccttactttcaccagaagaccatttagtcttcttattttttcttcctgagacttctacatttgtttttttctagccatttatattaggctcacaaattgcatagtgatagctgattgaccccttcaaaatgcctgttttctgcctccttgtctcagcttcttgaggatggtgctatctcatgcttggtgtatcataggagccccatggatatgttgaatagattttgctcaggggtctcctctttagagagcgttcttcacatttttatctggagatctgagcttttatgtatctcccactattgggctgctaaatctcccaaacccagaattgcaatgtccatcttttaatgcagactcccagccactgccaggatatcacatgtcttctctgacagatggctatgtagcctccacttgaacttttgcagctctttgcaaggcaatttgttctactgctggacagcttcatgtttaatgtttttccttgtattacactaaaactgattttcccattattttaatccccatatttctagcattgcatagtttgaaaaagtataatattgcttacacatgacatgtccccagatactcaaagatagctctaattcccccatctgcctcctttcctcctttagaccttctcttgctacttacatcccatagaaggctttggatgctcatcctcttggtgctttccccatttctacatcactttctagattttggtcctgatgtccaactctaagggactccctcaaggccacattttatctctgatggtactaggagcagtatgagtaaatggtatgtgtatgagtctgaaagctgagatatgaattctggtgcttattagatgtgtgaacttgattaggttacttaatctttctaaacctcagtttcccaagatgcaaaatgaatataatattaaattccaagactatttttaaggattaaagatataaaatgcttagcttagttactaaaatatattatgtttagcttgatcaattatttcatcttttatctatccaacaactccttttctttttcacacatgtgcacttggttttaaaaattatttcaagagttcttccctcctcctttccttctctcttttcttctctctttaaattttataacgtatatactcttataaaagttaccatcatgtttagatttccttctaaacttttatatctagaatttaacatgattttcttgacaaatatgttttcttctatgtgaattttcgcagctgctgcctacatttctgctcatgtgtttagcctctgttaatcttcctgtgaaaattgtgacttcatcctgccaatgggttaatgatgactggctcattgcatgtcacttaactcctcgctaaatgcttcacttgatcactcagtaactttacaatcatttagttgtacaatacatttaaaaaaattaaaagttcaattaatttcaatttcacaaacacttactaatcccatcttatatcacatgcattaaactaggtgtgtgttatagtagttgcatagaacattttgttcatttgctcattcattcattcattgaatgttcttttgagtacatactaaagaccagatgctggatagactttgggttcggattcaagaagctgtgttagacaaagagcctctattcaagatgcatgatcaactaaaagtgataaaacaatatggtaattttagtgatccagatataaaactaggcattatggtagttttaagaaaggctgcttcatcgaacatttttgcattaagaagcttcttatcggggagacactaaatgttgagtagggcctcagactctactagaaaggtaagacccatattagggcttggttttgtttgattataaagccattttgtgagaatcaacctccaggctccatgtgttatctttggctcctcaccttcacccccaccctcccaccccagttgcatgcatgccatatttttccttcttcttttcaataaggaagcatcagaatcaacagaataacataaagataggtgtggtgacattataggctcacttctggggcgtcattattacattaatttttctatatttccaagtaagaataacaatgtaagtacataaaaataatctcatgatagtagaacatattgcatagtatttctctattcatcattccctttacttcttgtagaaaagcttagtgcttgtggatttccttaaataagtgtcttaagcactgtatctgatctgatagatattagcacaacaattggcactgagtaattatatttggagaatttggaaggaattttttctctattgcaaagtggtcatgctgtgttgtctgcttttatttatatcacaagaccagatctgccgttaactagatgtctaggaaagagttcctttactactctgtgccttagctttgtcacttgtcaaacgagaatatactaggaacagtatcagttttgcctcactgagctgcagtgaagaataaaatcatttatctgtgtgaaaggacaatgcatacagatggtaacaattataaatattaaactaagcttttgagtgaccggattggctacttctcttaaagtgagttctgcttaattagttaattcttacttattgccccaaactttctgagatagcttcatgtttttttcctctctaccctgaagtgcctgcttgcaagcactatatgctcaatgagcatttgttgaatgaattttttaaaagtatttaccttttttgcttttattattattttaaattaacacataattgtacatgtttacggggtacagtgtgatattttgatacatgtatacaatgtgtaaagatcaaatgaaggtatttagcatattcatcacctcaaacgtttattatttctttgtgtttggaacattcaaaagccactcttctagctacttgaaaatatacaataaattgttggtaattatagtgattctatagtgctgtagaacactagaactgactcctcctttgtacttttgtatccatttaccaacctttggctatcctccccctcctgctacttttctccacctctggtgatcagtattttactctctatgtgatcgatttctttcagcttccacatatgagaaaggacatgtgacaaataactttctgcttctggcttatttcacttaacatgatgtcctccaggcttatccatgttactgtgaatgacaagatttcattcatttttttatggctgaatagtattacattgtaaatatataacacattttctttgcctgtttatctgttgatggatacttagattgattccttatcttggctgttataattagtgctgcaataaacatgggaatgcagatatcttattgaaaatgtttttttttttttcctttggatatatgaccagcagtgggattgctggatcttacgatatttctttctttttttttttttttttttttgagacggagttttgctgtgtcaccaggctggagtgcagtggtgctatctggctcactgcaagctccgcctcctggcctcctgggttcaagcgattctcctgcctcagcctcccgagtagctgggactacagacgcgcgctaccacgcccggctaatttttgtgtttttagtacagacggggtttcatcatattggccaggatggtctccttctcttgacctcgtgatccgcccaccttggcctcccaaagtgctgggattataggcctgagccaccatgcccagccaatatttctaattttagtgttttgaagaacctctatactattttctataatggctgtactaacttacattcccaccaacagtgtatgaattcccttttctttgcatctttgccagcgtttcttattttttttgtctctgataatagctattctaacttgggttagatgatatctcatggtggctccattttctgtatatggatgtccagttttcccagcaccatttattaaagagattcttcttgtttcctttgttgaaaatcagttggctgtaaatacgtggatttatttttgggttctctgttctgtcccattggtgtatacgcctgttcaagaactatcttgaataaaagtggtaaaagtgagcatctttgtcttgttccagagcttaaaagaaacctttcaatttgaacgtgtccagtatgttgatgactgtgggtttatcatgtgaagtgtttattatgctgaggtaaggtatgtttcttttatacctgacttgagatattatatcatgaaggaatgttgaactttatgaagtgctttttctgcatctaatgagataatcatggtttttgtactttgttttgttgaggtaatgtatcacgtttattggtttacctgtgttaaactatccttgtatccctcggataaataccacttgatcatagtaaatgctcctttaaatgtattggtggattcagtttgctagtattttgttgaggatttttgcatctatgttcatcagagatcctggcctataattttctttttacatgtttgtccttgtctggttttggtatgagggtaagaatgcattcatgaaattctttatttttgagatttattcttttttattatgtctatctttgttgaatttcttcttcatattgtgaattattttcttgatttagtaaaattgtctatctgtattttcttgtatctcactgaggttccttaagatcattattttgaattccttttctggcattttattgatttcttttttactggagtctgaaactaaagagctacattcctttggtggtgtcatattttattgctttttcatatttcttgtgtcagtgagttgatgtctttgcatccggtggaacaattacctcttctatacaaactttctggagtgattttcataaaaaaagacttccgcttgcaattagggttggtgttacagttgggaggggtgtgatgactttgtttctgaatagatgcagtgatagggtctccatgcagcttctaaagctacgttcaatgtcagcaataactgtgggcacctcagtagcttaagttgtagaaatttgtggcagtggtggtggtggcatagattattaatgtcctcagtgtcaagggcttttgaggtcctcctattcttatttttttcataatggggagatttagccaaggggactgctcttcatgtcagatatcacatgacctacaagcaagtgcagtggtgctgagttctaggtgcaggtgcttgaagtggctgtgggactagagtcttatgcccaggatcttgccaacctattgtgacacctgggtcttgggttacaggttcactctctgtgctagggttggatgtaggcttcccacagagccaggatttgtgactctgagacattactctacaaactcagtcccagctgtgagtggctcaactccaggaaagaaggagtgcagggaagtttggacccagagagcaggatatgccctgatttggcaacatgagccagtagggttcagtggcaacttggatctcaggggatgaggcaccatgtagtagtgattcttgacccctggatgttgggactcagcagtaccttagactctgtaagaccacatgcggtagcagtaccccagaatggcaacatacagctgttacttgtgccctgagtgggggcagagtacagcacagtggtggctgtatgccacagggagaggggtatcttagcagctctgacactaagcaggtagaccagctccagggaaacagcgtattagagttgttttccctttaggctggagtgtctcagatcagcccagccactgctcagttttccaaggatgtgggttatcacatcagctcagctttgggatttacagctgctcagctgagcgatggcaccaattcaccaagggacaatatgccacttcagctcaggcctgggggacatgacttttctaggcagcccaggtaccatttccctgggatgaagggtgctacttcagattaagtactggggtgcgtgaccgctctgagtggccaatgtactgttttcccaggaggcagggtactgcttcagcactggcctgaaggggagggtgaaaggtagattaagtgactctaccttcacctgggcccatggggaagagtggaacagttgctggcagctcggcttggggatgtcgggccactgggttcgggtggttcaacggtagcttagccttagtgatggagtgtcatagctatgcactcccagagcaagagacactccagccaaagctccatttccaagacggcatagcgcagtagctgcgcaggccacagagggcaggtcacactggttgctctttttcttggggaagcacggctatgtggacttcaggcaggtccctcagctgggacttggctcctgtgaggactacatgagactccatgggtgaggtctgtagctgttcaaggtgttgatggggcttgctgggatccttttgtgtaccattctaccctagagagaagttcctccctgtttccagcagatcccaagtgggtgatgggtggtaaagaccaggtgttttgtttctattctctatgtggtcattctgagtttcttgctatccagggtttctgttacttctctgatgcagtctggtacactgccttagttattattttttcttcttctgtttttagttcatctttttgtttttttctatatagcaatggggtttccctatgttgcccaggctgctctcaaactccagagctcaacagatccactcaccttggcctcccagagtgccgggactacaggcacgaaccatcgtgcctggcccagttatttttgttaaagtttagttgttgattgttgttgtggctgtctttgtgaaagagacgagagctaggggcttctggttggccatgctactgatgtcactcttaaagtacttatctttaaaagtccagtgctggagatttgtaagctacttatatttctgctcagaattcctaaagtctctcattttatttctagattatacattccattgatagagcccttataaatataacattaagaagttgagcattacctttaggccaaagcaatttacttttaaaaaatctgattaatttcaacacaatcaaccagatgtcagaagatttcagtgcctctgatagatgctgacaggtgtggaaattaaaatcagagagggaagcaattaaatcctggcaaacattactttaatgagacaaccaaatcataagctatggaataccttgtattcttgataagtatcttagggtggcatgagagtgcactttaaattgtatgtggtatttgatgactggaatgcagggcagtccatatttgtcatctaattcctttggcctgatttaacatttcagttgcttctggggacagacttctatgtttaaaacattgttttattttaataaatgttaggttaagtaatccttttactactacctctgttgccacatgaaacttatgaaaatgaccaaattattattggccttttcgcagtggttttgggataactgtgaaaagagaaacacagaatgtgtattttatgcaacttctaatcaaaagatttgataattacagcactaaaaccagaacccagttcctccatccccatttcattattcttttcaatatgattccccctattcggaatgaatatcttggacaccagggtgaaagaggtaccagtttattgacttagtgggagtttttataagatactcttatattgcttattgaggtactaaagcacttacaaaatatcaagtattttgagttagctttacactggttcaataacacttagaatttttgttcataatactaagataatcatcttagggatggttacattttgttgtgaggtgtggtggaaaattcaaaggacaccatggtttgtgaaaaacccattgcagctgatctctgcacttttcatttccatgtcattccattttcttctgctttttctttaccccctgttattttcttgcttctctctctttattatcttaccttcatttactccatcctgtttttctccaaaatatagttgcttctgtaaaattgcttctgagggtgagcatatttttgaggggagagaggatggatggtttgacaaaggatgcagacatgtcaggttctgggtcagcagttagttataaaatacacagaggcagccaaggataactggcttcattaccaaaaggctagagtgggatttgtcagttgtcccagatgtctgtatggaattatggaaaactccattgcattatgaaacactcaggagctactcaggacacatgccactcaatccacgtgaagagggctggtgaacttcttagctagaaagacttcagctttcctattgcttaaaatgagactgattggtgaaggatttgtattagtccgttctcacgctgctataaagaactgccagagaccacgtaatttataaagaaagaggtttaattgactcacagttccacattgctggggaggcctcaggaaacttataatcatggtgaaaggcaaaggaggaacaggcaccttcttcacagggcggcaggaaagagtgactgccagcaggagaaatgccagatgcttataaaactatcagatctcgtgagactcactcactatcatgagaacagcatgggggaaattgcccccatgatcggattacttctacctggtatcacccttgactcatggggtttacaattcaagatgacattttcggtgtggacacagtcaaactgtatcacactcttcacaaaacttcactggtacagacttgcgtatatggcttgtgcttcgacactttgcccagggatgttgcatcttgaaactttcctggtgagatctgagaaagtgtttatggtaacactgcatcaaacactccttttgccttagcttagtaatgtgtcaccttctggttagaccacagatgtgaagtctactctttctcctttcacttgctaataaagcagaacttagaactaagtgtgtgttagtgcttcgacaattgaattttctgtgctatacactcggtttccctttcctgaagttgtttagttaccctcttcaaatagcaattgggaggctacgtcatgtagtaggagggtgcttactgattttggtatcaagatacagtgttacatttttatctgctccatgttaaccatgtgatctttgaagtttggtttttgtatttgtaaaatttgggtaataaggtctcattggagttataaaggggatggtttgagacataatggtcattgtgatttttcaagctataaaataaagcatgatgttaaaagatgattaatgttttcatttggtggtagatgacaagtttcttgcagggcatctgatcaatcatgctctttttttttttttttttttgaaacttttattttaagttcaggggtatagttgcaggatccatgttcttttcttaacctgttttgagtcctttatgtaaacgggacattttatcaaaacttcctagaagtcttatatttctcaataaatccatccattctattaaaacaaatttgctttgttcttagagtctggtggaaactccaactctctgaacctagggcatgattatgggcacaaagttgaaaatgatgtgtgattcatcagcaggtctttcaactaaagcagtatctgttttgctttttaggggtcaaggaaacttttgattttaaaatcttaaaagtttttgggctgtctcttgttagatgaggtcatgtgagagtgacatagattaatatttcggtgttttaaaactaggaaacataagtcaaagagatattctcttgcctaatgtgcttataatgttatcttttgatcatataaatgtggatttatgggaagaaatgttatcactgctctctataaccatatacatggaataatggagagaaatcttatttaaaaagtttaactaagggcaactttggctatggagtatatatcataatcttcacatacatatgaagaaattgacactcatggagtttaaataacttgcctaaggccattgattaaaggaaatctgactggctcgaaatcctatgtacttttcccatttcctcatttcaatcaaatagctggttttattttattttctctctccaccaagccttgtgaattaagacaatgagttgctgtttgtctttgtctttccctagcctaataacctaggaaaaactgaagtagaaaggaaggattactggactagcaggcacaaactttggctccaaattcatgccctgccagatactaaactgtgtaatcttgggcaaattactttccttttgtgaacttcagtttctacttctgtaaaatgtggacaataatattcattttatatggtttctgtaaagttaatcatgaggatggtgttagttcctttctcatcctttctgtccctctttgagcttctgtttcctcacctatgaagccagtagaatcatctcttcctgcttcttcatcgggttcctgtggggtgcaatgaatgtgaaaatgttttgtaaaacaagaaaccattatgtagatataagaggttatgactattaatgaataaatatgggtttggtgtctggaagtaatttttacttatttcatttgtagacactagcattgcagttggctgaaccttgtgtcaaccatccattccaggagccagctatctgaggtaagagaggaggcgtgtcttcttgtttatgaaatactaataggcatctgagccagtaatgttgattttagaagaaatacaaagaatagaagaaatacaaagtactttatgaggaaaagaactgaaaaatggccaagacagtgagctgacctctctttttatttttgtttttttgatttatttttttcccttttaattcatagcccttaaggtttaataccaaaaccaaaaatctgggccacacagacgattcagatttaatgtgtatgtatttaagtgtccataaaatgcaatggagtagaatgtgcttaaccattattttattgtatcctcaactagtatgtggcaggagggctttttacctggtttcctaacccttgattgagcgcatttttgactacactatactgccagtgttacctggctctgaaggggccaaatatttatggctgggtcagtcactctctcttagctgccaaacaaaatcatctcaaaaagctagaatccaaagccacaacagaaaaatcctaagaacacagaaaattgagttagtcttttgaaaccttgcatccattgtatctgaatgccactctcctgggggactgttgggaatgacaccaatccttggcagaagaatacatttgtcttgagtttgccaagaaaatggaggccaatggagaaaaaacatttaaaggaagcatcatagttgtaaaatttaccagatgcgatttttctcctaaagtcaacctgctgaatctgtaccttctaatgagctctactgtgttttatgtaatgtaacttaaccaaaaagaggtgaagtagtcaatatgtagaatagtaactttgtagaagatttgatatcattatttagagtactatacacatgtattctgctgaatattttgttaattcctttggtatgttatatctatgacctcgaactgcaaccatgacttcagttgcacagacctttgagaagaataaaattggttggtattgccccaaatttgtaggacttagaaaatttagaattgagaggaaattaaggtgtcaggtttacatgattttcaaagctaatatcatatatatataataagaacacgtgcagacaaggtaggttatgtatggactatgaaatttctgtaattaaaccagacataacagccacttaagttatttagattttcttctcattcctacaaaaaaagaacattgtttttatttttattattatttatttatttttcaagtggaatataagctagtttacccaggaagttttttatttatttatttacttattattttactttaagttcttggatacatgtgcagaacatgcaggatttttacgtaggtatacatgtgccatggtggttgctgcaccctatccacccatcatccaggttttaagcaccgcatgcattaggtatttgtccttgccttgccctccacccatcaacgggccccgatgtgtgatgttcccctccctgtgtccatgtgttctcgttcaactcccacttctgagtgagaacatgcggtgtttggaagccatcattctcagcaaactaacacagaaaaagagaacattgtttttaaaaaaggtagtagcaaaaaatgtaagaatggctcctgtccaccttttatttcttttctagtccacaaaataaccctgcaaaaacttatttctaatgttttatttttacggataaatatatcagaaaagaatgtactgtagatacctactatcatagtttttgacagctctgtgaggcagagatctaacttgttcatttagaaactgcagttatcacactaaccttccctccgatgccaattgttaaatattaatagaataagctttgaaaagtaattaactgtatcccctgtccccacagaaacccatcttgaaactatcaagaggagttttaagcaagccctgaaaggttacaaaaattactctcaagaaagaggaattttctctctttctcttttcgttatattttggaggtggggaatggtagagagggaatgatagaaacctctcaagtaacctttgggaggtggagaagtaaatagtctgggagcatgctgtagaaatttaaaataatcctgtggcaataattggtatcagtggcagtaatgaagaaagaataacagtttcaataaataattagacttgacagtaaatgtgtcaacaggtacctacttaatgagtgtaatcattgtttttctctgctctcaacgttgatccactgactgcggtgtgttctctgtcccatttccaaaccaaatctatttaaagctgcactccacggaatctgcaacagtataccctgtttactatttagagctgatacctaatgttctttaataggcaagatctgtacttgaacgagaacaggcttctggcctcttgtagacggttgattatccctgttttccacagggtgattcattagcaaggatgaataatacccaattaaatctcatggacttgtctatattgccagagtgaattgtttattataatttggtggaaacagtcctggtctgctttaaataaaattaatcagttaccgttttttgaagtggaggtagaggcagtagttataagtgaaattacctctgtaataacctgaatagaatcacattgtttttgggagcaaagcagtatgttgtatgttatgtgcaccagaagccatgagaatccttttctaatcccagctgtaatgtcacctggctgtgtcacctaggcaagtcaccttccctctatgaggtctgtttcatcatctaatgacaaagttggaccagttgatcatggcattacttccggttaaatgttctcttatatatgattttatttcctagctagtcccttctctctcctggtgccatgtttccaaaatcataggacagtcctatgactctactgcacagccactgtggaaaattagttatttttctgcttagcttttgcttcttttacataccagacatgcagttaatgacttttattatatatactgtaagaatgggcatttatacaccggtagcggtagtcccttaccccagcaacttgcaattccttgttaggaaagaaaagctgttttcctccacatttctttactctgtgacattgttccctgatctgggtcttatgagaggatctggtaaacttcccccctattaagaccgttaggaagaggtggatgcttcttccattatttgatttttccagagcaaatcactggatctgtaaaggagatcagaatgtcaaagccagaggggacttcacgaagtaatctaaacaaattatttcatgtcacagatggagattttagtgtctgggagggaatctgatttgtctaaagtgtttttgactgatcttggactagaattcttctgactacatagttgtatctttaagtagagaaatctttttctataaactatcctttcacttcctagttcttaaaaggccattatcttccaggcaaaaccaatttcattttcagcatggggatgtgagatgtccttaaacataaatggactccaggtatcttcattaatttcatgaagacatggcacagagggttccggctaccttctgctttccgtgtttattaaaagactgtggattcccttgcagttcttcctgtaagaggttgtttgacgctgacatcatcactctcctccacccgcctcctgcccttttctgaatcagtgaattataggaatctgagaatgagctcctgtttcctgcacattgttggggaacattaaaaaaaagaagacagatgagggatttataagcaagaggacagaagaataatagccaacacaatgaagtctagttcaaggcctgcgattcccaattgctgggctacacagcattaatagcagtgtctctcaccctttcagacccttctctcttatttcagacccttctgccttattcttgtggggatgggctgggactgagaaacagctagtataatcattgccaaaatgaaactcacatgtacatgggggcttccaggtctggagaagagtgtagtaattgttacccatccgatagaaggtgcttagagaccactggacctaagcacttacctggaacctcacagtacagaggttcaaagagtagaaatcagttgactgagtctgaggttcaaatcctggctctaattaatttgctatgagtttagtgaatgcctaactttcctctgagctgcactttctccatctgtgagatgggaggaggagggtggcatagatgatgtcaaaggaaccctctgattttcatgagtctcagatttgcccaaggacctgcagcgaatgtgcagccaagccagatcttgaattcagagcccctttttctggtttgagatggtcatcattataagttccactacccatactttccaaacagtatgtttgcagctttcagccttgttttattaaatctactttttctcttttatttgacagtccctttctgtccagggacctgcctaaagtagcaaatcttttttttttttttttttttttttttgagacggagtctcgctctgtcacccaggctggagtgcagtggcacgatcttggtttactgcagcctccgcctcccaggttcaagcaattctcctgtctcagcctcccaagtagctgggactacaggtgcacacccccacgcccagctaatttttttttttttttttaagtagagatggggtttcaccatgttggtcaggctgctctcaaactcctgacctcaggagtccacccgcctcggcctaccaaagtgctgggattacaggtgtgagccaccgtgcctggcctaaagtagtagttcttaatatacgtgtgtgtatgtgcgtgcacacgtgcatacacatgatcctgtgtttggggcagatgtgaggattatggaattttcagaaactcagatgaatttatgaaatagttggaaaatgcagaactccagaaaatgctatcaacaagtttaggaggtttgtagatgctctgaaggccatccatgagttaagcaaaagttttcattctatgtgggaagtatgagatgacatttgagtggcatacatttccttttgctgttggattttccccgtagtcacctattgttatactctgagtgttaggctcgttttgtagcatgacttttggcatgtatgtatctcaaactattgagtgatattttaatattgaaactcttattctacttcattcattcactcatgcattcaaattcaattttaattcagaatttgctaaatgctagacatctcaatacattattgtatataatcctataaaatagaaaattgctaggtgctcagagaggttgagtaatttgcccaaagttttacagctaataaatataaaatctggatttaaatccggatttactccaaaatatgtgaatacctccagagataacattgaagacaaatagagacaatgatgcaagttcataaaccatggaaatttctggtagaaaatggtagatgggccccagaggaatacagagaatgtgtactatgggattttaggaagggacaagatcatacattatgaattacttcatatcataattcgttaactacgtgtttatctggctccttaagaaagaataaaaaaagctagataatcatatgaaacacattatgcataactcagtttttttcttgttcttcaaacttctgtcaggttagtgctctcaatatcttcatttggtaagtgagatgaggagatgaagagtagttagggtcatagtgccctgatcatactgagttttcacctaaataggaatttcagtgctttgggtcatctattttgttcccctcctcccggcctacccccccattatattgagcttgagacttttaacagagataacttctgaccatgcacagatcagcacaaatgcagatgtgagcagctagaatttggatgctgccaaattgtgatgactgccacatgtgtgaagctaaagcttagcacctgatgacccactgtgagtgtgtgggggggccagaagagtgaaaggcaggtcagagatggaagacgcctcggagtttgtcaatggcagtaccttcaccttgcagatgcagaaatggaggtggttagaaggggtaagacttactaaaattcacacagcaggttaatggctctctgagaataatggcaaaacaagaacaaggctttataccagcaatctacagtagtatctacttttatttcctacctttccgttggcatatactcacactgataggcttgacaggcagataaacctgtatttgaaggtcagcaggattagttgtgtggccttggataagttacttgatttacttgggtctcaggtttgttgtctgtaatagaaaccataccctttttcttttctttctttcttttttttttgagatggagttttgctcttattgctcaggctggagtgcaccggcatgaccttggctcactgcaacctctgcctcctgggttcaagcgattctcctgcttcagcctctgtagtagctgggattacaggcatgagccaccacgcccagctaattttttgtatttttagtagagacaaggtttcaccatgttggccaggctggtctcaaactcctgacctcaggtgatccacctgcctcagcctcccaaattgctgggattacaggcatgagccaccgtgcgtggctgaaaccatacccttttaacaggactataccagtgtactgttcaatatacagaaatactatcacccatctgattaataatccttatcacagcccaatgagacaggcacagatgttctgcttttcaagattctatttcctaacttcatcttgacagttgtaagtctcttgcttctcaaagtttggtctgaggaccggaagcatcagcattacatgggagcttgttagaaatgcaaatctcagatcatactctagaacttctgaatgagaatctctactttaacaagagccccaggtagttcatatgctcattagtgtttgagaaacattcacttcggccctcgccctatttcaaggctattgctgtggtgtgctgacaatgcctggcatgctgccagcattcttggggcatgctgtaccatgccttgagatagcggggtccggggggcggggatgctgtgaagtcactccttgggaataatggaagactgggttgaagggatccagcaggctttatctttttaacacccttcatttccttagaagttactattcagaaggggtcaaactgggattggattctaagtctttctgatccaaagtccatgttcttttcattaaaccacgatgtctcagtcaagaggaatgctgggttgtgggtgataactgttcattccctgtagtgtgaatatttccacactggctgctttaccctattactcaattcctagaggggaagaatttttttaaaaaaatttaaaaagcctgagttgaaagccaggatcctgcagcttaatcagttatttttgctttttaatgagggtgactattgtgaaataagtaattattaattactcaaaactaatgaaatattttagtttccttgctcaaaaagcatatggatgctaaaagaaagcatatgggtgctttctgggaagcatattggtgaatggacaaattacagtggtgccaatatgcctttgctgtctggctggggccatcaaaacgtgtgctggcatctgagtcctcgtgtgtttaaagggattttttaaaattcccatttgataagtgcctggggttgcctctggagttacacagcgctgtctcatcaatctttctgccatgctttcactcagacattactggctgagtataaactcggtataaacctttgctgtaagtagcttctgtggctctttctttccagatgcctcctatcctctgcaataggttcagtgggcctgccccatggatggcacgtatggagactttgtctatacaacattttaccacagtggtaaaagcagtagccgaaaaggtggcagcactgagacctgtttgctccatcagggactctgtctgaggccctcggccagctgttgaattgctgcactgcaaatttcttacttgtaaaactggaatgataataccagtgctcctgagctcacaagcatgctgttcatccaatttgcagtccatgccctttgctcttcctctcctttccttcatgcctcttctcctttgctgcatgttcagctggtctagtaaaaagcttgatggatttggaggtggctgaaaccattttgcttgctctggggattgcacacttctgagcttgtcagaggcaggcaacatggcatgttttagaagatacttggctgagtgtccacgaactgtggctctcagaccaacgtgacttagtaatcatttactcaacacctacaagcaaggtagcttgctaagaaattgaaggagggagctggcgggtctgtggaggtgagtttgattcagggccagtcaagacttggtgtgatgtgtgagctcagtaattatactttgagagagacagaatttggagaactctttcctattggaggtttcttatagaactagggacaagagctggctttgaaagattattaattggactttgataagatattacaaggatttgaagagtaagtctctgtcaggcaaaaaccagcttgcagtgggactcggaagcaggcaaatatcaggcatggctgaagaactgggcatcaatcacagacatgtgtagctgagagaaatcacttccttttggtgaaccctagactctatctgcaaaatatgagctttgaacaagatagttctcaggaagcctcaagaactctagctgaaattctacaaagtctcttatcacacagccaggttatccacttagcaaaatcctggcactagaatagcagcaatggagcaaggcctgggacccaggtgtcctgcctctattttatattcttcttactgtccacagagcattatgatgaagataggtggggtggacattattattctagtttttaatgtatgaaacataggatgttaagggaatctaagacataaaacgaataagagatttaactatcccagatattgatcacccttccaccacagagggccagctcttataaaatacaccccttgccattttgcctgtgtgggccttgctttcctgcctgaggaaccagcacgtaccccttctcccacgaaagtcatccctgtctgctctttggctctggaattcagtcttagcaatggactttgttttataattaaactttattttgtattgccatctttccatgtttccacccccatctcatccctcatacatattttaaaggctttgaatttaaggattactttctgcttctctgagttccctgtagctcctggcacagggccccagacatagtgctcagtagagaagcaaatgactatgttctgcaatagtttttctctctgcctattgcttgtttctgagatggatatgagacttataggcttaaagaatttcggaactggaaaggaagttaaaacctatctagtccagctcccccaccccagggaagaaatgacttacttaaatttgcctgcatagttagtggcagttctgcaaatcgtgcccacatctcaccaagcattggagagatggttggcacttgagtctcttcttaggactctacaggctctgtctggagtccttgtttctatgaagaccactaagaataaaggtaatacaggtgctgctgctgctgtattaaacagatggaaagaagtagacattcattgtatgtctgttatgtgataggccttgtgacaggtgttttcacatagtttagcttggtcagtcatcaaaagctagaattcccattcctccatgagggagacagattgtttctaaataggacatttagcagaagctctttcctgtaagctctgaaaggcactcggtagtggatagatgcttccctcctagaacacgggtgtagggctctgcagagtagcatgcatggctcttctaagggatatggattgtagagactgtgaaaataagcagaagttgtgatcaaaattggcgttgggggacttgtggtcacccgagtgtaccagaagactgagctcttctactctcctttccacacatacatctgagtctttggagagctgcaacctgagtgcctcgttcttgagtgtctgtagcattggcttttacttgcacttactacattttactcctgcctcttccctagctagcctcgacctcaacgtgtattatttcctccccccttgtcatttttcttctattacttttgcttcttccccttcctccttctcctgacttaaccttgggtggccgcaggtcttaaggctctgtgatggcagagtcttctgtattggactgtgaagattctggcagggaagacaatacacaaatctgttaaatacacaataaaaatagcttatgatctatgggacttggtattaagcaagatgatattaacgaggtttgattgctgttctgaaatgtggcagctgcgcacacgtattggctgctttttctccccacctttggcagcttgtgagcggtgttgccatgacactccttgggctctgtttagatcagctattttctgaaggagtcgctgaccttccccacgatagaagctgttgatgtggtcacgtcagtgcctcttcgggagctgtgtgactggcgagccctcagttgccacttggaaacggttggaaactgtagatcaggcacagacattgaatgtttaggagcaagaagggcttgtgaatatcccgtactctcatttgatgtgtgaggacagtgaggcgcattatgcggaggtgacttgctcaaggccacagagtgcatagagagaaggctgggagaggaggtcaggtcttgtttccctgcttgttgatgttccagctgcacggcactgagccctgcctgagtgcgcacttcagtcctgaaagctgcagagggatgggctggtgacactgccgtgcctaggagtgggcagagaaggtgaagacacggagagtaactcagtgcagaggcagcgacgggaaagtgaaggagagtaagaagcccagagtaaatggccaaggtgccactaacatgtccatccacagaaacttttctgggggagaatgtttcttatcagattccgcagatgggttccttgagaagtgagtgcttaaaggggctgggatagataatcataatgccatgttctcactgctctgaacccttttctgacctcacgtaagacctcacctaaaacttccacaagagccgttcattgtcagtaccatgctttttttggagtactgtataatgtcaagtatttttccaatagtttatatgtgaaatgtggtctccgccacaagattacagggtcctcgggagcagaaattgtgacttaaatgggcctttctcccttccactttttattcttgccctaccttttaatcaggcacctggaagagatctaaacacaggatgagcatccagtaagtttttgttgagttgaacttagttggattcggatgacctctaaaaaatgtttactaattgctggtgaaaattggcaaatgattattttgtggaaaaatgttctcaccgaattagattttgttaagaattcttatgtgtgattatttttcataaacccaatacactgtctattattatccttattttacaatgaagaaaaaaaattcaattgactgctcaaatttacctctaggaacaggtgatggagatttgatttgcatttagatcttttgtctccaaatattgtaatgttacttctgctttcccccactacataccgaagaggtcttacttcattgacagtggttcagccttctgctgaggagtcttcagtctttttatgttgtaatctgcctccttatgagtttgggaaaagaattatggggcctcaggtttaaatgctgttatgctttgggtaacactttagctgatttgttttcagtaaagccagaaggaaaatactgcatttctgtcttctttaatttccttaatttgaaataagccttgaactagtttgtaagactcctttaacttttaacaaatttaggcacatatgtaatataaagaaaaaggcactctgccctaaatgaattgactaattaagctgagaacaaaactagaccacttttttttttttggtttcaaaaaaaggatgcaggaatttttaaatgctacagctaaaacccagattttgtctgatattgatgttctgtaggttttctcaatatttgccatattcattagatgacattcattatactttcctaacttttataggatttagatgaggtttgttgataacattctatattctttctgaaaagaaaaacacacacacacaaatgtcgagcagtcttctttttttaatgtatattctcaggaaaaacaccattgactaatttaaatttcagtacggaggcaaagctgatctgtagtgaatgtaacatcttgttaaatacaggtttcatgcttcttttttgtacctttccaggcttttaaggaggagaataatttgaataataatggcataatgtccagagggaaagttgaatacgtaagacagagatgcatgtgggcctatttctgtactttgtgtgcgtgtctctgtgtggtggctttatggtttttaaaataaagttttctgtattttcaatgtatataataactttggaatcaccaaagaaaagttgatattgagacttgggtttttagtggggaggaatggatgttttttttcttttacagttttaggcaaagtgaaactttagaaaattatattatttgaagttagatggaaaccaaacactatctttatagtttctttcagaagaaactttgtcttaggaatctgggcactcttgtaaactttctaaatttcttcagccctcattgatacccacactttgcttaattcagttgaatcagtttacagtgaataacgtccctgggaacattaatcaatgaacacacacacgcgcgtgcgcgcacacacacacacagacacacacacacacacacacacagggaggacaaaaaggaaataaaagcatcactttgtaccttcctcaattcaaacctgtctgctttcttcagaatttcggatgtatgtgtctgtttcttccagtagattgggagcaccctgaagacagaagagacatatgtatatatatatatttttgtttgttttttcttttttgtttttagacagagtctcgctctgtcactaggctagagtgcagtggcgtgatctcagctcactgcaatctccacctcctgggttcaagcgattctcctgcctcagcctcccgagtagctgggactacaggcgcccgccaccacacctggctaatttttgtatttttagtagagacagggtttcaccatattggccatgctggtctcgaactcctgaccttgtgttctacccgcctcggcctcccaaagtgctgggattacaggcgtgagccaccgcgcctggctagaaagaagagacattttatgtatgatcgtcataatgattttgtgaactcaggtgtagtaaggtaaaacgccctggtaaaatcacttactgggacttttcagaatctgtttagaagtcattccattactcttgaaatccctctgctttatagactttctgagaaataaggaaagtccatctgcctacttgtcatagaaatgggtacttcagcagtaaaatagcctgtttacatactggctcaaactgtcaatgtaggaaaaggtttcgtgtattataaaatgttacagagctagaaaaaatatatacaagtaatatatagagtgcatatatatgtacatatatatgatctgttccttgtcacaatatttaacccaaagtgctatttacagtaatgaatcaaaatgtcagtcttaaaaatatgaagtgtcaaagtgttcccacgttgtagaaaagtttgatgtgacagtttgttaatcatatgactattctatcaatgtgtctcataatgtcttttgctcaacactctcgtaggctcctcacacttttttcatgaattcctagcttaagttactaacccaaggagcacatttgagttgcgtgtctcccacacctcacacaaaggcggctatgttttgctgtacttaaaactgaatggatttcacattattttagagtggtttgattttgtgcctgacgcatttatggatagtagcttaaaaaatttctgtaattttgctgttttcactacagaatcatcaaatgaaactttaacttatagcgcggatgttttttgtttctccaaagtttcccaagatatcagatgtccttatttgctagtgcccattcgttgaacttggacacatttttgaatttttctcagcacattgatgatcccaacttctttttcctactaaaagggcagagtcttagaacataaatattatatatgtggaaaagggcaacatagtttctttcgggaggatttttggccatgctactcactagttcgtggatcacacttaatctctgtgcctccgtgtcttctggagaaaatttaagggtgaaattagattagatcagtgaatttttaaacttatgctctagaagccctaggattctgggtagaaatgaagctccaatgattgagtgtggggtgggcagtggggactctgggcccttcaaaccaagcagctctgctattcgcttgttaaaatttagagttttataaactgtttcacttaaagaaaggttctactgcttaacctgcctacctgttggcatcactgtcttaagtgatctagagtcagtggcttatttcccacaaggattcagtgggcaactgtgacaatagttcttggctaacctggtcactatggaagttctttccgtggaaaaagattctccatccttcaatttgagataagatttactaattgagacctcatttgtttctgattttaatctttgcatcattttagttttaataaactaactttccaacttaccagattttcgggttgacaaagaccattatttagagaaacacaggcaaaggaaagtctaaaagctttggctggaatttcaactgcttctggtcaagaatatgaattttactttgtacggccaaagcgtttcaaccattctggggaggtgggtgaatgcccacaacttgaacttttcattccattgctttccatcctcaagtctctcccttcttctccatacacatgcaactaccaccaccaccatggttctcttcgcatggcctatgtatgtccccagacatggtggagcagaaaagtaaaaagttgtgatttacaaaccaaggtagagactataagaagaacaaaaatgattaaggggcatgagttagtgacactaacaaaaagccttcatgtatcaacataaaaaaatcaaattgaagaaaatatttttcatggacagaaaacctaccctaaagacaggaaagaaggtgaacggctatttcactagatgctgaaacatcatctccaaagttcctcaggaatcaaactatgggattagattcaactcttttaatagctgaaatctagaagggagagagtggttacgtctatagttttatgaatgatgctgaactctttctcacaataaaatgctcttctactaacaaatttaaagacttgagcacccagaaacagcagttgcatgccaagtcaggaatattctttttttaagtcacatgtcagccactggggatgcacccgggtttaggctggaggttggagagggttcatccaaaatccatgcacaagatatttatccaaaattctggagtggttccttgttcattctctgaagaaattggtgagataaggcaagcatcctaaacaaatgttgagctctaaaaatacagtttaaataaaacagaaagcattctgagtatagttttggccaaaatagaatagtataataaatcatttggctggagggtatgacatgagaataaacaaaaaaacagcatgtttgctatcttttctgtttattttacttatgcatcaacccccttctgcctccttttactccttgctagagtgtggaaggatcttgaattcagggccttgtctgtcttgtttttcagctggctggagtcacacttggcttatttatgagctcaataaacattatgaatggatgagcaattttgaaagattgacatattgaaggaaaaaaatgacgtgaatctgaaaaattctgacatggccacttctaaactctctgggacttgtactaaatgcttatagatttaggtagcattctgagcattacctcacttattcctttcaaccagcctctgaggaaggtactgttattatcaccatttcacagaggaagaattgagatccagagatgttacataatttgcccaaggttacataataataatataatagctaaagccaggatatgaactcaggtagtctggcttcagcagcttctctcttaactacgaagctatattgtttccacatggtgattataattataactgcctgttctactttcctgtacgttgtgaggctgagtttaggtgtgaaaggattagggaagaagtatatcaactagtgaaggcgagacaacacacaaacaactataacttaaagtagatagaaacttgcagagaaagttcagagaagaaaaaagaactattatttccaccagggtgaagggcaggagtcaaagaaggcttcctgtgggaagtgacttagtttggccttgaatgagtagaattatagtaaagggagatgctttccaagtaaacagaataaacagtggaagagatgccagtctaatgctgttgagtttagcagattctttccgaaagagtgtgcgctgagaagtggggagtggagagggtttgtggtggaaggaggtggaagccctgagaagggatctgagtgggaagatgcaagcgttccaaaagcatattcgcaatctctctggaggtcaatcctgggcaaaatgttgcttttgtcatgctttaactcattattttttgatgcattgtccgcaaagactagtccaaggaggtaccactccagaaagagtggccacacgagtctggaaaatgctgcaccctctggtgctctattaggtgctgacagtgcgtgttaacatgcccagtcttcaaggaagtcccgtgagacagcaatcaccttgctttctttgactgtagacctggtttgttgttttactttgagcaaacccctgttaacatccctcagaagacacacttcaggagccctcttccagccaaccagctggactaatttgtgtaaactttccaacaagttgtgtgcttctgctgaacacaggtcatctcagagtaaaacttgctccattctcaggacagccaacagtccccttttgaaagaagttagagcacgtttgcctatagaaattgttatgtgtcagttagaaagcaagctgcatccgaggtaacaaacttgaggagctgcagcccctctgacgaagtaaaagtgagaagcaggaagtgaaggagtctcagctcttgaaataaaatgtgcatacgggtgagagttgccaaccacaagaactctagctggctgccctgagaacatattaggagaaaacatggttaaagtcggcacctgacctattagctgcaggggcagctcattatcttttttattctttcaccctgcattggcccgaaaggggaagagaggcagtaagtggactgtaaagagtgcttattccacgctgggcaggtcattagaattgtcatgtcaaattcccttccttaatcccctcaactacccagtggagtcaggattattaatctcttcctctatacgtgaggacagtgaatccagagtggcttgctggtgctgaatagatcatgttgtcttacaacttgagcttttcccttgttcctttccctatttgtctgctgaactcatctgtctccaggttgtaaatgagattctcctctgaagagcctctgagccccctgtaactctattcttgtattgcatgacgatactcttgttctttaggtttatacctctttctccccttaagacctaaaactcgatctgggttactctagagcccacaggtttatattgcactgctctgcccacattccagccttctccactttaacatatgacttgatgatagcttttcagacccagtccctcacaagatacctctttttcaacccattattttagaccttctttacttgacatattttgagttttctggattctaggcttccttatcgttagtgtcactttccccccttctgttacatgtctgttaccttcttgctatttgcttaggtcctaccttaactttgaaggaacgcttttcaaacccggcctgcatcggaattaggaatcccaccctcagaagttatggtttagtaaacctgagagagtgtgggagaatttgtattgcactcccagatgatcctgaaactgtcattctgtgggcttatgtttattagcacttctttaaagcatagttcaagacctctgttttccaggatatttaactatcttagtccaaagtctttcctttcttccttgcctccttctctctctcctctttgtcttttcttcttctcttcctcccttctttctcccaccctcctctctctttcttctcatgaagtccatatgatatcctgtctgaattacataactttttttttctttttgtggagatggggtctcactatgctgcccaggctggtcttgaattcctaggctcaagcgatcctcccattgaagccttccaaagtgctgggattacagtcatgagccaccacatctggcctgaattagacaacttcttatttatgtggatctcagaagctccatcatccacttcttaagcctggtaaacacttttattagataagagagacagttttgcataaatgaacaaaaatctagatgaaaagttctcgaatcctgaatcacatcttgccataacctcttactagccgtgtgttcttggacatcttatggactggagtttccttgtctctaaaataattattccatttccttgtactgcagaagctcatgaaaaaggtcaaatgagatagcgggtgtataaagtgctacacaaatgcaatgatgctaatagtaaattattgttgatgttttctttgtttctgtacagttgactcatttgctttatcattaatgatgaggcatgaaagaaatgctgcttgtttttaatgaactatggaagactaggtggagctgacgggatgttgggatttcaggaaagctcttttaggtttctggaaatgatactcataccaatagttgtgagcttaggttgaagagcaatgttgtatttatactataatttttcttcaaataaactgtgataaagattttgaatattactttcatattctgaacttctcatgtacacttgaaaagagtcatgaaatagtagtagcggttgccatttataggggtcgtagggtgttgttatggttaaatttataaatccttaaaattatgatttctatcacaaaaatgcctaaaagggtgcattctctaggttttttccttctttcattcccttccttccctcccctccctccctccttcccctccctcccttccttccttccctctcctttcctttcttctcctttccttttccttttccctctcctctcctctcctctcctctcctctcctctcctcccctctcctctcctctcctctcctctcctttcatttttcctttcctttctctcgctctgttgctcaggctacagtgcagtggcacaatctcggctcactgcaacctccacctcccgggtccaagcgattctcatgcctcagcctcccaagtagctgggattacaggcgccctgccaccacaccaggataatttttgtatttttagtagagatggggttttgccatgttggccaggctggtctcgaactcctgacctcaaatgatttgcccattttggcttcccaaagtgttgggattacgggcgtgagccactgtgcctagcccctctaggttttcttaagaaaacctatctattcctcaagtgcttactctgcaaagcctaggtctgccaccaaggaataaaaatatggctaaatgtacttcctttcctcccagagttcactgttcaataggggacacaaacacataaataactagctcttgcaccaagcgaaatgtacagtgcgacaaaggagaggtacagatagtaggctgtgggcccgaaggagggtttccgtgggcgtgagtatgaaggaggggtttcctgaaggagggggtatttgaacaacccttttgaagactaaaaggatgtccgcaaatgaaatttagggtagaaacatgccagaaaaaggcacagtgttttcaatacgctaggcatttcttaaactatttatagctgaggttatgggaaaagagatagtagaaatatgagaatatcttctccaaagattctatgctaatatcctgatccatctgactatgcttatttgactgctttttgtgtttgtcttcttctttactggatatcctttttgccgcttcctttctggaattttctttcctggccattagcctctctctcctacaccgttgcctcactctcactgccatactcctttggacatcctccttctcttgtttcctaatacttttacatccccttccatcctttactccttagcttttgtttttatttgcagtgttaaagatagcctctttttatttccctgtagtgattagatcgacgtgtttacaatatgaacacacaggttttctcttcttcaggctctgagtcatcgagttcacaatgccatgtctagtcagtacttctatgtgtgtatagtgcccattgtggccgagtagagataaggtcactggggaagaaaataaatcgctaaaatctgttagaatacgtcagcttccaggtttgtctgaggatgcagtggaaaccacgttctgtggccagcatgtcagtagcttttgatgatcagagccttccattttgatactttaaaataatgtaatctaagttcacatcaactgaatccagacagtttcaccatccaccacattattaattccagatgggaaaattcattagggctcaaattttgtttgagacccaactgttttttaaattattattacaattattatctatttattttatttatttttttttttacaactgatgggaagggaaatttaacagctgtgtgattagcagggcatgaaattaaaaacgttttgcacagaatcaagaggttgtttactacagaatttgtcatctgagaattaagtgtcattaagactgcccacaggatgatctctttcaccattcaagctttgatttccacgcccggttttttgctaaaaggcctttaaccttttctggaaggaaaatgcatgtggatttatcacgaaggtaccatcagcatttcaaatgctaagtcaaggtaaaaacgacactcttgtctgtcacaaaataacagtacaactagatgttcagcctcactgctctcagcaaagagtgagttccaatttgaggaaatcaggtaaattagaaaaggctgcagctggattagtggcttcactctttccctctaaaactgtaggagtttcatatttccatcaaggcagctcaggtccctagagcatgatgtttacccttacattttcctgggtgtatgggctctttacgtctttggtctctttgcaaacgccctccttcgactgagctctagaaagtactctgtcctgggctgagcgcagtggctcaagcctgtaatcccagcactttgggaggccaaggcgggcagatcacgaggtcaggagttcaagaccagcctggccaacatggtgaaaccccgtctctactaaaaatacaaaaattagccaggcatgatggcgggctcctgtaatcccaactactagggaggctgaggcagaagaatcccttgatcctgggaggtagaggttgcagtgagttgagatggtgccactgcactccagcctggacgaaagagtgaaaactccctcccaaaaaaaaaaaaaaaaaaaaaaaatactatgtacttgttcctttgggcaagatgttggcagttttctgcagaagcgtggtcaagcacattagctggactgtcttggtcgaggtttgaaggcaatgccatttgcttgggcaagttacatggactctctgcagttcatttgcctcatcatcctccaacttaatgaaggtaatgacagtatctacctcaaggattactttggggattcagagttattaccaaaaatgtttaaggccctgcccgactcattgtttatgctcagttaatgttagctatctccatgcttttcagtcaatatattgcattgtgtttggaagtcttcatatctagtttcatacctgacacagacttgcttaacttctgccctggaatctttttgctatccctgtcttactgtctttaatagagcctttcttatttgatacttatttatatacttgccttcgttcgttttttagacaaattttattttcatatttgttgaattaaaccagacacagcttctacacttatggggtttcctttctgggagaatggggctggtgacaattaatgcagaaaacttttattggagatagacatgcaaaaacactcagagatagagttgaggaatttgtagtcattagaggagagagatgttagttttggctgggattggagttaaatggagagaaaataaaggaagactttctggaggaggagggttttgatctggaacctgcacgctcattagaatttgaattcgacctggcagaaaggggaaaagacttcccaggctgagtgaagttttggagctgcacattttattttatttttcatatttgtttcctgctgccctctggccaccattcagaccgtttggaggcctgttattgtaggtgggacctaagttccagcaccagtagatgtgtgagtgaggcttttatagtattgatgtcttgtatttaaaatgaacagaggaggaagccctggagtccattctaataaatgtatttcaaagggggctttcttcttttgtctgagtgagaggcaggaataggaatgacagaggcagcaagtgttggatgtctgtagaagaatcatagagttctctttagagcactaaacagagggctaataaagggctattgagtcctccttatgtttttttcctctctcagatgagttttaagggtaatagaagcgctttttttttttttctggtgacctcttaatcttacttttctctctttatctcttccttttcctagaagctaatattaaaaccactcttgtcctctgccattaaaaataaatctgggtaggtttcagcaagagagtatttcctagaatgcattatattctgggcagtagaagtgtatgtttaaatacttttcctgtagaaggtcattatgacaacagaggatgccaccagcaaccctgcagtatgtggtgaatgtgtttccacgctgtgtctgtctcgcctctgctctctgccatgtcaagctgattttaagtttaccgtcacttttagtatgtgacttgatgaggcaccataatgtgtgtgttgctggccaaacattacatgtcatgactgtagaatcatgagactggagttttagcctagaccttagaacacgtacctgcaagaggtagttattcgagcagcagtctttgtgagactggaattcaggcacagggaacacttgttcctaagttgctgccccgttgctcaaaacatcttggtaatgtctttctttctttcttttcttcttcttttttttttttttactctgttgaatgttatcttttattttgtttttattaaaaaatcaatttccagctttatcaggatataattgacgaaacaaaagttatgtatagttaaggtatacaacatattttgaggtacattgcattgtgaaatgattaccctagtcaagctaattaacataggcatcacctcacagttacctttctgtgtatgtggtgagaacgtttaagatttactctattagcaaatttcaagtgtacaatacagtattaactacagccaccgcactgtgtattaaatctccagaattattcatttggtatcactggatctccctttgaccaagaaccaagatctcctcattcccctggtcccggtagccatcattttgctctgcttctatgtgtttgacttttttaatttgcacatatcagtgaggtcacgcagtgtttgtttttctgtgcctggcttagttccttaagcaacatttcctccagattcatccatcttctcgtaaatgacaggatttccttctttgttaaggctgaataacattccacgtggtaatacaccgcattttctttattcactcttcaaatgatggacatttagatcgattccacatcctggctattgtgaataacgcagcagtgaacatgggagtgcaggtgtctccttgagacactgattttgccttagaggggattctggggctgggctccgtggtgaagggcactctctttccctcacctggaggttatgtcagcggtgtgctgggggttgtacaggtcatgttaagctgtccttcctgccttcctcaatgcgtcatttcttatttctatgttccacccaggtgctgcactctcgcctgaattccttaacgtgtgtgaggtattttggtgtgtggctagttgtttagaagtttctgagagggaatgagtgctggaaactctattttgtcatttgccaatgtaaccccacattggaattgtcttcagagataatgaagagccactgctaaaatcacagactcatgagatgtgaaagcggggaatctgtttagctcacatgcgtgtgagaaagctgagaccctgagacaaatattggcctgtgctgcaggctttcagttagacagggacagcatcagttctcattcccttgttagctctatgcctgatgtcttctcactgttttgctgcattataaagaattgattttttttttttttgagacagagtctcgctctgtcgcccaggctggagtgcagtggtgcgatctcgcctcactgcaagctccgcctcctgggttcaagtcattctcctgcctcagcctcccgaataggtgggactacaggcacccgccaccatgcccggctaattttttgtatttttagtagagacggggtttcaccatgttagccaggatggtctcgatctcctgacctcatgatccacccaccttggcctcccaaagtgctgggattacaggcgtgagccactgcacctggccagaaagttgattcttagttaagcctatgaatagttagaaaaaaaaaagagaagagagaaagttccccttagcatggcctattatcacagggtatgtttgtagcagagggagaacccagtccttatagagtgggttatggcttcttctacattccaagaaaatctcaagaagtagaaatcactctgagtgtcaaatattttagttgcctattgtcacatctattataaaatagatctggtatagataaaaatagagttaaacatactagttaatagatatatctggtgtggataaaaatagaatttagcatactagttaatatataaatatgatgtcgataaaaatagagttaaatgtacaagttcctaattggattgtagaacttaacattcaggagtaaggatgctgtcaagtctaaagctatgcccttatcctagtcagttgttatattcatggcagccttttctaaaatgtgctccatgaaatactagattcataaatggtcaaatcactgtgggactcttgctattatttccacccattgtggagattcttgatgcatccccaacaagtttaactctgagaagtcgaacaggcaaaagcaataagcacaactttcttttctcttatgttagattcaggttttgtccaatttattttataatggaaccattttgtggatgatttcccagacttgtgttctgtggaacattctttggatagcatgactttattgttaaaattcttaaggttcacatctgtcatcttataataatcttgtgtgaaatataaagtcatttgggctaaactgtagacctccatctgccctcccttccccacaggagaaattacaggtttatttaaggatcaaacagttttgaaatgaaatgttgttaggagggggaaataaaaacctttcagagcttaataattgtagaaagaagacagtgttataccggccaaaccaattttgtgaattagcactttaactcagagagttgttcctgaaaatagcttgtttttaagcaaaactttgttggcttctggtggtacactttttcaccatcaaaggcacaaatatgggtgattttaaactgtggcatactttttttgcattcaaaaccagggcttgtggaagaaacaacacccttttttaacttttcagaaacagttggcttgaccatcatggcttttttttttcccctatgtctttaggatattagcttttcgttaagctggaagggtcctcagagatcttgtccaagcccacccttgacagatgaagaaatagagggccagaaggctttagtaatctttccaagtctttttattagttactgacaaaatcagaactaaagtcaaggtctcttacttacctgtcatttacctgttcaatgcctcttttgtttgtacactctgttaaaaagaaagaggttaactgtttcttttggttataactgttatactacaaacacacacacactccacacacacacacacacacacacacacacacacacacagagagagagagagagagagagagagagaacagatgaaagccatgattaggaacattttatgctcaaggtgagaagaccctctataggacctcgaatgtcttcttttctaaagaacttcatctacctcgggtcagtcctttgatactattcactttgaaaactggtttacctgaaaggaagaggtgtgtgtgaaagagagggtcacccgccacattttatctctctgtcttatttcaggcagacagattcactacatcaagatggtgtttacagttatcgccatgagatgaactagctcatctccaagtgcttaagggatattgcctggttataaatcatcatgtgattctctctcctcccacccccatttacagcttctttcttctttctccactgcccatgtctaaacctggggaactatctcactgcatagacagaaaaggaaggtcagatccaaggtagatctttctttctgctaggtttaacctagtgatagcaacaaaaacagttcttatgcctctgagtttcttgttttaggcagaagcatttgataggttggggatcacaggaaagtttttttttttttaaattctccattaagaagatgctaatgtacttgtgaaggcaagtacattaagcttagtaatggaagatatgggttctaagctgcacctctctgccaactagtagtgagatcctggggaaatcaaacaatcgtttggaaccacatgtggcctagtcttttcattatgacttcaggagtcataattcttgtcttgtcaacctcctggggttgttgtgaggattaagtgagataatagatatgaaaaggcttgtaaactacaaagcatctcatacatatgtgtaaggcattgttattatcaataataatagcaaccacacactgctgcctttgagctaggtactgttttaagtgctttccgtcgataagctcacttaattctgacagcaactctagtgtaccaatgaccagtgctgggcgctgtgaatcagcaggactggcagctcaccctgattagctggtgatttcctgtgttcttgggcatgtcctttcccttccctaggcctgaattttactctttgtaaaagaatcacagactcaggttggatggaaggattcttctgttctgtcatttgtgattttgtcaggcagtcattggccccacaggctaagtcactgattatttctatttatttatttatctgagacagagtctctctctgttgcccaggctggagtgcagtggcaggatctcggctcactgcaacctccaccttccggattcaagcagttctctgcctcagcctcccgagtagctgggattacaggtgcctaccaccacacccagctaatttttgtatttttagtagagacggggttttaccgtcttggtatgactggtcttgaactcctgacctcttgattcacctgcctcggcctcccaaagtgttgggattacaggcgtgagtcaccacacctggccagtcactaattattaatcacagcccacatttaactgagtacagtcattagtttcattctacagctatacagagagctcatgtaaattcctgaaggctgcaccgcctacaagtggtggggctggagttcgcacgttgctcttgtgccctggagtgatggcagcaagatagatgtgggtaactctctagcgatcccaggtgtgttatgttgtcagcatcctcatctaatcaacatgatgattatcattgagccttttaggttttcagttgttgttatcatttaactcctcaattagattccgagcatctcgatggtaggttttctgtactgcaatgtgtattgccagtgttttatgcaagatatgatgcaggctagtgtctcacagtttacgcaatttgttttccgtccatcctttcgatcctttgagcctctcaaggaagcctgggttggcatctgcccaactgtgttgggcagaatggtttttttctcgttgcccgacatggggctgggaaagccatttgaggaggtcgctgtggcatgaatctggacaagtctttctataggggaaacctgtttcaagctgtggctctttcactttctacatggcatatggaccctgatttttctcacgcctgcgtaactctactggtgtctcttggctgtcgcagctttgttttgctttgccattgttttattttattttttctgaagacttggttttcttgggctctgcttatatacaacacaaaatttgtagaccatttgcttatgggaaagagtcacacccacggaaattgggagaaaattaactcttggagcccaaagaaactgacataaatcttataccacgaacatcttcaatttccgactttgccttccttctctgtatggtgctgtaccaagatctcttattgggaccaggtttcatggagggttactggtaactattaacccactcaatgtacttattttaccattaacctatcatgaatagcctgtccaatccccattaaatgacccactatgggggtcattaattcatttatttatatatgaattatctacattcatttatatatgaattattagatattatctacactgaaccaggcaaaattggggataccaaaatgaattagacacagttcctgctttcaaaaacctcatactctgaagagggggagatttgttaattctgtcaagtcatctttgatgcctaccatgaccaggtatcagacatgccactggaactgtggacatctggcaggtacaagcctattcatcacagggtttcaggtctagggaagaaaaacatcatattaataattttacaaataattatgtagttatagttgtgataggtgccacagaggaaagactgagtggtgggaaaatatatatatatatatatatatatattttttttttttttnnnnnnnnnnnnnnnnnnnnnnnnnnnnnnnnnnnnnnnnnnnnnnnnnnnnnnnnnnnnnnnnnnnnnnnnnnnnnnnnnnnnnnnnnnnnnnnnnnnnnnnnnnnnnnnnnnnnnnnnnnnnnnnnnnnnnnnnnnnnnnnnnnnnnnnnnnnnnnnnnnnnnnnnnnnnnnnnnnnnnnnnnnnnnnnnnnnnnnnnnnnnnnnnnnnnnnnnnnnnnnnnnnnnnnnnnnnnnnnnnnnnnnnnnnnnnnnnnnnnnnnnnnnnnnnnnnnnnnnnnnnnnnnnnnnnnnnnnnnnnnnnnnnnnnnnnnnnnnnnnnnnnnnnnnnnnnnnnnnnnnnnnnnnnnnnnnnnnnnnnnnnnnnnnnnnnnnnnnnnnnnnnnnnnnnnnnnnnnnnnnnnnnnnnnnnnnnnnnnnnnnnnnnnnnnnnnnnnnnnnnnnnnnnnnnnnnnnnnnnnnnnnnnnnnnnnnnnnnnnnnnnnnnnnnnnnnnnnnnnnnnnnnnnnnnnnnnnnnnnnnnnnnnnnnnnnnnnnnnnnnnnnnnnnnnnnnnnnnnnnnnnnnnnnnnnnnnnnnnnnnnnnnnnnnnnnnnnnnnnnnnnnnnnnnnnnnnnnnnnnnnnnnnnnnnnnnnnnnnnnnnnnnnnnnnnnnnnnnnnnnnnnnnnnnnnnnnnnnnnnnnnnnnnnnnnnnnnnnnnnnnnnnnnnnnnnnnnnnnnnnnnnnnnnnnnnnnnnnnnnnnnnnnnnnnnnnnnnnnnnnnnnnnnnnnnnnnnnnnnnnnnnnnnnnnnnnnnnnnnnnnnnnnnnnnnnnnnnnnnnnnnnnnnnnnnnnnnnnnnnnnnnnnnnnnnnnnnnnnnnnnnnnnnnnnnnnnnnnnnnnnnnnnnnnnnnnnnnnnnnnnnnnnnnnnnnnnnnnnnnnnnnnnnnnnnnnnnnnnnnnnnnnnnnnnnnnnnnnnnnnnnnnnnnnnnnnnnnnnnnnnnnnnnnnnnnnnnnnnnnnnnnnnnnnnnnnnnnnnnnnnnnnnnnnnnnnnnnnnnnnnnnnnnnnnnnnnnnnnnnnnnnnnnnnnnnnnnnnnnnnnnnnnnnnnnnnnnnnnnnnnnnnnnnnnnnnnnnnnnnnnnnnnnnnnnnnnnnnnnnnnnnnnnnnnnnnnaagttcattgtagattctggatattagccctttgtcagatgaagtaggttgcaaaaattttctcccattctgtaggttgcctgttcactctgaatggtagtttcttttgctgtgcagaagctctttagtttatttagatcccatttgtcaattatggcttttgttgccattgcttttggtgttttagacatgaagtccttgcccatgcctatgtcctgaatggtattgcctaggttttcttctagggtttttatggttttaggtctaacgtttaagtctttaatccatcttgaattaatttttgtataaggtgtaaggaagggatccaatttcagctttctatatatggctggccagttttcccagcaccatttattaaatagggaatcctttccccattatttgtttttgtcaggtttgtcaaagatcagatagttgtagatatgcggcattatttctgagggctctgttctgttccattggcctatatctctgttttggtacccgtaccatgctgctttggttactgtaaccttgtagtatagtttgaagtcaggtagcgtgatgcctctggctttgttcttttggcttaggattgacttggcgatgcaggctgttttttggttccagatgaactttaaagtagttttttccaattctgtgaagaaagtcattggtagcttgatggggatggcattgaatctataaattacctttggcagtatggccattttcatgatattgattcttcctacccgtgagcatggaatgttcttccatttgtttgtatcctcttttatttcattgagcagtggtttgtagttctccttgaagaggtccttcacatcccttgtaagttggattcctaggtattttattctctttgaagcaattgtgaacgggagttcactcatgatttggctctctgtttgtctgttattggtgtataagaatgcttgtgatttttgtacaatgattttgtatcctgagactgctgaagttgcttatcagcttgaggagattttgggctgagatgatggggttttctagatatacaatcatgtcatctgcaaacagggccaatttgacttccttttttcctaatttaataccctttatttccttctcctgcctgattgccctggccagaacttccaacactacgttgaataggagtggggagagagggcatccctgtcttgtgcccattttcaaagggaatgcttccagtttttgcccattcagtatgatattggctgtgggtttgtcatagatagctcttattattttgagatacgtcccatcaatacctaatttattgagagtttttagcatgaagcgttgttgaattttgtcaaaggccttttctgcatctattgagataatcatgtggtttttgtctttggttctgtttatatgctggattacatttattgatttgtgtatgttgaaccagccttgcatcccagggatgaaacccacttgatcatggtggataagcttcttgacgtgctgctggattcggtttgccagtattttattgaggatttttgcatcaatgttcatcaaggatattggtctaaaattctcttttttggttgtgtctctgccaggctttggtatcaggatgatgctggcctcataaaatgagttagggaggattccctctatttctgttgattgcaatagtttcagaaggaatggtaccagctcctctttgcacctctggtagaattcggctgtgaatccatctggtcctgaactttttttggtcagtaagctattgattattgcctcaatttcagagcctgttattggtctgttcagagattcagcttcttccttgtttaggcttgggaggatgtatgtgtcgaggaatttatccatttattctagattttctagtttattttagaagaggtgtttgtagtactctcctgatggtagtttgtatttctgtgggattggtggtgatatcccctttatcattttttattgcgtctatttgattcttctcttttcttctttattagtcttgctagtggtctatcggttttgtttatcttttaaaaaaaccagctcctggattcattaattttttgaagggtttttttgtgtctctatttccttcattctgctctgatcttagttatttcttgccttctgctagcttttgaatgtgtttgctcttgcttttctagttcttttaattgtgatgttagggtgtcaattttagatctttcctgcttctcttgtgggcatttagtgctataaatttccctctacacactgctttgaatgtgtcccagagattctggtatgttgtgtctttgttctcgttcgtttcaaagaacatctttatttctgccttcatttcattatttacccagtagtcattcaggagcaggttgttcagttttcacgtagttgagctgttttgagtgagtttcttaatcctgaattctagtttgattgcactgtggtctgagagacagtttgttataatttctgttcttttacatttgctgaggagtgctttacttccaactatgtggtcaatgttggagtaggtgtggtgtggtcctgaaaaaaatgtgtattctgtcgatttggggtggagagttctgtagatgtctattaggtccgcttggtgcagagctgagttcaattcctgggtatccttgttaactttctgtctcgttgatctgtctaatgttgacagtggggtgttaaagtctcccattattattgtgtgggagtctaagtctctttgtaggtcactaaggacttgctttatgaatctgggtgctcctatattgggtgcatatatatttaggatagttagctcttcttgttgaattgatccctttacaattatgtaatggccttctttgtctcttttgatcgttgttggtttaaagtctgttttatcagagactaggattgcaacccctgccttttgttgttttccatttgcttgatagatcttcctccatgcctttattttgagcctatgtgtgtctctgcacgtgagatgggtttcctgaatacagcacactgatgggtcttgactctttatccaatttgccagtctgtgtcttttagttggagcatttagtccatttacatttaagtttaatattgttatgtgtgaattcgatcctgtcattatgatgttagctggttattttgctcgctagttgatgcagtttcttcctagccttgatggtctttacaatttggcatgtttttgcagtggctggtactggttgttcctttccaggtttagtgctttcttcaggagctcttgtaaggcaggcctggtagtgacaaaatctctcagcatttgcttgtctgtaaagtattttatttctccttcacttatgaagcttagtttggctggatatgaaattctgggttgaaaattcttttctttaagaatgttgaatattggtccccgctctcttctggcttgtagagtttctgccgtgagatctgctgttagtctgatgtgcttccctttgtgggtaacctgacctttctctctggctgcccttaacattttttccttcatttcaactttggtgaatctgacaaatatatgtcttggagttgctcttctcgaggagtatctttgtggcattctctgtatttcctgaatttgaatgttggcctgccttgctagattggggaagttcttctggataatatcctgccgagtgttttccaacttggtttcattctccccgtcactttcaggtacaccaatcagacgtagatttggtcctttcacatagtcccatatttcttggaggctttgttcatttctttttattcctttttctctgaacttctcttctcacttcatttcattcattttgtcgtccatcacttataccctttcttccagttgatcgcatcagctactgaggcttctgcattcgtcacgtagctcttgtgccttggttttcagctccatcaggtcctttaaggacttctctgcattggttattctagttatccattcgtctaattttttttcaaagcttttaacttctttgccattggtttgaatttcctcctgtagcttggagtagtttgatcatctgaagccttcttctctcaacttgtcaaagtcattctccgtccagctttattccattgctggtgaggagctgtgttcctttggaggaggagtggcgctctgatttttagagtttccagtttttctgctctgtttttttcccatctttgtggttttatgtacctttggtctttgatgatggtgacatacaggtgggtttttggtgtggatgtcctgtctgtttgttagttttccttctaacagacaggaccctcagctgcaggtctgttggagtttgctagaggtacactccagtccctgtttgtctaagtatcagcagcggtggctgcagaacagcggatattggtgaaccgcaaatgctgctgcccgatcgttcctctggaagttttgtctcagaggagtacccggccgtgtgaggtgtccgtctgcccctactggggggtgcctcccagttaggctacttgcgggtcagggacccacttgaggaggcagtctgcccattctcagatctcaagctgcatgctgggagaacctctactctcttcaaagctgtcagagagggacatgtaagtctgcagaggttactgctgtctttttgtttgtctgtgccctgcccccagaggtggagcctacagaggcaggcaggcctccttgagctgtggtgggctccaccgagttcgagcttcctggccgctttgtttacctaatcaaacaactaactgggcaatggcaggcgcccctcccccagcctcactgccgccttgttgtttgatctcggaccgctgtgctagcaatgagtgagactccatgggcttaggaccctccgagccaggtgggggatataatctcctgatgtgccatttttaaagcccattggaaaagctcagtattagggtgggagtgacctgattttccaggtgccgtctgtcatccctttctttgactaggaaagggaattccctgaccccttgcaattcctgggtgaggtgatgcctcaccctgcttcggctcgtgcacggtgcactgcacccactctgctgcacctactctctggcactccccagtgagatgaacccggtacctcagttggaaatgcagaaatcacccatcttctgcgtcgctccctctgggagctgtagactggaggtgttcctattcggccatcttggctcctcctccctatgttccagacatatcattttcattccacatgtatttctttgtttattgagtgccttccatgtgttaattactttattggattcctgggggtgagaaggggaagggtgtgggcagggccactgcttacagctgctcaagttgtgccttgcttgagggcaggagcgcaagtggggctgaagtcctgccctccccactagccaggccaagataaggaccattttctttctttttttttttcttcctaatttgcacaaaagatactaatgattaacagagatcctggtatggaaacataagacacaagtttggttttgtctgaaagcactggtagtttagttggtgaggcagccacaaaactaaccaaaagtaattatattgccagccacaatgaaatatattaaccagagatacaaatgacattctgagggggcttggtggaagtagtttaaccctgatagggtggggagaatcaattcttacaactttcgaagagactagttggatgggcaagttttcttaatagctttattgagacataatttaattaattaactcaaagagtagaattcagtaatttttaatatattcatagagttacacagccgtcaccaagatcaattttagaatatgtccctcaccaaaaaacaaacaaacaaaaccaaaacaacaacaacaacaaaaacacatagtggtcgtttcttatttctcccaaatctcttgcatccggtactaagcaaccacgaatctactttataatctgtgaagttgcccattctggacattttatataaatgtccatacatttatataaacatcatacaacatcatacaatatgtagtcttttgttactttgtttctttcagttaggttttcaagattcatctatgttgcagcatgataagtaggcttttgattggtgaagaatagaagcaagtttaccccaaaatgatgcattagggagagctaagagattaacctttgtaagaaaccacggtctgtgtttgaaaggttgaaagtagactattgggtctgctgactagggcctgtagggaatgttacaggaattgaagttagaaatataagttgggagcagatcatggagattatgaatgcttggactttttctgagatgcagatgtttttgagaggggaatgatatgactagagatgtgtatttttctcccccataatgagaaaaattgatgaagctgtaaggtcccccaggttggtagtggagaaccaggtgtgaaatcatgaacaactccctcccaagtacttttccctcatattccactgcctcttactttttatgtttgttagctggagcaagtagaaaaagcacagatgatttgttttctgttataattattttttaaactactagaggcatggtggaaaattaaactcgatagattatagttataaatgttgttctttgggcacttgccatgaggcagcattttcatggcaaaccctactttgtatatttttgtcatattatgagaaagaggccctcttctgggtcacatgtttgcctctgcaggactctgacctgtcattttagatattgagtctatccttgttttgatttcctttggactcatggccttgagtatgtcccttatgttcatttgacagattcctgccaatcaaatggaagacaaagctatcccgagggtagttggcctgtgtttgcatctcttgtagccaagagaaatccctcattgcttgtttctgagctactcatgtcacagacttttgcaagaggaaggatttttgagattacatggttcaaatgttattaaattaaggtttagtggtccatgaacctcctgaaattgtttgcaaaattatctttaattgtgtggaggtgtatttttctcccccataaaattctcagatggattgcatccctgtaagggggaagaatcatttatccaccaacaatattgaacttttattgagtatttacactatgccttgtagaagacttgtgttatctcattcagtctttacagcccattctcatggattaggaaactgaatcatacagtagttaagttgacttgcccaaggtcacagagctagtaggtgacagaacctagattcagaccctggactctaaccccagagcctatgtcttcatccttctgcattttcaaccttcatgcctgctttgcactattctagtttaccttttataggctctggagttgatggagtctcctttaataaatgggtagtggaggcccagagagaagtgaaacatgtctaagatggtcctgtgattaaagacacatagctgttaacgtgtgacacgaatgcaaacaccaaagtcagattatgaggctttaacacataatttctaaatttaatttaaaatgctcctttttgacctttacttctgctattgattttcatcttttctcttttctccttcttaccccttctcttctttcctcttctgctctcctttcttcctgcttttcctttctttcttcagcaaccattactgagcatttaccttattggaattattggattaggtggaattattggtaattgtgtgttttcatgttactaaaatggactgtccagctcttctgtggccaacatctctttactctagaaggttctcaaaggagttaccacacatgaaagaaggttggggaaagcaaagtacccgaagccagtgctttacactggtacacaggagtaggtacccactttccgattcgggggactggattgtgtcattcattgaaatatgaaatagtgaaggaagcttcacttttatatcggttgggggtagcgtgagagttgtttgagcttttcacttttgagagcttttcaaatgaatcgccttatagttaaagctggagattagaagaaagatcaagactaggaaactctttatttaaatgtcaatatttaattgacaattaactgttgttgatttaaattaaatatatatatatgtatagagtcttgctctattgcccatgttccagactcaagctatcctctcacctcagcctccagagtagctctgactacaggtgtgacccgatacacccagctatttttttttttttagattttgtagagacaggggtcttgctatgttgctcaggctggtctccaattcctgagctcaagtgatcctcctgcctcagcctcccagtgtggtgggattacaggcataagccatcatgttcagccagggaatgtttgaagatagagaaaaaagccctgctttctccattccttctacggtttggcacccagttcatatcccatttgcccagatgctcccttttaatctttcctaatgcaggccatagacattggtctcagaattcttgtaagtctacttttgtcactcaattgtgtgaattgtgtgtttgtacaggtctcctgcatttactaaatatagtggaaatcatatttgcctagagatcagtagacctgtgcattgaatctaggctttgttatttgctatttgtgtgattcattgattgattttctttcagcatcaaattctaagttaataaaatgagattaataataatgtctaccctgtctctctcacagaattggtggtcactttttaactgtgaataatggatgtgatggctctttaaaaagagccttttaaaacaaaatgaatacttttttctacatttacatgtgtaattatgatgtttgtttgttttttcccactctctgggttaactctaaactcctttggattttaaacgcctttggacacttttctttttaaccctccttcatacctaagacagtgctatgtatattgacatttaaatgtacagggctaattatggtttcgtttcttcacttttttgttgttgttgttgttccttttgttacacatttattttgaagattttgttttcctggaaattagtgggatgttaacgtctccttaaagaactcattctttgtctttcctggttccccctcttatcctctgtaacctgtgacctcctcccaccatctgaggtggatgtctcctgaagttcttactctgtcccagcaatgatgaccttagtgtgtctactgactcttaaaacccgtagggacataggatccaactgcctcatagaaaagtaaggccgagagagggttactcctatatttggttcaagtcaatctgggtgctggtttataaacaatgcctattcagtgctctgcactaaggcatactggtgttatgcttctatttttgcctttattatttttaaagttttttggatgaaattactgacgttgatcacatattaaaaatttatgaggattctatttttgggttccattctatttaattctagctgaaatttgcttctcttttttatcctgttatggtacatttgttcctagacataatcaggaatgacaccagacacagactatattttggtgtgtattagtgagaaaatttagtatgtttcttttgtcatgttgaatgtagacactatggacaatgtttaattaattttaattgatttttgttgttgttattatctttctcaatttcctctgctttcttcttacttccttagcatggtatgccacagatagggacacatttcatctgaaagatgtatactatatatggatgtctttgcagtttcttcagtccttttaattacataaaaatcttaataatattaaaacaacaattatgtaaattttcaaaagaatttcaaaagcaatgaagaagaccactgttcagaacctcaatttctgaacctctccttacttttccttcttccttttcagccagtccttgctcaactctgaatatattttgacaatgtttcaattataatatatgcagaataatttacttctttcacttaacattatttttaaatgtcaatgttgctacatattccaaattactttggaattcattatatattattattcttttatttccactagatttatacttaagacagaatctcaagagtgggatatttgggtcaagtagcatttacattttggctcttgaaataactaccagcatgtcatttccaaagagacgttaatcattgacaccaccagcagcaaatgttctcattcatcagaccacatttgttttacacgttcctctccttagaaagagataagtatggtttcttttctttagttcttgctaataggatacccaacatattcaaaatggtactccattgttttaattctcatcctctctgaccattagaaatattttgctccatgtgtctttgacgaagtttatgtattgttttatgaagtgtaaattcttgcccttgcccatttgatctattgagtttatgccttctttctttatttgggatccaaaatatttattaactctctgcctgacctatttgttccaaacattttttccaagtctgtttgcctttttagttatggtattgtatgtttgtgcatgtgtgtgtgtgtgtgtgtgtgtgtgtgtgtgtatagatctacatacatgtgtacacaccatatatatatggcttataatggggacagaatcacttagcagatgggcaaccctgatgatccaggtatttacgaagggactcaaaccatcttcagttgtctaggtattcagaagaaaaaaattcagaaggctgggcgcagtggctcacgcctgtaatcccagcactttgggaggctgaggcgggcagatcatgaggtcaggagattgagagcatcctggccaacatggtgaaaccccgcctctactaaaaaatcaaaaatcagccaggcatggtggcacatgcctgtaatcccagttacttgggaggctgaggcaggagaatcgcttgaaccacgaagtcggaggttgcagtgagctgagattgcgtcactgcactccagcctggtgacagagcgagactttgtctaaaaaaatttcagaagtcccggagtcctttccatgatgcatttgaagggccagagagatagaggcatgccctatgtagtacatcttgctgctgtccctcgtgtgtttactctatgggtcaaatgagatggtgttggagcaatcaaaggatacagaccagtacccagcctttcttgtcaagactttgcctctccttgggatgttcacacacacctacccctattttctttagggatctagttgcttacttattttagacagtacatcctttatggccttgctgaaatgtaactccttgatggaatctcctctggtttctttctatctgtccacctcaattgagaactgatttccttcccctgaacccctcaccttcccatagtgctttagctgtagcttctttattcaatgtttcactttttactttggaccagagatatttatgaactttacaaaatctcttttaaggcagatatttcagttctctttgcattaacacaggacttgttggatgattgagtaagcgtgtgggggggtgtgaagagagggttcatttgttccttcctcgtgacagagctgagaggggaagggcccttgctggtggtggatgggccctgagggttaattgggctgagtgtggccacaaagcagaaagacttgctgtgctttctgaacttacgtaagttacaaacactattaaaatgtcacaaacaaataagagaatgaggactgtacttaggttccatacttgtggtatggaaagctatctaaaataaaattagctacatatctctgcagatttctctgattcactctacaaagaagcaagtgtttaatctaattctgcaaatatttgagactctttaccaggcgttgtggaacatgctttatgactggaaaagatgataaaggcatagtttctgccctaaggagctgtttgtgcatctgttggaggatatagatattttaacaggaagattctaacactaggtaggctgggtcctttgtgataaagtctgcattagaaatatgtgagaagaaaagattaacctgagtgcggtctctcatgaagttgctagtatactcttctttctttatgcatttaaccccaaaattatctctactgagatgattcttcttttgtatgtcaaattttacttggcttctccctcaccctgactcctagtcccaccattttaattttatcatgatttgaataatatcacaagggaatgaagaatttattctttttttcaataggtgaacaaaaaaaagtatgagaaatgattgatgtgtatttcaacattgagaaaacccaaggaattaggaagaaagttctctggcatatcaggaaataggaaatgatctcaccaattgctagaagtggttgctcagtctcttggaaagtgcaccttcagtagatagcacttaagtcatagcatgcacgcacacacacacacacacacacacacacacacacacacacacataatctctctgccttattagccatttattctctactgtctttcagtagatgatttcttttaccttgttcctttctaaatattacctccactgggacctaattacaacccctcaaaattcacattacattggaatagatgtgagctcccaatgttatctttaggcattacagaatattagaaactgactgtggttatccattgtgtatgcaggtatataaacctcttttgcccaaatcgttgtcagactgcagtgagaaaagtcaaggaaatatttcttactagcttctgaatgttgtatgaattttccccgaagaatgataataatgcaagctgagactttttatattctaaagtaaacatccaaagccagttttccccttctattaaatgaacctttaactgagctctgaaattgtgaggaaggacatactttgatgcccattattctgttcaatagccatattcagaagagaagtttaattcaaactccagcccatcaaagcattttgcagggttttcaaagcagttattgtaatagagagtaattaaatattactgttttcaactgcttatttataatgtacgaagacattataatgaccccaaagttggtttgcctttagaaaaataaggatacaaaatgctgtgtagaaaagaatatgctatcttaagtctagagagctgggttctagtcccatttctgcttgtgacttagtctgtggccttaggaaaaggcttttcttatcgttgagtctcattttcctgcctttaatgacaaagaaattacaaaccttatatctgtaaggcacttaataatttgtcccctcttcttaaacttgtacaagtgaagttacaacattctatcaagttcagaacatgtagactgtaaaattttacacctacagaacatgtaggtgtaaaatagagtcacccataaatctattacccagatacaggtacaatctatcatgatcatatttatgtattcctttcaagtctttagctattagcataaattacccatcatgctgtgtatctcttgacatcatacattaagcattttccatatcactgcatattcttgaatgattacaattttaataactttaatatttcattgagtgattgtgccatatcttaattgtttcattatttgaaaattttgcgatgattaacatttatgcataaatgtagcttacttcttcaataatcttatatatgatgtctgagggttgagacacacgggtcagaggttaattttttttttttttttgaggcagagtctcaccctgtcgcccatgctggagtgcagtggcatgatctcagctcactgcaacctccgcctcctgggttcaagcaattttcttgtgccagcctcccgagtagctgggattacaggtgtgcgccaccacacccggctaatttttgtatttttattagagacagggtttcatcatgttgataaggctggtcttgaactcctgatctggtaattcacctgccttggcctcccaaagtgctgggattacaggcatgagccaccctgcccggcccagaggtgaatatttttatggttatttctatctattgatgacttgttttgtgaaagggattttttttttttttagctttagtaggaatgtgtgagtgagtcagcatctcccctatcatgctagtattaaatatgttgtttttttggtattagcatttctctggttatttgtaaatttagatatgtttccacatgcctcatttccagttatttttttttattgcctttgaagatgagtactttccaatctttaggatcccattcacagcaaatcaaagaggaaacattttagtgagaattgtgcaattgtgcatgtcttataaaaggttctagaacattttttactcacatgaaggactgtttgaataagttgagacatgccttattcctaaatggaaacatagaggttgttaagtagttgttttccctacatttcgtgcaatcacagttagtacaactctcaggtcaattattcttgaattttaaccaaaaaattctaaattgtcttgacaataaacaggcaaaataggtaaaagaaatctgcaaaataagtgtaatgagcaactgggaccatcctagccagatgctgaggtgcatttataaggcaactctgattgaaggaggaggtggtgctggaatagatgggaggtcaaagcagtaacagaacccacccagacataaggcaactgcacgtggaattaattggcaataaaagaaccaccttgctacattccgaaaaggaaggattattctcatggcattgggataattggtcagcgttaatgaaaaacttacatcatgagtatgtttcacaataaaccctgatataaattagtggtcatgttaaaaaataaaacttgcaaaagtcttcaggcaaagaagaaatttgttatatctgtagtaactgaaagcagtaacttttaagtttacacctgaggtcctcaaactttttctgtaaagggccaagtagtaaatattttaggctttgtaggccagatggtctctgtcacaggtcctcaactctttgtgctgcaaaagcatcaatagacaatatgtaatatgtctcatatataaacaaatagagaatatgtaggtttataggaagagtcataatattgtgaatgttaatttcctgacaaatcgtgtcccatggtgaattttatgaatctttcatttttttggcaaactgtttgaaaaagcatttcatggctattttaatttatatttccctgattattatttaagttgtgtgtgtgtatgtatgtgtgtgcgtatgtgtgtgtgtgtgtttggtatatttgtgtgccactgatgtctctttttatgtgaattataggtagagttaatttatctcacttatttcacctctctgtcacctgatgtcccaataccctggagagctttgtgatatctacaccccagtacagactaataggtcactggtttgcttcagaactagaacttctcctgtgcctttgtgcccaagggcctgggacttgacttttggctcagttctacttgtctgctaacctgaccgcttgacagtggattgaggatggagggcactgagcagttttggctgtgcttgacctcctgcttagtttccctccatggtctcttagaaatctgagactgggcgtggtggctcacgtctgtaatcccagcactttgggaggccaaggtgggtggatcacctgaggtcaggagttcgagaccagcctggccaatgtggcgaaacgccatctgtactaaaaatactaaagttagccaggtgtggtggcaggagcctataatcctggctactcaggaggctgaggcaggagaatcacttgaacccgggaggcagaggttgcagtgagccaagattgtgccactgtactctagtctgggcaacagagtgggactccgtctcaaaaaaaaaaaaaaaaaaaaaatgggactccgtctcaaaaaaaaaaagaaaagaaaaaaagaaagaaatctgggtgagttgttgcctgaatcttgtctgaacctgcctatcccctctgggtcctgaaatctaactgtgggtgagatctgcctttgcatttctgttcatccaggtgagcaaacctggagtttggcctcactctgtccaattgtgttccttccaagagataaaactgagaaagtggtaaagtcacttgcataagccactttcagatccatagaggacccacagcatgagattctgactgttattattacagaggtagaagcgtcattttcttggagctgtgtctccgtgtctttggtgtgccacagtcacaggcctgctcctgcccctccctgcaatctttccattgttgtgtgtggtacaggaactgagacaattatgacagagccgagctggtttctcttctcttttggacatcattgtttgtcacaattctgatcaccatttcttcctctagatcacaaaattgtaaaatcactgctatatttacattttcttttgctgcctgggctttaaaaagtactatttatagctttcctttgaaattcctttattaatagtcttccttcacatgtatatcactctgctatttacaaaatgctcttacgtttagtatttcacttgatcagcataaacacccatgggataagctaggcaggattgttgtctccattttacaggtgaggaaattaaggctcagtgaggcctggaaggccctggcctgcagccactgctggaccgggtgccagaactgggtttagacgtcttactagatctctcttgctgtttttctttccgtctacaaaaactccttctcatttatgagtttcaaagattttcttgtctgacacataaggaaattagtggcttttcttgagagatctaagcattactgcatttgcctaatatttcttttactatacctattggtctgagtactttaagagaaaccagtgtctgtaaataatcttccttcttgtcagacatggaggcagaaattttccaagaagagagagaccctgaagacactgtttgttctctgctgttcttaacaagtactgcaaccacaattttggatttttctcctcgaggctttctagttgtaggctgccacagaatacttcggggtcacagattcctattcccttttaaactgtatcgggcatgtgtgttatgtgacctttgtgttctgaccttcagatttagggaactgaagatttaggaagtcttgttaggacttaaatccaagtaaattccctcatgagtacaaagactcatctgtggaggtgtggaatgttggagagaaagggactttcattcatctagccccctgggttagaaaacagggctggtgagtgatagagctgaggctagcatgcggagatcagactagattcggctttctgctggcttcctccatatcactcagtacttctggagttgtagcatgcctcttccccctggactgggagctttgagagggacggcactgggtgtgctctgtgcacggctcttctagaggtgatccaagtgctttgcataggcactcaggatttatttgcttgatgaatttgaacctgtctgttgttgataaaatatcattattgcccataaggatcttgagggagtttgtaaggatcttgagggagtttcagtcaggattcactataggaaacaaaccactttagatattttaagtggaaggtacttaatacagggtgtttcacagaagtaattagatggactgcatggagcagaatcgaggctgtctccagaaatgaatcacaaaactgcacaaaattattccattttctacaatcaagcaagacaaaaatggtgaagccaccatgggaattactgagttcagtgatacatcacaaaacttgtgaaacagagatcaaaagccatagtcagaatgatggtagctggacactgagacatgagtccagctacttactctttttgtcacggctgctttttgacagccaccaagctgaagactcaatatgagaacacagatgctgaaaaaccccatgtctgtgtcaccattcttctaacagaaaacagggcaaacagcagaaacatgtcttccatcttacttttgcctttcaaatatcaagccaattacatatattttggtagaatttcttttgcaatcaaaccttacctgcaagacagcctgtgcaatatgggaagtttgagtgtcgatctaccatatccaccacattaagggtgatggttttcatatttcgggcatgtcttccataaggctttgtgtgtagtagatattaagttggaaccagagtaacaattacgttctattacatctctacttgtcagtgtagttaattatataacagaatggactgcaacagttttactttagggaatccctaagggggaattcctatttatcagaaaaatgctgtaaggagggaagaccctgaggtgggagagtattctaaactgttttggtttcaaacatcttggaaagtactacatggagacatgcgatattataacatatcagtgcttaccatgtctggggggagttctgtcttaaaaaagcttgcctaccttctatgctgttgctccctcgctgcactgttttgaccccactttcctcctcaccagccaaatacaagttttgcaatgagaattaatgtaaaatggtttctttataacaaactaaataggcttattcttaaaaggaaacatagaggttgttaaaccgttgttttccctacatttcatgcaatcacagtacaactcacaggtcagttattcttgaattttaaccaaaaatttctaaattgtcttgacaataaacaggcaaaataggtaaaagaaatttccaaaacaagcagaatgagcaactgggaccatcctggccagatactgaggtgcatttataaggcaaccttgattgaaaaaggaggtggtcctggaatagatgggaggccactgcagtaacaaaacccacccagacacaaggcaactgcacgtggaattaataggccataaaagaaccaccttgaaacattccgaaatgttgagccttcactgaattcttctgacttttccctcaactctgtgtaaccccaatttagaaatgtgaaatagttgttagtaatcccttccacctttacattgtaccctagtgagtgcatttggatgtattttagacacattttttttttcctgctccaaattaagaatcaggcaacatattgtccttctagtacttgtaaccaagtatatattataaaatcactgataatctcgtatgtgtggggtcaggtgttaaagatataattgaagtaaacactcttgatttatttttatttttattttaagaaaaagtgacatttttgcttcaggagaaagaggctgagtgaataggttagttgataatagtttctgctaggtttctgctatatcttgcttttctcccgaagattcattttagtaccttctttccttcttaagagcacatgctcctaaagcagggaagcccccaaagcctcctctacttcccgttgctaattgctgtggcctcttatccacgccagtaatgaaccaaaagtatgggagggctttagccatatggaacttctgggagaggacttgactgtattcaggattcacttggactaaacgaccaaaacctcattaacacagtgttttcagtaggtgattatatgagttatcgtcaaaactgggacacttttgcaaaggggcactgttaataattacaccagaacagcaggtataaattggagatgtatggtcatcctaattatacagagccttcaagaacagtgtttgaaatgtgaattaaaacgattcgaaaccagagcttaagttctctagtatttttcatgggtttaagtttaccttctcttttatataacaatcacttgctgagatctgatgatgggatatactgtgtattaggtcctaggaatatatagataaagtagataccaattttgtttttttcttcactcacagtattgtaatattttagaccagtgggtttccagtctggcttatagcatactggagatactagggcaataatgcattttatgcttcccccaaattaaagtatgttttgccaaagtgtgatgatttaaatgcccctgtaatggttttattaatttttctatttatacttggggtttttgtttatgatttggcatgaagaaaccatttattttgctaaggaaaagtttgaaagctactggtttgagacttaaaaatttatctttaatatttggttataaagtcgtaaggctactttttaaagaggggaagaactagactgattaaagctgaaacacataaagatgtaaactgagtgggaaacaaataaattacctgaaatatataaaggtctgctatgtattagaggttttgtgattctagagggcacaggtaggaccaataggtggtacttatgggaatacaggcttcagctgcagaaaactttctagcagtcataacttttctgccatggaaggggctgtcttgtaaggtaatgagttccttgtcattggacatgtacaaatgaactcacagatggtgggtaagcttcatcttgagctccacattagataaaatgtcttcattaacaatttcacacttcaaggatgttaaacttctgtattggtgaatgttgggtcctttgctacttctttaaaaatatctaaagtgtgtgtgtgtgtgtgtgtgtgtgtgtgtgtgtgtgtgtatgtatttgtgttttatttccccagaacattagctgagtatatttttcatgtattttattttatatttttacacagtggtcaataattgataaaaatacagaagctactacaacagttctctcatcaagggaaacttaaaagggataatgtccatagatgtgattctgaaactgatttgaaaaagcctggttcatttttactgtgttgccattggttaatgcttaaccagattttgtctctgtttcaaaatcttgaaataaaagtggaacaacttccaacatgacttaagaaaaaaggtccccagttgaaaatgcttccaatcgttttgctattaaatgtgaaattgcaaaactagcctctcttacaaaaactagtgagaagcttgcctgtttttcataccatttcaaatactgagaaataatttctctaggctcttggaattagagttaaataaaaattatatttcagagtatataatgcatgaagttggatttctttgttttctaaaactgtatctcatggtccttgaaggttgataatttatatctctggtaccactttatttttctattatttgtggattaaaaattttaaatttagcaatatacttatattttgctttagaataaagttgatttttaaaaacttatttagagacagggtctcattctattgcccaggctggagtgcagtggcatgatcgtggctcactgtaaccttgaacccctggtctcaagtgatccttccacctcagcctcccgagtagctgggattagagaggcgagccaccattcccagctaatgttttttagaaattattattattttttttttccagagacacatcttgttgtgttgcgcaggctgatctcgaactccaggcctcaagcaatccagggtctcctcccaaagtgctaggattatatgtgtgagccactgctcccagctgagctttttcttaatagatatttaagatgatatgtaattagagaatcggagattaaactggaaactttaatttacaataacaataaaatattaattcaataatagtaatttaaattacaggccaggtgtgatgactttaatctcagcagtttgggaggccagggtgagagcaccgcttgagcccaggagttcgagactagtgagaccctgtctttacaaaaaaaattaaaaaatttgccagacattgtggcacacctatagtcccgactactttggagaggctgaggtgggagaaatacttgagtctaggagttgcaggcttcagtgagccatgatggtaccactgcactacagcttgggcaacagagtgagaccttgtctctaaataataataatgataataataataaaaataaacaaataaataaattataatgtccaaactcaattcaaaagctctaagctaatttatagtagttctgatgtaggatacaaacaacacagttgacagttttgtgaacaatatgatgttcaaaaggctgaagtataatctctaactccccatcttgttgctatgattactcttagcagattatgtggcctgaatcaacattggttcacagtcacaagcagtgttatcagatgtaaatatgtcttaacgttcatcaatagtagactcatattcattgaaggaaaaattaagaatttctactttttcaagttataactaaaattgcttttaaaatcttccttattttattgagatatcaaaataaatattcaaaaacagaaaaatacaaacagaatcattaaaaaattaagataattagaacatcctaaagtggtagcaaaatctcatggcctgactaatggtcatgacacacttgtaaatggatatctaaaatggagtgtttacatgttttaatacaagtttgaacaagctgtcagggaaacacagctaagtgagctgcagttaacttgcagacttacacagttattggtaggtttagaaatagaagatgctagataaccattaaagagattgctaggtctcattagagatcatattggtgatttttcctatcgtcactttttcctgggtgaggggcaaaatctttatgaattaggcacttagcgtctcacctttacaaatccagatttccacctttagaagcagatttactgaactcaaagaggtgcaggctattgttgcctgttttctcttggccttgaacagaaaagcagtctataagaatcaaggacttataagaaacctgctaaggagcccgtttttttgccagcactgcacactccacagactagccataacattgtggatcataagaagttgtgggaggagattttgaaggtcatcattagttgcttattattttaaatctgcagaaactgaggtccagagagaattcacattttcttggttactttgccacgtggaacaattgttatcaaatgtgacctggaatgcaaggttggggccatttatcttctgtgctaattttcagtgccatggttgcgaactttcttggcagagaaattgtttacttctgtgccctattccattgccttttacctaccccatctagttataatctagcaatagagttataagcttgtgtaatcaaactttcccactgcagatgctctttggagacagaatatttgggtttaaacccagcctctgatatgttctagctgctctattacattggataagtttctttagcttctctaaatctcggtatttgaatactcaaattagaagacgtaaattatttcctaagatttctcctagctggggctctctatgaccttttagctcttaagtagtctgtcctggctattgtcaaccatgtctttttttccttgactgatagaaactgtggcaaacaaaaggccacttagtcagtatttgttccgtccttaaccttctctcctgagagtcctgatctttcagtgctgttgtttccctgtcagggttgattgtttccttttcgagtgccgttctgaatctgaagtgaaagtgcagcgtggaggcatgtcactgttgtgtctcacttctttttcttttttttttttgagatggagtttcaccctgtctcccaggctggagtgcagtggcgcgatctcggctcactgcaacctctgcctcctgggttcaagtgattctcctgccttagcctcccaagtagctgggactacaggtgtgcacctctgtgctcggctaatttttgtatttgtagttgagaaggggtttcaacatgttggccatgctgatcttgaactcctgacctcaaacgatctgccttcctcggcctcccaaagtgctgggattacaggtctgagccactgggcccggccgtgtctcacttctttatctgagacaatgtttactggtctagacctgatgcttctctcccttgctgcttcgtagtttatttggatcctgaaatgccgctgagtttttcttgtcacctgcagcattgccaagaacaaggagtgcaccattagtgttaatttattttttctggtactctgtgcaaggcagatgggcatttaatgtgctgattccaaccctaccttccctcatctacactccctggtctcataggagttaaaacatagttttgtaagaaaccttagctccttgaacttgtggacttgtgggagaatcatggaaacatgagagttagagggaatggtagtggatatctaatctttagtgtacagataggaagggtcactgaggttcaaagaggttaagaacgaaagtcatagacccaattagtgactgagctagatagaaagtacgcccaagtcctctgcatctaagtctagtgccttttccagtttttccaaatgtctctcagatagcctatataaaggtttggcatttctgtagcgttgttctctcgttacctcttctgagcaatgccagctgtccatgcagagagtggggcacttagccagtgctgggccaaagctgtctgtaagaagaagttgagtgaatacattgacattttcagcccatggtagatcctgctttgcccttccggctctatgtgacctgatgcttcagaggaagagtgaatacatttgctgttcaactaacaattgtgtgtaattttcagcctgccttattcttcaatgctgtcttcccacgcctccaccacatgccacagcatatctgcttcgcaattacgctggtagggacttaccccgtttggaaaaggtttgcctaaatacttatttacttgtgcatgatacatcttgattgataccttgttaatctctgagatcaacccaagaatccttccttcaagggggaggatagaagagtcagggaaacgggtgacagaaaaagagaaaaagaggactgtgcttcctcactgatgagcaaagaggagaattacagatgatatcaaaacaatgaggagaatcacaggtgatatcgaatctgctttacttggcgttggctacttgtaaagtcaagatctttcatagactcataaaagcttgtgagcagagttgtcatttgtaccatctaattccatcactacatttttcgagaaggacacaagatttcagagataacggaagttacacagtgggctcatggcggagctaagactagaagctgggtctgaattctgaagatcaggcatctttccactaaatactgagatgtgaacaataatggagagccgtatagcccagaggggaaaccacattataccactttagtggatgattaggaaagcagttttgaaattccaggaaggtactgacttttgtataaagagaatgttttaaaaaaaaaaaccttcaaagttataggagagtgttatttaaattgtaacagcttgtttaaatgaagaaaatgttgctaagggacatgaatgctaaacgttagtctgccatcagctacttctgatgtttaagtcaaatagtccctcagttctgtggtgttaatctacgtcccttttctaatatcattcatttattcagtgcacactgaccaagagctaggccttgagttagttgccaggaagatatagggactaatacaatgtcatttaaagattaatagaaatgctctaagtcaattattctcaacccttgaatcagagtatatacataaagatccccatatgaggttagtgtgcagactgttttgataaacactactctaagtttattgcactggatgttggataatatgatgtaacggttgtttgtttttcagttttggtgatctatataaatctttttagaagagtagcatattgatttggacgaaaaaaaggaaaatatgaccaaacactacttctttctgtttttgtgggtgacagtgacttgacattcacatggtatcctgagagaggcttagtagctttgttagtattaattgtcagtttgcctatggcactaagttttcccacctatgtggggcgggtcctggtcatcacatagccttttgtagttatttgctttctgttgtgccttgattttttttttctgttgactattggcttcatcactttgtggtcctgtggcttattatgattagatttgagggtacagaatagagaaaacattatggcaagtagaattcaagagctggaatggaaataataagagcaaaaactactgttaagtgctgatttcctttgaattgtggtgttttcctttcttctccaaatagggaggtagtacagagtgaagaccggagatttggagttaaagatctgtgtcccagcttcagctttgctatttgttagctgtatatccttgagcaagttattcaacctcttacagtcttactttcttgatttgctagatgtgggtaatgatagtgctacctcatatggcagtcaggatgacagtgtggccattgaaaatttgctagacatataataaaccttcaataaacacttgtttattgtcagtctctagtcttcttaggaccgctgggggaacagacagaagagcagcagaggagttgataagtgaaacctcttaggttcttcttaattgcttgcatgtgacaatttctgaaagagcaatgctgaggaagcagcagctccccagctcccttcagcagtaggcatcttgcttagaggagggccactgctcttgctttcctgtctgctgatggtggttgtgtattctcagagcctctctggaaatcttccctttcacttcttgctttcatgatgattatgaacttcaagtgaaacctagctagaatgaggggaagtaagagcagtgtaaatcttggtccagcaacaccagttctcaccactgcttatttttgtgtttacatgggtctctcttagaagccaagagccccaatgatatgtgctagttcatctgttcattaaacttgtgaagtttcatcaaacccatttatcaaaatgaagggctgtaatgaagattttagagaaagaaagcactctaaaatattagagctgattgggactttacaggtattcattttgcaaatgagtgtcatctcttgttaaaggtcacacttatatagctgagactagaactggggccacagggactctatgtctatactattggatttatcactttccttggatccatcctacatgattcaatttttaatacctggagttttcactcttgttatcttcctattcaaggataaaagctctagcttcttatctttatataaaacctttaaaaggcagaactcatgttatcttttaaaactttcccctaactgttctccctgaatccctcattttggtgccgctggtctgatccctgtcctacagaaatgccttgcttcatacccaagctcacagtattatttctaatctttgccctggttactccagttttcttttatttactcagcattcaaagtcctggttaagggctacctctgccaagcttatgctagcttttctgacatcccccaagatttttcatgtgctttctgtgttgctctctttctcttttcacatttataaatatttcttcctcaaatagtctttgagctctttgagtaaagaataagaatctgattcatctatagctccagtgccaggcaaataaattcattcattcattaaattaacagacatttttattgagtacctatcatgtggtagcccctggaattataaaatgataaatatttccactctcaaggatttgcgagtttagtttggggaacaggaaagcagatgggcagagcaccatgtgacgaatatgtgacaacagtatgtagatgctgtgggattgtactataaggatgtataacttgaactgtagaatatagtgcaagatttgccttcaaggactagtagaaagtaatgcttatgatctaaattgatgcatagtatgttggaagtcatttttagacaagaagtagcttgtttcagagggagcagagatcaaacctaggaaaaaaatgtgaatttctatcagaaaagtactgcaaaatgacctcagaataaatagaaaactactactattatcatagaagttactggcaatatgattaatgtctgttaaaagaagatgtatttagatgactttatgctgaatttggataacctttaaaaaaccagataattccagtgtagttattaaatatcctagacagtagaggaggttggagaaaactcccctatcaaaacctaatcatgataagtaaaacaagcagaaaaaaatgctataaaatgatctttattatgattatatgtacacaaattatagataaaatagcctagttaattcattaatatatcaaaacacaagtgtaacaaaggatttattctaggcatgcaaagatggttcaatatgtagactttatcaacatatttcattacatcatcaaattaagggagggaaaaagagttgaatgtatcagtggttgctaaagagggcactgcagctgtaactagataggattttattccacaaatgccaagatagttcaatatctggaaatctatcagcatgcttcattacatcaccaaattaagggaagataaaagagatgattgtatcagtgaatgctatagcaattctagaaagatatgagtaactaagaaagagtaacgttcattcattctcccatttctatgtaacatacttgtttaaggggcttcctgcctaggcattgtgccggtatagtgagactagttggagtttccaacttgttgggacatgtaggcaggtaaataaatggctttcttgtggattgttataagtatgccgaaagtactaaagagcctagaaaaaggaattaggctactcttctttggagaagttagggaaatgttcacagagttagagacatttgagctgagacaatataaaaatatagggcttggtagaacgtgaagagagggaaacgacattgttgatggtgaacacagcatgagcaagggttcagaatcttgaaaacttattataaatcctgggaatggggtcactgggtcactgctgacatgcagaagaatggtaagagaagatactgaggaggacatctgcaaacaaatgattggtcagaagatgggcctctcaggaggagcagctggaggtgcttcttcatggagggcagcatgcgggtaatttatgatgctggggataactgaaatgactgtggagccaatgatttgcatattgatacttacattttatttatactctcccagaaattgcctgtttctttatatctgtgctatatccgaaaagccaagatgatacagtcagtcagtaacttgggattactatgaaaaatgtgaatctttgcttaagaaaatactgcatcctatattaaccaatttttcaaccttttattataaaatgactttagatttatagagaccttccaaggatagtattaagccattttaaaaattataattaacatttatactaccaatgtgcataatgcattaaaagttttaaacctttacttgatcccttttatttcacacttatattcactttagtcatactgaaagcaaaccagtcacttttatcccaatttagtagaagaccaagcctcaattaaaagcaaaagcaaaaccaaaattggcatttctcagccatgtgagatgggtttggttttggtatttagaaaaaaaaaatcatctgaagttattccaaatgaacagctaaatttaaaaaccacgagtaaaacagacattcattggtagtttttctatattggttttgtgctaggccttaatggtagtttataaatgtgtaaaatatggtccctacccttttaaggaactcaagtttagcaagtatgtatgtgtctttgtgtgtgtgtatatatatacatgtatgtatgtgtgtgtatatatgaatatgtaaaaggtacgggggaaagaaaaagaaaagaaaggccctgtaaccagagtgaaaagccagtaccatcactggcttcaatagcatgtgtcctgattaccagtttagagtctttgtcattgattcatgttatcctcgtcttttaagaaaactatacatcaagctgttcttccaagcaagatggtcataaaattgccattgactttctacaagaatagaggcttctttttttctcactttgcatagcactctatactataaaaagtactttaatatcatctcattggttgccataaaaattctgagagttaaggaagacagaggtttatatgtttgtttgttttttgagagaaggtctccctctgttgcccaagctggagtacagtggtgcaatcacagcttaccgcagcctcaatctcccaggctcaagtgatcctccaacctcagcctcttgagtagctggaacaacaggtgtgcgccattatatcctgctaattttttaattttttgtagagaccgagtctcattctattgcccaggctggtctcaaactcctggcctcaagtgatccttctgccttggcctccaaagtgctcggattagaggcgtgagccattgtgcttggctgagtcctctgagacagtgaaactatctgaggctctagaggcgatgccgttcaaagtcatgccacttgttggtggtgtggactgatgtgaatatccaggcaacactgtttcccagctctcccctccaccctgtctctctattactatgccatgtactgaggcctttgatttctgtgttctgatgctctttgtctttacagacatctggaggtaattgtgtagccctcttaattaattcagttcaattaataaattagtaggtggcttttgggctgggggcgcttacagggtgccttccgggcgtccctgtgctggagagctcttgcaatcaggcttggagagccctcctcggcagcagcctctgagtctcatccccagcaggcaggctgactggagaggtgattggcttaccctgacagaggagacatttcctctcttcaaatattatatgcaatctgatcagagcagcatctgggctgggctgattgttcccctcctagtttaagcaagcttttcatgaaggtccaacatggtatcagctcaacatacaagttgatgggcatttctttgttgtgcggggctgacctttgcattacatgtgttgaatattctatcctctggtcctaaattctaataattgtcccagacgttggggcaaccaatatgcccctcttccccttttccacataccccttggtggggaccagagctgctcctgcagatggatcatttaaaagtgtcctgccaggtatctgttaaaaccctgtttccaaaataaactttcagtggttccttaatgcctgaagaataaatttaaactcaactgtggctgctgagctgtctgtgctttggtttcaacccaccttttagttcttttgcttgctactttctgttattcgccctccaagcacactaaacgtaaatgctgtgtacttttctgcctgtataattttgccaacatttttcaggttcaaccctacttagcactcaaacccagtctgtatatcacctcatcaataaaatcttgttaattctgcccccaccaagaagtgagcctatctttttctgcatctcagcaacacttgttcttaacctcacttaggtaacttagcacttcatttaggcataaccatttaattggtgagataattaatttaatagattattaataaaattcaagctcttttccatcctcctaccataaaatctccttcaagttaggaaccatttcttattcatatctatttcccaagagtggctaggcactaaaataggtaactattggaagggagatattcaagtttgaggcagtgttctcttcctgctcctcctctttctctttctttctttctttctccttttcctctccttcctccttttcctcctcctctttctattcatgattcctctgcctcttcatttttctttcttccattttctttcacccttctttccagagaactttatcaggatgcatttagtatggattaaggtgaaatagcaatgaaatgaggagtattgtcttcgttttcatgcttccataaaaacagtgtttctttttcattgcagattccaacaatgtctcacccatcttggctgccacccaaaagcactggtgagcccctcggccatgtgcctgcacggatggagaccacccattcctttgggaaccccagcatttcagtgtctacacaacagccacccaaaaagtttgccccggtagttgctccaaaacctaagtacaacccatacaaacaacctggaggtgagggtaagtgctgggatttcagagttggttacttggagtaggaaaattcagttatataggtgatttgtagtacaaagttgtgtcagaaaaacgtagtttgtgaattcacagcgtgggtgtcataggctactaaaagtaaaggagcccccggaaatagtctagaccaaccccgtcttttaggaaaaagactttttatgggttatatggctatggttacataatgaaatagggttagagctcaaactagaaacctggactctttagtcacagctcaatgcctttctactgcgttatcttccacctccagctcattctcttgtagggttttagctaccagacagtcatccctccctcttgccgttggacaaatgtccacaaatgctgccaagcagtagtccaatcagaaacttatacaaagtgaacctaataaagtgcatggaattgtttacctcctctggctgtttttcttcccttaggctgctgaaggataagttgtctagagtgttctgtgagatctgcatttgttgaatctcccagacaaatatgagtgaagcctagttccaggggttttaataacaatgcattcagtttacatcaagtagagtttgaaggtctacgtgagctccagctctcatgtgtatgtatacactcacacacgaagcctcagaggcagtataaatggtaccatactctttggttgaaaaggttccatatttttaccagtgaatgttagcagcttattcaaactcaagaaaaaataacttaaaataaaaaaaaaaaaaactgaagaatattagacttctaggagctgagagagaagaggcagtgaaaggagatttaactccctttgttttctgtccctgtcccaccattaaaaaaattattaatatcttaccctcttcatgatgtttccagttgcttcttggatgacattaatgtttgttttgtcaatattgcacgcaagtgtttcacactctgtgatatagtccagtcctcctcttttctttcctgtcctctcctgcgcccaggaaacactttactagtctgttagtattttgggtctgatgccagaagcctagttcagatgtctagcttgtgtaaggtgaacacctaggttgggtggtagagaggatcaggcttcagcatgcatggctaagctgcagctgtggatctttggatatccttttcctcagaaagtacaagaacgagaccctcagaaagctgctcttgaaaaacaataaatgaagcctttggtgctgtactaatctctgtagcactccatgatgttttattgccttagaaagagactgcatctttgcagttaatcaagcacttagtggaactggctttctttgactcatccttctttagtgacttcagggcttgggaatgggatctggaagagaatctctcttcatagggacaggaggagccatatgttggcttcctcatttatggttttttgtttttttttttttttttttttttttttttttttgagatggagtttcactcttgttgcccaggctggagtgcaatggcattatttcggctcactgcaacctccgcttcccgggttcgagtgattctcagcctcagcctcccgtatagctggattacaggcatgcactaccatgcttgactaattttgtatttttagtagagatggcgtttctccacattggtcaggctggtcttgaactcctgacctcaggtgatctgccagcctcggcttcccaaagggctgggattacaggcgtgagccaccgcacctggccctcatttatgttttcaatgtttccctttgtcagcttactaggggcattgttattttgtctcctaacttttggggaaagcttcagtggacctctctctaatctgaacagaatacagacatggccagttatagagcagaaggcaaaggtgtgaggaagtctttgtaggtatgagagttcttataggcctgagcgttatggtgagggcaggtcctatattaagtgggctcataaatggcatatatgagataggtagaagagaagcatataatggcctcgctttagactcctttactgtgaatttgacatgccctccttgtactatgtgtggttcacccactgtcttactctctaggaacactgaagtgatttgtttgcgtgccctgcagcacagtccttggtcccctctcaacatgccaccccacacgtttttgttacctgaaaattctatttgtatcactttctccaaaatggctaggtgcagcctaggtcagaattaatcgctccctttcccgagtttccacatcttattctttgacttatccaaatttctaccacttttgttattgctcctgcttacattctgtcccatattgaacatgtagtatatgccaggctctatgctttctctttattattttattgccttcttatgtaaccctaaaaaatgtttttttttttttcttataaagaaatggaagcttaaaggaggtgacattctctatgatttgcttggagtatgtttctgaactaaggctgctgtccatatccagcatgcggtactgcctgtccttctattcacagcacatgtggcagcaaaccccatattacagtgatacatccctgcatcccttataagaatatatataagctttgcttcctcattgaagcaacaagacatggtttctcactcgtccttatgttcctcatagctcatattatgctactgtgtttttagtaggaatggttgcatatggtcaaatgtatgtctgtgtgttcttatgtatgcatatatatttggatggctggcggatggctggctgggtgagtgcactgctcagtgatgcttctccaaagcagtttggaatatggtataactcagtcttttgttttctgaaattttggctctctcttgcatttctgccaattctcactctttttctctctccccctctctctaaatataataacctttaccttttctgaatatgcaagagaagaaattttcctttaatatataagttaaagacaaatcttgggaacagtttatggacattcagactttttaaaatagaagctacatttctgcatctgctgtatgaaacaaagatgtatccatgtatttgttggaagtagatttgcttttctttatatttaatttaaatgttatcagtgcattctgttactctgaacatttttgtaacttacatctattgtgtttgtttacacatttaaacaatttataaccattccttttcgtttctttttttcatttagaatgttctatactctcagtgaaattcccaagatagtaggtagcacaggttttatttccaggatgcattggtgataccagcttatgctctgtattgcctcagctcatgctgtttttggcttttagagtgtacttgtcccccagtttcctgcttctacagtcttttaattcattgcttaaaagttgacctccacgaagctcaaccacaaatgcagaaagttagaactaatagaaatcacgcaatccatcttgttctgacgtaaatgtgaaaactgcagtctagagagtgtaagttatttgttcagagaagcacagcctgctctgagccgagttggcactcaagtcttttccctctaactctagagttacccaaaccttgtactatattctaatggcaaactgttctttactaccccataccctcatgcattgcctacaattcttatgacaatgtgttttttaatagatttgcttgtatatgcacctgtcttctctagcggagtctgaactttgagagtcaggggctgcctgactcatgccttttccctcaacagcacctagcaggatacctgacacatactaggaactcaatagtgtttgcagaactgaattaattgataaagcacagtaatataaacctacttctccagacacaggttctaggttctcagctacttattagacactgtggttctgcagtttcaacccacgtctttgcattacttttccttcctatgcccattctttgaacttacatttctcaccttggtgttacgtctgtaatctctggagtttgctttcccatgttttaattctgactgtgaaagtagaaaaatacccacatgttttccacatcaacttatctttctggggtacccatatttataatttcttttataagatattctgataataaccattttctaaagggctttggcacactgaaaagtggggcatgctttttttcccagttagtagctctttagatctcagggtccttttattttacttccattgttctcatttcttttcactgattttgtaacaagttgtgttttcatagctaacttagaatacccctacatttccaaatgctttctctgtgttcaatgctttgtgcttacgaactcatacttattttttaattaaatttagtcttcttagagattttttttagttcaatagcttttggggaacaggtggtttttgcttacatggagaagttctgtagtggtgatttctgagatttcggtgtgcccattgcccgagcagtgtacactgtagtcttttatccctcacatccttcccatccttcaccctgagtccccaaagtccattatatcattcttatgcctttgcatcctcatagcttagctcccacttataagtgagaacatacaatatttgattttccattcctgagttacgtttagaataatggtctccaactctatccaagttgctgcaaatgccattatttcattcctttttatggctgagtagtatcccatagtgtatatataccacaattttttatccatttgttggctgatgggtatttagaagatatacagacaataatcatatgaaaaaatgctcaactcactgtccgggaaatgcaaattaaaaccacattgagataccaccttactcctgcaagaatagtcataattaaaaaaataataaatgttggcatagatatggtgaaaaggggacacttttacactgttggtgggaatgtaaactagtacaactgctatgaaaaacaatatggagattcactaaagaacgaaagtagacataccatttgatacagcaatcccactactgggtatctacccaaaggaaaagaaatcattacatgaaaaagacacctgtgcacacatgtttatagcagcacaattcttaaagattttatagtgttaactatttcattttttgtgaaattattttggtatatatttatgatgttgttccatcactttctattctgtgtaactgatgacaacaagataagataatgcaatttttcttctggtcttcaaaatactagcctttagtgttgtttgtcctataatctgggttttcactctgctccaaatcaaaaaataaaaagatacaacaaacaacaaccaccccacccccaaaaataaaacaacaacagcaattaaactcagtcttagactttgatggcagaacagtatagttctttttctgtttttggtaaatagcaaagcaaatgaactttcctactgtactaatataattttttaaagatggtttttgaaattatcttactaatacactctggggattagtgttaggttgcctttaatggcaaaaaccacgattacttttgcaccaacttaataactctctctctctctttctctgtctctctctctctctctctctctctctaatttggctgaatgaaatttgataatactttttatccatcattaaaatagataatcatttggaaagatttgtaaagttcacgtttgtgaagctggagttgtcttgtggcctagaattcactttctttaatttctgaaattctttttaaaaaacatttttatgttagatttttgaaaaaacaaattggcatgacatgccagttctcactctttttctttctccctctctctctctaaatataataacctttaccttttctgagtatacaagaggagacattttcctttagtatataaattaaagacaaatattgggaacggtttgtggccattcagactttgggtctgcattaggtaccaattcaacgtgatcattttggtggaatccttttatattggtatactcttttatagtttatttagcagttgcatgttcattgtcttttcatttcagtagaaaattcttactgtcactctctgaggtaggtagaacagatgttattgtcattttgatgatttgtaagtagtagaagtggaagagcttaataaggaatcatgtagctagtaaaagagtagagggagaccctcacacctagggctcttacgaattttaaatgctttcgtttattaaagcgttggctacacagtctgatgtctcctttaacttcattattttattatttcatgattcttctttgaaattaatttcaaaatggtgaccctttttacaaaccagctttgtgaatattggttcacatagacttgtcaagatagatcaagataggtgaggtgaattatattaaatagggatcctaagcctggattatttttttatgacatctttctgtgctttctgctactgtgaggttacgaatgtattattccatggaggggaaacagttatagatgattgctaatctacccatgagtttggggctgaattgatccagaacccaggtttcctaaatgcactcattcagctgtaccactgtggtttatgggaaccaggcaagtttggagcttggttcctaggaactgatgagtcctggattattgatgcttggtggagaattagccattagtgatgtgaagccatgtatcctgggtaggcaggacacatttgttttcttagcagataactaacatgtgagggaaatggatgtccacttatggcattatatttaaaggaataatttagactggattttccccattatttttgctgcgaacgtatggtcctcatggtgtgcttttctgtctctggagtcttattgtccttttccccatgcaaagagaatcttgctctgactttggagatacaaatgggaaacatcttttttggaggttacaaatgggaaacatctttttgtaatcctgacagtcctgttaattgcaattagagactgcagttgtaacatcttggacgtttggtataagtatgcgtgttatgccatgaggatagccacaaattcacggaaacatcaggaactgtaatgaagctcgggtttgcctgtcatgccccttttctggatgagcgtaagcatctcgagcctcatccatcactgcacagtgcagtgcatgagttttaattttcaggtcctcagggggacaaaagaacaagctgtgtattcattaaaggatcaaatattaattgtattaatttgatctttacactgcatctttcagcagagaaattaacttgtaattcttggagtgacatcagatcttaccaaatattcttaggccttattgatgctcaaaagtgccaagatgcagccctggcttgatggtcagtgcagttacattcaagcttcagtttcatcacttggccttgggcatgatgcttttctaatccatatcctctttaattcataaaatattagctggtaataccaactgcctcacaagattgttttgaaagccaaatatgatgataaatgtgaaaatgtttttaaaccataaaataccttataactctaaggagttactattatatacttattcagcagtcatttacttaaaacagattttgtgccagatactcttctaggggctgaagtaatggcactgagtgaaacagagactagttcctgccctcttgggatgtattttcttgctataataaaaataacattattaataataatagtgataacatttgtgaaataaaatttatttaataaatgcattttataaccttacatataattaccaataactattcaaaattataaaaaatactttaatataggttaagtaactctaatccaaaaatctgaaatcttaaatgtgaaaaaatctgaaactttctgagtgctaacacaatgctcaaaggaaatgctcacaggaacattttggatttcagtattgtggattagggttgcttagctggtatgtgtaaatattccaaaaatccaaaaaatctgaaatttgaaacacttcatgtcccagatgttttgtatatgcgatacttagtctgtagtaatgaatatgtgataatataagtataataataatttagcatgttatccataagtactcatgtcattagcttctaacaacagtgatagagatcacaatgcctcaacactatataaactgtaaaattctagaaccagggtgaatcttaaaagttatctaatacaacccctttctttcctagatgagaatagttgagaatgtattcactaatacatttcagcgaagtacaggttctttgcccaggagtgctgtaaataaccaatgaaaattcttgaatgcaggcaacaatttaatcttcatttcagagactcagagaggcaggtggcttgttcagtattgcagattagtaagtggggaagccaagccatgatcctggggattccttctctggttgccatagacacgttttgggggacttgtttagaagttacagtgattgaactaatatacccgaacaaagtggattggatgttttagaacaaggagaagtccctgtattgttgacagaaatctcttttattttgtaacttgtcagcttaattaactactgaaatgagttccttaataaggtgatgggtgcctcctaattcttgtatggttcaaaaacaataattaatgctgatttgtgtggtgagatacatattaatcatctttatttttgaattatacaaatatacaatactattgtccctccgtattttacatctgaagagaatttaattgcttttttgataataaaaataaacagagagccacaaagagatatcaccacacatgtattagaaaagctaaaataaaaatttgtaccagatgctgctaaggatgtggagaaatgatctctcacaatgctggtaggcatgtgcaaaattttgtagccacgatggaaaactctttggtggtattttacaaaagtaaacatgtactaaccatatgactcagcaaatataccctttggcatttaatccagagaatcaaaatgttatgttcacgaaaaaacctgtacatggatgttcatagcaacttttttttttttatcataatgacaaaacactggaaacaacccaaatatcctttgatgggcagatgtttcagtgaagtctggtacagccatacaatggaataataccattcagcagtaaaaaagaatgaagtattgttggtatatgcaataatctggacatgcttaatgaaaaaactgtctcgaaaggttacatgtattatatgatttcattttaagacaaagctctagagttaaaggacatattcatgattgctaggggacagaaatgggtgggtcgggggggcaagtactggtcattcctacaaagaggacgcagcaagagtctttgtatgggtggaacagatctgtacctcaattggagtgatgattacatgaatctatacatgggataaagttacatagaactgtatgcacacacaaatcaatgcaggttataaaatggtaaaaactgagtaactcctagttaacaataaggtaacaatgtcagtttgctgggttttcgaatgtattacagctttatgagcattaccatttagggaacctgggtaaaatgtacatggaaactctgtactatttttgcaactttctatgagtccatatttaaaaaaaaattaataatagtaaaataaaggaatgcatatagatatcttaatgtattcttctcttactcaaagtgctatcttacatgccatctgaattgcttgcatgatactttgaaagatcactgctatatgtatccctgccaaaatgtatggcttaaacctgtggttttcaaagctggccagtcatcagaaagacttggagaacatttttcaaaagaaaaaaattaaagcaagtcctaggtcccatcacaattttacagaatcaaaatatctggccatggggcccaggaatctgcattaaaacaaagcaaaataaaaaataaaacagaacttcccgggaattgtgattgatgctcaaccaacgtttgggaaccactcatttatttcattaacttcagggaccagtgccttaatctcctttgaaccttctccaagtcctgagagtgtactcttcctcccgtagttaatgatggtagcttttgaagtcttgagagtctttatcttgtgaacattgtacagattcagagacctagagcatccttcatgttgctattcttttccctcagtgctttcattatagacaccaatcgtttgcatatgttgtcctgggtcattttatttgggatccaaaaccagaaaatttcaaacaacaacaaaaaaatggattcttcgagaatgccctagccatggccaagcttctgcattacagagctcttgctattgtgttgctttgggtagcaatgcctgaaatctcagccaattttgggtcacagtaggcctatgtaaattatctaaaaatggattcattatggacattataaaaataaatctgacacctgagcctttgggcaaatataccatataaagaaatcataccctagaataacgattaacctaaagaacttaaaaaaaatcagtatgatatttttatcatcctttcttaaaattactgcattcagagagacctgatggctgaggacagcacctggggcagaggagtataggtcattgggatgtggcatcctgagtcttctagcagtttgctcttccagcactctcccttattatatgttctttacattgttctgtatgtcgctgtcttcaaacagaatagataagtctactagtcaagatagacatataacaggcaccacatgtgcataaaaattgcattatgtaaatttagtgccgtaatataatatgaaggatgtcctctaggaggaactggggaaagcatcacagacgaggacacatctgatctgagtgttggagaatgagttagttgtttaccaagcagaaaagggtggtggacagcatggcatgccaagtaaagggaacagcatgtgcaaaagcagagaatggcccccatcctgacccttgtaattttggcagctctttgctgatgtcctcaggcaatgcatctgggctcctgggaatagctttgcaatgtgaacagagtgacttcactatgggtagacctaaatgttctagcgtgctctgaaacttacctctagaaatagctccaggaagttaggtagcttcagagaggaaggaccaagaaatatgatcttataccacaggcaagaagtactttcctggaggtactggccagaagtactattgctatctctctgcacttgtctgttatattttagaatgaaatgtgcctgtgcatacaaatgctaaggcaagaaagaaaaagcaaaaggcaattctctttaaatctcctgaaataatttcaggcagctttttttacctagtcaaacacacacgcttaagaatggagttgtaagctaacttaatcattttttgttttgttttgctctcttacttgttcacacgttggggtaatcctgagaaaacaggaagcaatgaaagaaggattttattgtgaaatgttcattacaacttgtaattttaaaatgtgtttgtatgagtgtgcacaaatgtgaataaattttagagcactttctcacataatatctagtttaatcaccagaatatcctgcaacgttattatagttcctacattattatggttcctaaagacaaatgaaaaatctgtgattcagagacccaaggttaggctaataaatgtagaagtcacatttgaccaaattttagtatcttcccttaagtattggtaatgtacgataaacactatttggtaataatgaattattacaattactaaaacaacttatctggcagaacagtatcttaactatttgaaaaatattgtagtggatttattagcttccatttcatctgaagtccactttgctttactgcttactttatctttctagctactctgtaaaaaagttattatcaccctcaatctgccaagtataatgtatgtaaagtgaaataactagcatattgcaaagctgggaattgaacccttgtctcctaaatccaagtctgtagctgttcctcagcagtacactgtatctcatgttaatgccattattacttgtattaaatgaaataatttttccatcattattttcccgaattattactatccagagcgatttgaaggttaaggtcatccaaataatgtgtgaaaattgcttaaaatcaatctcctgtgcatggatgtctatgatgtatacaaatataaaacagccaaagtagtctcaagaagttattaccaagtttctcaaatagtgtctcaaggcgacattatttgacaagacctttggaataaccatttggaattttccttagttcagttgaattgtgtcatcttgcttaaacttttcagatatcaggggtagttttattgacattacaatggaattaaaatgacattttattttattttttaccgttctatagaaatggcattttaatttgtcattatttttattattgatctgttaatgttgtaatgacttgggttttagtaagggcatcctctgtaaaaattacctcctgggaaagaaatctccaagttctatgaggtctcccagaaatatcaccacttgaggtgagagtaaagtgtcatgaatgccacccaatgtgattcctggtagataagatttcactgttttatatcttgacatctgcattaaattccgttcttttactgggtcctattcacttccatcttgtgccattgttacttaaccaggctctgtagtggacaggaaaaagtaaaaacacgtcttagcccttaaacagtttatattttcattagaaattcaacatatgaaaatgcccagttaactaacaatataaagctttactgtacagcttctatttgtgaagtgactccatggctaactctatcagaagaaagagtttgcttggagccaaggtagtattggaaggttacagagaagaaagactcagggaggcagtggttaagcttgtagactctggcatcagatagatctgggtttcgagttttgattttacctcttaattctctggaaacttggactcaccaggataagtggcaacctaagttctttcagttttaaaatagagatagttatgcactaggcgtggtggctcacgcctgtaatcccagcactttgggaggccaagggtggatcacctgagatcaggagttcaagaccagtctggccaacatggcaaaaccccgactttactaaaaatacaaaaattagccgggcgtggtggcacacacctgtaatcccagctacttgggagactgaggcaggcgaatcacttgaacacagaaggtggaggttgctgtaagccactgcattccattccagcctaggcgtcagagtaagactccatctcaaataaatgaataaataaaaataataaataaatatatgaataaatgaaatagagatatttgtatcttaaagagttgttttcaaagttaagtcatgacaaaataatgacaaaatcagtggaagctgcaatcattgttcttgctattattattgaaatgaaaatatgaacattagctctgagggttctatccatagttttttttaaaaaattctgattataaaattttaattataaaatcccatatagctcatgctgaccatttaaaaaataatcttagttgtatccttgtttctttttgtatttgctaatagagattttagaattggcttggtgtatgtttgtccttgctagaattatgattccttttttgaatttgcattacacctttgttagaagtagaattactttacttgaactttgtcaatgtggcaaaaaatgattcatgtttatattatctctttgaaaagtagtgtttttactattgaactataagtacagttaaaatgtaaatgaacatttcagaaagaaactattgatttttattaattaaagaaattaattttccaaaatgtcagttgctacagagagattttagggattattaactacacaatctcagaaaaattaatttaattagggattttattttgggttccattcgtttttgagattcatattttggattaagccagtctcctgaaattgtatttaaacttagtctgcgtgtatgtcttttttagggaaagcattcacaacaccatcagaccctcgaagagattcttaacttacccattaagaaaagtaacatctctgtctaggggtcaccagtctctcaagccagttatattgttgctgcttgaataaacaaaacaggtttttatttctgctcttaccaacattactaggctgtgtttgtagcaaaaactgagtatgtggtggtggtagtaactacagtagaaagtgtaacgtgtacacaattatatcatgatacatggtttttaaacacattttatatatgtatatatttaatttattcacacaacaaatatttgcacatgttgcctgagctgtgcatgtgtaaggcagggcatagaaatgaatagggcatgggttctttctgctgaattagatggtaccccctcaccccccattttactgttgaagagagggaagcttggtggtgaggtggcttgccccagaccatacaggtaaaaagtagtccagagtagattcaggcataacttgtttgaaccaaattgtgttctttagactgcaacatgctttctgttccttagcatgtaactattacccatgtatttttatttatttttcttttacgtgaatttaaaatgtcatatttgttctgcttctattactgcagtcttgaatgatgattcatcagtgcagtggcctattttagtgaaccacaatagcttgggtagaaagaaaaaagatccaacatacacaggaatggaaagcagccatctttttatagctaaaattgcaaacatctggcaattactctattctacctcccttcaaaaaagaagaatcatcccttcaactggagcctgccactgtgtttaatcaaggcagaaagcaagccttaaggagcaataggttttgattcaaggaggccattgcctaacctagttggccaaagtctcttcagaaaataccccatttagtgctccccataagctactgggttatataatgatagtaatggtaatatagcaattaataactgcagaaatccccttttgtttttctgctgtttcatttgtggtggctcttatggcagcttttatattgtgaaagttaattattttggtcagttttgcctgtctccatctgcttaagcttcttgtattccttaacaaaagattcaaccacatcgatacaaccaataattgccaacttgattttattataaacatgtccggtaaaatgctgaaggaacaaataaatttatttttaaagcctggccgtgatcttacagtcaaaaagtggtccaccaaggttatggctcctaagtaccccacccgtatttcttattgtgataattgtttgtgaaactagttcttccctcactggccaaagtcaacactgttggcaggggaagtgagaacagctggtggttcacagtatatgctgagaatcagaacttctgcatttttctcatggggctagtaccagcttttgctctggccttgaccaatgcacgtacctttctcttccccatttacctttctcttcctctaggtctctgaagagtagaggtggatctttcccttcccaggttgtgccaacattattaccaatgttcccttttgttgtagaatattttggtcagtaatcatcagtaatcgctaagtaacagaaaatcaaggttcgacagcacggttttcaaaaacaacctcaaatactataaatagtctgttttctagtgttagcagattatggtacatggaaatcataagcattcagtgggggcctttgagcttacattaaatgcctgccttttgcttttatgtctttgctagaactgtgttcaatacccaaagacacagctttttctttgatataataatttttctaggctgtctttcctgccagtcttcccaaaatcccagtgaagtttgcaaacacctcattaaactaaatgcagttttgggagagatgagattgtgactagggagttttctggtttttacaaaaagaatagaaaaagaaaaagaacaggaactcctaacaacctaaaatgcatgccttgtgcaatatagttatcccatgcagagctacatagtgtaacgatctctggaatctcaaatgaatgtgctcccttttctctgtcttcattcagttggatagttctggtcttcctccctcgtgtgcacatctttgaacttgaactactgtattacagccagtgttctaacctatatgcgtttctctttggtggccctgctaatatagaagaggttacgctaatgttccttaccatatttttctttttggtgtcttctttgtgtgtgtgtgtgtgtgtgtgtgtgtgtgtgtgtgtgtgtgtgtttttaattgtactttaacttctaggatacatgtgcagaacgtgcaggtttgttacataggtatacacatgccatggtggtttgctgcacccatcaacccgtcatctacattaggtatttctcctaatgctatccctcccctaggcccccaccccctgacaggacatagtgtgtgatgtacccctccctgtgtccatgtgttctcactgttcagctcccacttatgagtgagaacatgtggtgtttggttttctgttcctgtgttagtttgctgagaatgatggtttccagcttcatccatgtccctgcaaaggacatgaactcatttttatggctgcatagtattccatggtgtatctgtgccacattttctttatccagtctatcattgttgggcatttggattggttccaaatctttgctattgtgaatagtgctgcaataaatatacgtgtacatgtgtcttcatagtagaatgatttataatcctttgggtgtatacccagtaatgggatcgctgggtcaaatggtatttcttgttctagatccttgaggaatcgccacactctcgtccacaatggttgaactaatttacactcccaccaacagtgtaaaagcattcttatttctctacatcctctccagcatctgttgtttcctgactttttaatgatcaccattctaactggcatgagatggtatctcactgtggttttgatttgcattgttctaatgaccagtgatgatgaggtttttttcatatgtttgttggccacataaatctcttgttttgagaagtttgttggccacataaatatccttcacctactttttgatggcattgtttttttttttcttgaaaatttgtttaagttctttgtagaatctggatattagccctttgtcagatggatagattgcacgcttttttttcccattctgtaggtttcctgttcactctgatagatagttttttttgctgtgcagaagctctttagtttaattagatcccatttgtcaattttagcttttgttgccattgcttttggtgttttagtcataaagtctttgtccattcctatgtcctgaatggtattgcctaggttttcttctagggtttttatggttttaagtctcacatttaagtttttaattcatcttgagttgatttttgtataaggtgtaaggaaggggtccagtttcagttttctgcacatggctggccagttttccaaacagcatttattaaatagagaatctctccccattgcttgtttttgtcagatttgtcagagatcagatggttgtagatgtgcagtgttatttctgaggcctctgttctgtttcattggtctatatatctgttttggtaccagtaccatgctgttttggttactgtagccttgtagcatagtttgaagtcaggtagcatgatgcctccagctttgttctttttgcttaggattgttgggtctatatgggcttttttttggttccatgtgaaatttaaactagttttttctacttctgtgaagaatgtcaatgctagcttgatggggatagcattgaatctgtaaattactttgggcagtatggccattttcatgatattgattcttatccatgagcatggaatggttttccatttgtttgtgtcctctcttatttccttgagtagtggtttgtagttctccatgaaagggtcattcacatcccttgtaagtcgtattcctaggtattttattttctttatagcaattgtgaatgggagttcactcatgattcagctctctatcattggtttataggaatgcttgtgatttttgtacattgattttgtatcctgagactttgctgaagttgcttatcagcttaaggagattttgggttgagattttgggattttctaaatatgcaatcatgtcatctgcaaacagagacaatttgacttcccctcttcctatttgaatattctctatttctttttgttgcctgattgccctgaccagaacttccaatactatgttgaataggagtggtgagagagggcatccttgtcttgtgctggttttcaaagggaaagctttcagcttttgcccatttagtatgatattggctgtgggtttgtcataaatagctcttattattttgaggtatgttccatcaatacctagtttattgagagtttttagcatgaggtggtgttgaattttgttgaaggacttttctgcatctattgagataatagtgtgatttttgtcattggttctgtttatgtgatgcattatgtttattgatttgtgtatgttgaatcagccttgcatcccagggatgaagctgactttttcatagtggataagctttttgatgtgctgcaggattcggttttccagtatttttattgaggattttcacaatgatgttcatcagggatattggcctgaaattttcttttttttgttgtgtctctgccaggttttggtagcaggatgatgctggcctcataaaatgagttagggaggagtccctctttttctattgtttggaataatttcagaaggaatggtagcaagctcctctttgtacctctcttagaatttggctgttaatctttctggtcctgggctttttttggtcagtaggctattaattactgcatcaatttcagaacttgttattggtctattcagggatttgaattcttcctggtttagtcttgggagagtctatgtgtcgcagaatttatccatttcttctagattttctactttatttgcatataggtgtttatggtattatttattggtagtttgtatttctgtgggatcattggtgatatcccctttatcattttttattgtgtctatttgattcttctctcttttcttctttattagcctggctagtggtctatctattttgttaatcttttcaaaacaccagctcctggattcatcgattgttttgaagggtttttctcatgtctctatctcctccagttctgctcttatcttagttatttcttgtcttctgctagcttttgaatttgtttgctcttgcttctctagttcttttaattgcaacgttagggtgtcgatttgagatctttcccgctttctcttgtgggtatttagtgctataaattcccctctaaacactgctttagctgtgtcccagaaattgtgacatgttgtgtctttattctgattggtttcaaagaacttatttatttctgccttcattttgttatttacccagtagtcattcaggagcaggttgttcagtttccatgcagttgttcggttttgagtgagtttctgaatcctgagttctaatttgattgcactgtagactgagaaactgtttgttatgatttctgttcttttgcattttctgaggagtgttttacttccaattatgtggtcaattttaaaataaatgtgatgtggttcttagaagaatatatattttgttgatttggggtggagagttctgtagatgtctattaggtctgcttggtctagagctgagttgaagtccttgatatccttgttaaccttctgtctcgttgatctgtctaatattgacagtggggtgttaaagtctccaactattattatgtaggagtcttagtctctttgtaggtctctaagaacttgctttatggatctgggtgctcctgtattgggtgcatatatatttagggtagttagccctttttgttgcgttgctccctttaccattatataatggccttctttgtcttttttatctttgttggtttaatgtctgttttatcagagactaggattgcaacccctgcttttttttgctttccgtttgcttggtaaatattcctcgatccatttattttgagcctgtatgtgtctttgcatgtgagatggatctcttgaatacagcacactgatgggtcttgacgctttatccagtttgccagtctgtgtcttttaactggggcctttagcctgtttacattgaaggttaatattgttatgtgtgaattttttcctgtctatgatgctagctggttattttccctgttagttgatgcagtttcttcatggtgtcgatggtctttacaatgcgctatgtttttgcagtggctagtactgtactagttgttcctccatgtttagtgcttccttcaggagctcttgtaaagcaggccttgtgttgagaaaacctctcagtgtttacttatatgtaaaggattttatttcttcttcacttatgaagcttagtttggctggatatgaaattctgggttgaaaattcttttctttatcaatgttgaatattggcccccattctcttctggcttgtagagtttctgcagagagatccgctgttagtctgatgaggttccctttgtaggtaacctgacctttttctctggctgcccttaacattttttccttcatttcaaccttggtggggtaacccaatctttctctctggctgcccttaacattttttccttcatttcaaccttggtgaatctgacaattatgtatcttggggttgctcttctcgaggagtatctttttggtgttctctgtatttcctgaatttgaatgttggcctgtcttcctgggttgggaaagttctcctttctttcagagatgccctgcccagagaggaggaatctatagcggcagtctgtctacagtgcctttgtggcactgtggtgggctttgtcctgttctaacttcctgggggctttgtttacactgtgatgggaaaaccacctactgaagcctcagtaatggtggacgcccctccccccaccaagctggagcatcccaggtcaacttcagactgctgtgctggcagtgagaatctcaagccagtggatcttagcttgctgggctctgtgggggtggggtccactgagttagaacacttggctccctggcttcagtcccctttccaggggagtgaacggttctgtctccctggcattccaggagccactggggtatgaaaaaacaaagtcctgcagctagctcggtgtctgcccaaacggtcacccggttttgtgcttgaaacccagggccctggtggtgtaggcacccaagggaatctcctggtctgtgggttgcaaagaccatgggaaaagggtagtatctgggccagagtgcaccgtttgtcatggcacagtctctcatggcttctcttggctaggagagggaattccctgaccccttgtgcttccagagtgaggtgatgctccaccctgcttagactcaacctctgtgggctgcacccactgtctaaccagtcccagtgagataagctgagtacttcagttggaaatgcagaaatcacccaccttctgagttgatctctctgggagctgcagactggagctgttcctatttggccatcttcatcctaagtcccatatttttcttttactttgggacttggaatctacaaatgttccggaatacagacagtattgtattgcagtggactttacatgtttatagtggttctctatcctcttaacactggtaataatcacctggggaacttcaaaaaatttccagtcttgggtctcaccctcaagtattgtaatgtaattgctctgggatgggcactatatatatatatatattttttttttttttaacactatccatttttagaactgctaaggtaggccaatctctcactgatgcttgaattcatataatcactgtcaaggtgtttttcaggcttatattgagtatttctagtgcaggaaactgaaagaacgctttctgtcttaaggaagttctgattttttgagagatcagatttattattatttaaattctgccttcataacatgagattatcttttagtcttataaatttataatttctagccatggagtttagttagtacttaaaattgtaactacctgcccttcaaaaaaacaaaaacaaaacaagaacaacctgatcacgtctttataattgtgactcaatcctcatcagataggacctttctgttcttcacttttgagttataaatcctagggaaaggaacaatgaggaacaattagacaaagaaataaaataagtactttctatagtgagacagcactagagttaccttgttaactagactgagagctggaactctaagcctttcatcattatattgacaatgtgtaacgtatggttaagttacagaagaaacattacattattattattgaataagtaataattatgagttttattaagagggcccagttcaatttatatgtgcaaaactgatgcccttaattgtaacaatactttagaaatgatagtggaagtaagttccttttgcagagaaaatgcaccttaaaatgcctaggcacaaatttaatgagatacattgttctatatcccaataaaaacaaagacaaagccaaagtaatgtcctcaaactctctagaaggacacgaggcttaatggtaacagtccctgatgcaggtgggtcctcttaggcaatcttaggtttgcattggccttactatatggtgaaagtgagcatatgttttatttatgcatcatccattttactttagattgaaagtatttccccatgttttggtaaaacctgctgctcctgaaacctacctttgttcctagtcctgcccttataaattgcaaaaaacaaagccaattcatcttgcttatatgagcccgtcttccctttcataatagagatatgtccttcattctgactcgtcttcttttctttaagcggaatagttccactgcagagtctcttaattatttaatgtagtacatccggaaagacctcatttgtaaggaccaagaactgaaaatattgctattgaatgcagaaagggaatggtaaggttctctcagagaattccttttcctaaacaaaggtgcaattgccaggaagcaccttcacatttttctacaccatgtcaggcttccttatagcactgttatatgtggccgtattatggttgacattaaaaaatgtgtgtatttttgaaagaactacttcctttattttaaatagaaaagaacacagcatctctgagagtgagaagatcaaaaataagttaaaagcttttcttgtgattagattaaccagattgattaggacaaatagggtttatctatagcttaataaataagttattatttcctcaaaatttagacttactaggcctaaaggagcatagaggtctttagacttaataagtctaaattttgaggaaataagttggaaaaactagagttcagaatgagtaatagtaaaggcaaaactaagattattaagaaaattatcagaatttcctatgtgatttttttaacaactttccctggcttatattgtacatgggtttaagttatcttacagctctttaattatttttaaaagtaggatagcatgttatcttccttctctctgtctataccaagtgtttgttatttgagcattacagttacacaccaccactatctggttgtaccgtgactgaaatatcagttaattggaaaagtgaaaaaaactctttaaactcaacctatacaattaagatgatgaagtggcagcaatcattgcactcttttacttacctgtgtgatttgttataccatgtgtttgtttagaatgtaaataatgtgcagttagagtaatagatgcagatgactgaacatccttagacatctggagaagcagcactggcaagattatctctgaaaatttctgaaaatctttttgttgcaacctgagaaggcatagacataactgaaagcccaatagtaaggccaagttcagtaaagttgaaaatgctttacaccatcactgatgatgttgagtcttccccacccagctcaacattgagattttttttttatatgtagaagttatttgttccagaatttttcctttaattcattgaattattacataattaactttttttttctttaggatttcttggctctcaaatacttttactctttttagagtgctacagccacagttttcttaaatatagggatttttgaggtatcatattttgctaatggtaagtttatagtattcctaagcagcttatctcatacagttttctctatattgaatatgattcagatgaaaattaacctgcgtgaaatggttgtcatctggaatgactgccttttaccctagaaaacagccagcccaaggttgagaacacatctgagaaactgtgcctattttgagaactaccaagaaatttttattcactggaacagctgccaggaaacttgttggtcatagaccagtgccttagttgggcatttttttcagaagtagagaaaggcaaagctagagtcaccgagggattggaaggatgaaagacgtgtagttgaaagctgggcaccatggaagaccgaaacactcttcaaacattctgttttcaagaataaacccaaccctaggagcacgagacagagtataaagagccatgatttttagcgaagacctcgcatttatcttaaaatttgattttgttgtgaatataatctcagaattatgcagggatggtccatcaaaaaggtctgccagagtcaagctgagtttatcttagccatgctgaaaagtaggtggcagtcaatcaaaatggcaattactgtacaagacaagagttcactggagggaagggtgaatggaaaggacactccctgcattcttgaggcctatgtaaatcaacaaatgactctgggttagtttccacaattgtaaaacaatgtgattgaacaatattgtttcttcacttccttcctgctctaagattgtacaaaagtatgattcaactacagatattgcataaaattggttactcctgaagtgcatggagtaaaattgttcccatagaatatcgtgaatttagttaggttgtgacatgggtcatagtctccgcagtctgtacgccctcagtatattcctctgacaaccccatgtcctttcattctaagctaatatccttacacatctttttctctacacctgagcaaaatatacattcatgttcttaagtgcatgtagttaagaggaagctaacacttaatttgttcctgctgtatgccgggtatctggtatgtcatcttcatagcattatttgaagtttggtactaatatttccatttttcaagtgatgaaattaaggctcagagagatagtaagttgcccaaggcatcatgacttacaaagaatggatcttagatttgaacacaaatatctctaaatccaaacttcatgatttttctactgtatttcatttgctcacttccaaagtctatacaaaaatatttgttaaatgtgcatgtactgagctaccgatatctactatatctgtgtatacagcgatagctatcaaaaggagagacgtcctctaaatctttgataaaagtatgtcaaaatggaaccctcccagaaggacttcatttttaatagaaatcagagtattagctgaaggcacgaagttctaagataaaaatgtagctatgaatcagggtggattcagagaggtctttgtgtgtatgctataggtgatcatgtgtgaatttgacctacggcaagaagaattttttttttttttaaagctcttccaggttatccttgtgttggggaggaggatagaataaagaaatgaatgtcttgctggttcttccaagttgtatgaggataatatcacccagggatgatatgctagataaagacccaggatctttattactttttgacatttagttttgttgttgttgcttaaatttctagtctgttttgatggcattagaacctttaaaaggagcttgtaaccttttctttttacttttcctgaaatgtgtggatgggaggattggacaagagcctcaagggatgggaagaagagctcagtgcgaacacacatgcatttattcatttagcaaacatccattaagtgcctaggacctttaaggtattctgccaagagctgtgcaggataggaatgaacaagggatgacctttgctttggctatgtacaccagaaaaacgagcaggggctggaggactcttgccaagaagctatttagtggttctcttagagccttatctctatctaggctggagattaactcagaacatttttttagtctgtttacctctaaaatgaaaagaaatatatattaagaataaggaggtggcgtggagctttcactgaatgtatttcaactggagtattgaacgttatagtgatggatacagttaatccatcacaaccaccatttcaaaggaaagtggggaaaacctttgtccctgtgtgaaaaataacttaggaaattttggtctgacagttgtgagagggttaagaaagtcaatcattttgtaaccaggcacagcaatcttgtatgaaccatgtcaggatgttgtctgcatgccgtctttgctgatcacagtaatcgggtcataagagaaagggaagtaatagagtgtctcttagcaaccaaccccaggaaaaagaaaattactcaaacccagccatccagccagagaagtagaaagaaaaaaatattctgatagtttgctgaaagagctcagggatgagagagagagaaagagagagagacagaaagtgagagagagagagagagagagagagagagaggagaaaggagagagagaaggagggagagagaggaaagggagaaagaggagaaaataggaaggagagagagagatgatggagaagagaggccagagagaaagaggaaggtatggagagacaggagggagagagagagagaaggaaaagaaggaaggaaaaaagcagaaagaagtaaacaaaaaactgaaaccttttatttctttgttttcctttctcttggtgttatctttttttaaaatttttatttcagaaagagagaaagaggcaaagagtgggtgaggacaaaagaaaccctgtctcctaaaacaggaacttgatagtccacatcgtgagagaaagtggggagggtgaatggtagtataacttcatcgtgtcccatgtttctcatggtttccagttgcgatctggattactgttgagaagtaataggaagacgaagtctacagatgctgtgattagtgttctaagacctgtttttgaattctctgcttgttaatcgtgtagcagtcagttctacagcttactgcagtctttatagtaatgactttcgaactttgttttttctgacataaatagtggtaagaaacacatagtacattgacaagagcgtatatatgtacatgtcaatgtaatatatattgtcaatgtaatattatgctaagtgaaattttcatatatagatatatatattttttcatatataggctctttatgtgatgcatactaatgttttctattcaatttcattacaaaaattcttttggatacctgctgaattgattgtatgaccctaatgagttacattcttccatttgaaaacaccagtctaggatcagcacttgccttacattttgattttactagagtggtgccaggcagcaagttcagtcttggtgaagagtctttggccagcactgtgatgttcagaataacagctatttaagctaaatattttcttgtcatctgccaagtagatgtatcctaagagtctgtcctggtttggaatttaaggggataaacctgaggcaattccccctggactatcttcagtttagaaaagtgccacagtgtgttcaagaagcaccggactggactcaggagacttggttgcgcttgatggcatccttttctcactctgagcctggggtcaatgatggatcgaattagatgatgtcataaattccttctggctgtaacatcttggaatttatagctggatggggctccagaaaccatcctgtctaatgtctttgtttccaagatttagttcttgaaaaggaatgatagacttcctactttctttaaagatctgtgctaggaacaagtatacatgaaagactgaagcttagtacataacttcaaacatctcagtgtggtataggagtataccatgcgcacatataaacataattcgaagaaaatatataatttgttaaacactacaggtagggtagaagtaaaatataaaaactcagaaaaatgataatttaatcttactgggaagaatgtctgaatgctacactagtatataaggaggaaggctttgctgtggactttgagggaaggaaaatattgataataataggatgttccgggtagattaaatgttgtagggaatcaaagaatggagtcttaattgtctcctttgagttctgttttttgacctcattgaactcacaagggtttactttttaccactaaatattcctattattttatagctgttttttcttccaatttaacatgactttttaataatgatccattgcccacatttagtgataaggtgaggtttgattaaatagtatttgtacagtactacctcctacttggagacacacgtttatataaacacaaggtgttatataatttgtttctctgttggggggagggggaaagtaaataaggaaatataaattaatacctgttttcttttcaggataaataatatctgaatatgtttctttttctttcttttttcttaatgcaggctttatttagtttgattttacctttagaaatttataaaccatggaaataccccacatttttggggatattggaaataatctctgtgatgtcactttctgaatcagactaaggtttgtttattacatcagttacaggaaataagtgcataaacctgaattaatctgaggatgttgtgtttgtaatgttgcttccattttgtccctttccttgaagcttgaggcacttgcacatctcactcagtcttccttttctctacagctttcctgctgtcctaaagagacaaaaggcatatggctttctccagctgcatttcctgacctgtttccttgccatagatcgcttctaaagcaacattcccaccatttgaacttccattcttcctctgtcccaaacctaatattaacaataacaggagccaatgcaatttttcattataatatggtgttttacattcatagcacacacattactttatttgatccttggaactcgtggatatgtaaatggcaagagttactcttccattgtgtagattactaaaatgaaatatctagaggtaatgtcacctagtaccactgactatagtgttgtgataccaataccagaataacagggctcctgacttctgacccaagggagataaggtggatcatcttaaggttatggctgatatataattgacgttatcagttttagtaaattttattttacacgaagaaactgaggctaaaagaaacggagccactagtgcttagggtgtcaacatcagaatcagatctttgattcccagatttaacatttcctagattctgtgttctaatcatctcaatggacagtgcagatattacttgagaaacatgtttgcatttcgtgaacaactcctgtttattttcaacattttctatgtataaataatgtttgtgtaagcatatatttacttaggacccgatatctgttcagtactgttaattgccttgggagaaaacaaaagcaaaaatgtaaggcctgggatttctatgcaaaaggccaaaaagggcttttggtgagattttaaaaatagaaaaccaattagaaaataattaggtgtatagtggtaggcccagacttgaatttcagtatgaattttgaaaaagaatatatattttaaggcctacaagggcaaaagtagatgggctttaaagtttgtgtaggtaagattgtctgtgggtgaagatgggtagtgggatggtgagcaggcagagtggggttggggtgtggggtggcacggccagctttaatggagacaggcgacttcgatggggggtaggacatgaggtgcacagagcaacagttttcagaggtgcagtagggatgatccaggggatcagagaggaaaagagtaaagactctgccaacctttcagcctggagcctagagccacagtgtgagttaaagatgtaaattccttggaattaagaaccataccttatttagccatttatacagctgcttaccatggtaataattagaaattaagatgatgatcttttatgtgagcaactttcctaaataacacttgatgctgctgataaatgagacttaggtacagtgctttttctgtaggattcaggcctaaatggatctaggaggatactagagcttccgttccaaagtacgtgcatttgaatgatatgctaagtaatgccttgtgtatccttcaacaggaaaagttcctgctattaggataatttgatatgcacttgatgtttgctaatatgtttcaatcacataaatccttcttggatatttttgttctttgtggacttcaggtaagtttaaagatattccacacacttaaatatgtacacaaatgactttataacaagaaagcaaatttgtttaaaaaacaaacctacaattctgtctctctaacacatcaactccattttctctgtactcttttagtctttgccaatatatgtttatagttttcataatatgtaactaaagatagacataattttgcatttttttcacttaatactacagaataagaattccccaccatcatatttagcaatggcattatagttcttgaagtaagcatcccagaatttattgaactattgccatattactggtcgtttgtgttatttcactgctttaagtgtttttatgttagagaacataatgaaggtcttcatgggtatagctttttgagaagctagacatgttgaagaaattgggagcatgctattactagcttctatgaattggtatttactatgtatccctttaattaaattccattctgcagtaagtgtgatagctttgccgaagcacttgggggccaaaaggacatttgtaactggttaagttggaagatatttatttgtataaggtgggtagggacaggatggacaggctatttttcttggccacactcactgaatttaaataggcaatggagataaatcagttgtggcccaactagactgcctggatataatatccttttggactggatcatgtcgtttcattgcagtcaggatggctaagcatggtgatggatcataactgaccaaacagacaggttggttagaatgtatgaccagtcatagctgtgtaactgaggaactgattatattcctgtgactaatgaaaaagcccaatcttagagtagctgtggtaattataatgagaatactagtaaaacattttaaggtgttgtgttccagacactattccatgcatttcacacacacacacacacacacacacacacacacacacacacacacacagtctcatttaatcctcataatattatgaggtagtgctattattaatatccattttctggatgaggaaactgaggccccaaccagtgaaataacttgctttgagtcccatattaagtagtactacccaggcaacctggccccagagcttacttacacgtgtagtaactacactgttcttcccatttatgaggtgattaaactatggaggcaggcatggcatacctgcagaacaggactagaatctcataggtttttgaacttattaggcagacctaaggttttttacacttcctgaggctatagaacagaactaatctcttagccttaatgtcactataacgtaaaaaccacgtgaagagaattacgatggtgagcagaggataggacacttattatagttgttacctcatttatttaattctttgtttcttagagaataagattctggtacatagcaggttcccattaaatacctattgatttaaagtttaaaacaaggaataatggctaaatgaatcattgaatgcgtatgtctatttcttggaggtctaatcatgttttcaaaactttggctcaactgtagttagtgcagagtatgtatggtcattctgctagagcaaaatcttagtataggattaaagaactctgcaaattgttaaaacatgcaggtacactagtttcaaaatgtattagtttgatttattattgtcattttctgataaagaaaggggagtagtctcccctaaagtttggtgattaagtcaccagccaccttttctattttggttgttgtggtaattggtgtttcctggaaattttccctctgttctattaataatgttaaagggggttacagccgtgactcactccaggaagtcaaccatcattcgcttcctcaatctcaccaaccagtccccatgtacaaaatcagcgacttctgcaaatgagttactttacagctctcaagagagttctagaaaatacagcttttgtatttcgctgtgtgcttcctgccttggcagagagtaaaacaaaccttcatgttttgctccttggtagtctcgagataattgaccagttaggtaactagtgtagtctcactcaagagaaatcccacttgctgtctaacaaaagtcccttggcactcagatttgcaaagttaaacctggggacagttcatgaagtccagtggagtctatacttcttttatacctggctttatgtttctgtattcattattttgctcaatgtttaattaagtaatgaatattttaacttgttcaacatataactccgtatgtcttagcactgctgtgtagtagataccatcataggcactgaggatgcagtacagacatggtagctgcccttgggaaccttctatcctagttattgttcactatattaccaagttaaccacagggaaaacaagttcagagaatacataggctgtgggcctgtcctaaaggaatcaatctgtaaccgacatgtctaaagttgtgcaggataggattattccacttaattctgtaatttgttttgtctggaatttatctcatctatgcccccaccctcactcatacacataaacatggagatggaacttaactgtgcattctcgtggtacttaaatttttgtaccttggattatcaaaatttttgttcatgtcctagcttctctgcaagttctttggttaaaaccagtgtgtgacacatctctggatcagaaatgtcttcctttctacctttcaccttccccaaccttcctggtctcctagcacagtgccagatgaatgacagctgtttagtatgtttggtaaatgctaactgtgtgtgatcttagaaaagttagtgaactttgctgattttcagtgtcctctttcgtaaaaaagagaataataaccatttctacttcctaggttgttgtcaaggttaagtattatatttaaagtttttttttagtagtgactagcacttagtaagcacttactgaatgttatcattaataaatgatcttacaaagcagtagcatttccttctaggatttttttgtagtccttcatgattgatagagaagagacatgcagtctaggatttcacatcagctttttaaatataggaaaccagatgtaaatatgctgcttcggttatttacatctgacattcttgcatgattgctgacaaaacattaagtaaaaattatgctactctttcccttagatgtcaattcatggtcacattaaagtcacaagatttttcctgaaacttactgctggtaccaattttaccataggttatcttaattagtatcatcacacagtggtgcagtttgacctttggggtttgattccagtcctttgtttattctgactgtgaatggaggagtcaggcagaatgacctttacatatctttacctccttctcccatcttctgctggcatagaaaactttgcataaagaaaggcaacagagcaactgcaaaattgctgggattaaaaagaaaattgtatgataatgagaaatccagtgtactctctctcccttaatatgtgtgtgtgtgtgtgtgtgtgtgtgcgcctgtatacatcagatatatggattgatgcagtgtactctctctcccttaatatgtgtgtgtgtgtgtgttgtgtgcgtgcctgtatacatcagatatatggattgatttctttttgtttataaaaaatattcacttttcaaaatgtatttatactatgctatcattgaattcttacatatcaaccctttgtggttgacactgcagagatgatgagctccattttataaagatggggcagttttatctcaacaactagtgtgttctagatcaaggactgattccagattctcaaagtcctacaacagtaatcttcaccatgctgtgtgtatgcgtgcgtatgtgtttatcagaatatattagaagataatttgcaagcagggattggttaaagttgaatgtttatatattcttttgtagtgttgcttacattttaaataaaaataaaactgcagtggatgtgcatttgtcatcatttagaggccttcagaccccaattcgtagtttcttcacagttgcctctattttctgattactagtccctggaaggtacagtgtcagagttgaagggatgttctcaaatccccctaaagttttccattgcaatactcattacagtttctttttttcttttcttttctttttttttttttttttttttttttttttgagatggagtctcgctctgtcgcacaggctggagtgcagtggtgtgatctcggctcactgcaagctctgcctcccaggttcacgccattctcccacctcagcctcctgagtagttggtactacaggcgcccgccaccacgcccggctaattttgtttttgtatttttagtagagacggggtttcaccgtgttagccaggatgctctccatctcctgacctcatgatccgcccacctcggcctcccaagtgctgggattacaggcgtgagccaccgcgcccggccgcaatactcattacagtttctaattgcgtatgtgtgtaaaagaacatataacttcctcacagactcagctgtacactctacaggggcatcattgtatcttaggggtctagcctaatggctggtgggcactaggtgcttagcaataactattgaatgaatgaatgaaaaaatgaataagtgaattcaacacaacttttatttatttatttttattattatactttaagttctagggtacatgtgcacaacgtgcaggtttgttacataggtatacatgtgccatgttggtttgctgcacccatcaactcgtcatttacgttaggtatttctcctaacgctatccctcccccagccccacacaccccaagaggccctggtgtgtgatgttcccttccccgtgtccgtgtgttctcattgttcaactcccacttgtgagtgagaacatgcggtcaacataacttttaaaatccagaatgtcagtactaaaaggagccttttaagtattagaattcaacttaatgaaatgttgctacgtattttctctgttctcatcactgacgtagctgctttggagcatctatatctgatatttagatagtggatggcttcttgcaaacacttacattgctcacgtagtaatgtgaaccaacagattggtggcccgggcagcaacatattttctataatctgtagcatgaagccaactgaggtgtgaccgtggtatttcctgaagtggctttcttttgcttttctgttttgattattatgtggctgtggatttagttcacaccatcactgtgaagaattttcgaaacttaagaatcaagctctgtttatacattttcaacgtaagcccttaattacagtcactcctcgggcccagtgattttacagttacatgtcagattgaggggtttcgtcttgagaatgtcagctggctctgtgaagaagaagaagagcagatacgtgagttacccagaggagtgctgattgagtccaggagtctttctgtttaagagcacgttgaaagagtttgtgtgtctatttgtaaaaccattttggagatgataaaaagcattctgagacacacaaattttttttctgttttcaaaggcaagacagagacatgtggacaggttgatgaagggatcattgtgatcttttctctcagaacttgattttcattacttgaactttgtcttctatgcttttattaccaacacctgtacacaaaggtacacataatacttgcaaaaaagagaagaaactgttttcagactggggctctattaagtgttcattgaccacagtctacaacaacaaaaatgacaattcctgcttgccattgaaaataatgcaattgaaaagaaagggcggaagcaagttcttggctgcatagcttcagtctgatgccatattctagagtgaaaaggtattggcttggttttgaggcctgccttcatcacgtgaaggctctgtggcatggcagggttatcttacgctattgaacctcagtttctccatttatccaatagagatggaaagtattggcctgcatttatttctccttcaaatgacatattgtatagaagcgtattgtaagttgtaggtacttaacaaacatgaaggactgttatgatctcactttctgggctaaggagaaaatggtgggatgagtttcatgtccttttctttgtggttttgactccagcagcttccaaacgacttttgctgatgtttcctaattagcaatgctgaatctcgtgttgtatcaatcctccccattccttaagatggaaacaagtgttccagttatagctataccatgtgcctgacaggaaagaattgggttgccatcagaaccttaatttatcaatctcagtggcttaaaattttgaatttgcagcttaatattattcattaacaaagtatttttcatcccttagctttcctccagggaacaaaaggaaatggtacacactagctcttctaacaggctctcattcaataaaggatggtgtgcccttaattttgttagcatgtgtataaagaatgtacttttagtggacatgcttcactttgcaaatatagtgcataattttcaaatacatctttgactcttcctcaaacctgctcagaagctgtgtttttcctctcttcattaaaatgttccaacctggaaattttctctttacaattcagatatttttcacttcttgggaagggaataactaaataatttcaatactttaaactacaaggatgatgtatttttgttctacacagcattgatatggtggagctgtattctttttctaataatacaaataatatagggctgtaagggtttgtatcattgcatgtatatgttaagaggataagaggtatgtataaaagtaaattttgagaaattataagtataaaccaaaaagtcttatacctttagcaatgcctttaaatcttgaacttgaaagaaaaagttatgcccgactcgttgattgcatattaaataggaaaatacatttgttatacttgaactagattgttcttaggattttgtgaaagaaaatatataagcatgaatttattatagaaaataaaaatgaccctagaagaaaacctaggcaataccatttaggacataggcatgggcaaagacttcatgactaaaacaccaaaagcaatgccaacaaaagccaaaattgacaaatgggatctaattaaactaaagagcttctacacagcaaaagaaactatcatcagagtgaacaggcagcctacagaatgggagaaaatttttgcaatctgtccatctgagaaagggctaatatccagaatctacaaagaacttaaacaaatgtacaagaaaaaaacaaacaactccatcaaaaagtgggcaaaggatatgaacaggcacttctcagaagaagacatttatgtggccaaccaacatatggaaaaaaaacctcactatcactggtcattagagcaatgcaaatcaaaaccacaatgagataccatctcacgccagttaaagtgggtgatcattaaaatgtcaggaaacaacagatgctggagaaggatgtggagaaataagaatgcttttacactgttggtgggagtgtaaattagttcaaccattgtagaagacagtctggtcattcctcaaggatctacaaccagaaataccatttgacccaacaatcccattactggatgtatacccaaacaattataaatcattccactataaagacacatgcacacacatatgtttattgtggcactgttcacaatagcaaagaattggaaccaacccaaatgcccatcaatggtagactggataaagaaaatgtggcacatatgcaccatggaatactatgcagccataaaaaaggatgagttcatgtcctttgcagggacatggatgaagctggaaaccatcattctcagcaaactgacacaggaacagaaaaccaaacaccgtatgttctcactcataattgggagttgaagaatgagaacacatggacacagggagggtaacatcacacaccggggcctgttgggcagtgggagactagggagggatagcattaggagaaatacctaatgtagatgacaggttgacggatgcagcaaaccaccgtggcatatgtatacctatgtaacaaacctgcacgttctgcacatgtatcccagaacttaaagtataatttaaaaaaaaaaagtaaaaaagacattgattcattcattcatttattcaggcaatgtttggaactcatgatgtgccaggcactgttttaggaccaggaataagcaatgaccaaagtatttgctctcctgatagattataaacaaataaatatataatagctcaagctgtgaaagtcacaggcacacagagacacacacatctccaacatatgcagcaaggtaatgagataaagaattcctggccattttttgtgatacaggatagatgtaatggtttcctatcagttttatcatttttaaggtctctcttcttagaataaattattttatttgtttcttccgtatgccatttaacagggaggggaagttttctgccagttttgcacccactgtttttctttttcagtaagagccttctcatagtctgcttgaaggcagcggtcttgccacatgtgttctatgcataataatttcaggagagtcttgtccacaatgcttggttgattacggcttgtgggacaccacttaaatgactagaaacagctctctttaataaacacactggtgttgtccatcattttaagtgagcatgagagcccagcttcattttgccactccaatctcacacggcctagaagaactagtgaaagtagcaggtggtgtttgactttcagtttttctgaaatgtgtctctttctgccactctccagacgccgtgccagtcaggccctcaaggtcaaaacatcatgaaattgaccatagattatctcagccttttctttttaaaagtgtcattgtaacctgttggttactgtgtatgtcatttaacttctctgtctttagtttctgaagtaactggttttacattgccatcaaaaggcttctgtgggtttttatttttctttgtttttatttgtttgtaaacaatctccttttctaaactcatttccccaaatttccttaatttttcacggactgatgaaaatgttttgctgcttccagagcttgtcagcttctctttgtggcattgctttcattgttgttctccaagttcccactcagctcctgctttcttcaaaaaaccctttggtttctaacatctatgttttcaacatggcaatggagtgagttgcccagggaatgattggaccgtgattgttttcatggctttcttttgccttttctccatgtcctttttagctctaagcctcatttgtaagctttctagaaatgtggattctattatagaacttctgtttttctcatttttgtagttgctttctcaagagcaggtgctggtgaccacaggacgagtgagagacgagatggtgtctctcctttagcagttggcttaattaaggaggttttttgaagtgtatgggcttcaaaaagtctgacatgtgagttgtggcctgtgtggtctaactctgattcctttggatacagaaccttagaaagccttgagaaaaacctcagagatcatctatgcaatcaattctggctttacctggagggagttttataaaacacaaatgccagggcttcaacttgagagactctgatttcattgttttgcagtgggtctgcacatcagtagtttatagaaatttcccacatgattttgtgaaaccagggttgagaatcacttgattttacagggcatatataaggtccaaagcaaaagtgactcttggctgggcgtggtggctcacgcctgtaatcccagcactttgggaggccgaggtgggaggatcatgaggtcaggagatcgagaccagcctgcccaacatggtgaaaccccgtctctactaaaaatacaaaaattagtcaggcatggtggcaggtgcctgtaatcccaactactcaagaagctgaggcaggagaattacttgaatccaggaggcagaggttgcagtgagcagagattgcaccatagcagtccagcctgggcgacagagtgagactgtctcaaaaaaaaaaaaaaaaaaaattaacctgtcatggtggcatgtaatcccagctactccagaggctgatgcaggagaatcacttaaaacccgggaagtggaggttgcagtgagccgagatcgcgccattgcactccagcctgggcgacacagcaagactccatcttagaagaaaaaaaaaaggtgactctccgggattctatagcagtatggccatagagtagggacaagaacatatgcctcctcatttaccatcagtgctatttctattttgtttactaccatttactctcatttgattgtgtcaaattatctactgttgtactggggggccagagtggattcccaagcctcaaccacatagaagagtagattggaggttgttttcaaactattcaacattatcagtgggttgaatttgtaagctatcaactcaaaatataaagataatttttataacagggtctatattggattgtaaaaagagggtcataggatttggatctttagggctctgtaattcaaaatttgggatgttcattaggactatttgtgttatgttgtaaaacaattgtacttgttggcagacgtcttgggttcaagttatgattttgcatttaggaggtttgggaacgtggacaaactcccttttgagttttccttcaccccgtctttgtaatggagataatattctcatttccctgggtttttaggaaggttacctgagatgactcgtgcaaaagctaacacataatagataataatatctatctaaatagatattatttagatatctatctatattgagatatctatatttagataaagatatctatatttagataaagatatctatatttagatatctatatttagataaagatctatatttagatatctttatctaaatatctatctaaataaatgttaatttattctgaagtgtggtaagtttatctaacatttactgtagcaaccaaggtggggctaaatatggggaccaatcagaaagatgatctctgtcagttttgcctaggacgttcagtgggacttgggtaggagactgtggactaatctcacctatggaaatttgtgtggcctgtgctataactgagaggaaccaagtaagcctgtgtatatggcaaatggtagtcctctcccaaacaacatttgtaaagaaaatgcattttgcactatttcttagtgtgtctgaggctttttatgttcataaaaatcttagtgagttgttgaaacgtgcttttctgaaaaaccttggaatttacctggtttagaattagaatcagaaatgtgtctttttaaactgtattctaccttcttaaatcttttgccttctgcagcaacatggagcaactctgatacttttttctacttgagggcctttcgtagtcagagattatactaagatagcaaaaaatagaaagtgacacactagtcaaggttggtttattgtgtggtaggaaatccaaaagacgttggaagcaacaacaatagctctgaggtccttggaaccaggagttttgaaacttttactttattgcacgtctgttgacatgattccatgaatatttctgctctttctcccttatgtataccagatccactgggctgagttaaatataagaccccaagcatggtcaattcttattaatagtccttgaagaggctctctcttgtttttgattgactttctttttctttcttttcttttcctcatcctttctccttcttccattctcccttccacctcatagaagcctaatgggcttggaatagcacttataaatgcatgaatttttagaaatatatactattgttttcatttccacaataatcatgcctaacatttatcagccacttcccatatgctaggctctctttcaagtcctttaaatgtaataactataataatctcacaacaaactccatgagacagggactgttatctagtgtgttttatagattagaaaactgagacacaaagaaagtaactttctaagctcacatacctggtgagtcagtagctgaggcaagatttaaaatcaggcaatctgactgtacatctcactcttcgctactttgtccttgtgcctttagatcatggttctgtgctatcgatctgatcttatttcttactctttttactactgttgttgctcagcatagtcttcccccctcaaaaataagtaacatttatattgctattattattattattattttgagacagagtctcgttctgtcacccaggctggagtgcagtggcacaatctcagctcactgcaacctctgcctcccaggttcaagcaattcttctgcctcagcctcctgagtagctgggattacaggcgtgcaccaccacgcctggctaatttttgtatttttagtagagacagggttttaccatgttggtcaggctggtcttcagctcctgacctcgtgatccgcccacctcggactcccaaaatgctgggattacaggtgtgagccaccacgcccaacctgtattatgaattataatacatagataacgtgtaaatatttaatgtcacatattattcgtgnnnnnnnnnnnnnnnnnnnntgtaaatttgattagcgctgagacattggtattagttttttctacagatgagaaaacaattacatacttttacaaatgatacaaatatgtgtgaaatatatttaatcacatacatgaataatgctcagtgagcaggcatagaattgtcaggacctttgcagtatctccaatatataccctgcccatagattaggaactattgctgtactattgctcatcagtttaaataattatgttaattcacatttatctatatgatcagcataatctttcaaaaatcgatttacaggcctggtgcggtggctcacgcctgtaatcctagcactttgggaggccgaggcaggtggatcatctgaggtcatgagttcgagaccagcctgaccaacatggtgaaactccttctctactaaaaatacaaaaattagctgggcatggtggcaagcgcctgtaatcccagctacttgggaggctgaggcaggagaattgcttgaacctgggaagcagaggttgcagtgagccgagatcacgccactgcactccagcttgggtgacaaagtgagactctgtctcaaaaaaaaaaaaaaatctatttacattgcagctcctttaggaggtttactacttgtaatactgtagagtcttccagagtgtgcatccattgtatttcactgattgatttcgttagtgatacacctcaaagtgaggtagtcatatacctccaactcttggctgccacaaatgtactgtcgtgagcattttgtatatgtgttcttaatgattggcagaagttagctcaggatttgtggctgtggggagggtgcttgatcatagtgcattttaatattgagtttcactaggctctgtgttttttgttttttgtttttgtttttttttaaacataaaggcttcactagggttactttcccccagtaaagcattaggattcttgttttcttcatgccatcaccagcacggggtattgcatgactttatattttttgctaatatgatgggtatggaactactagtacctcctggtttctgcttcttttccatacatagtaaacagattcagtctctcaaaattactgggaagaaaagtgatttgtttcataagtgttaagtgtctgtttctggtcatggctatctctgggactgtggtcatagagaggcatactggctattcagcagggtttctgagtgggaaaaaaatctcttgaaaatgtggtgttgtcaaggaaggccattttactgatgttacttcagggcccttctttcattccttcatatttttcaatatttattgtatggcaattgcattgtagaaacttttctaggtacttgggaacaaaattgtgaacaaaatagacatgtcctgtggtttctctggaacctttagtgtggtcaaggggacaggcattaatcaaaatactcaagcaaacatttaattacaaactatcatgagtgctacaaagggaaaggagaagagctctggtatataacggggtagatgatctgtgtgtgcttacttgatgcaggtgtcttttggggatgctataagatagaaaatttagaggataaggtaaagcagtaggaggaatattcagacagagagaataatgtgtgcagagatccacaggcaagagggaatgtggcatcctcgagggatagtgaaaccagagttgttttgaggacttttattcatttattcaacatatttttatggagtgcttactatgctctagaatatgacagtgaacaagacagaacactaggagatgtttgagatgaggccgaaaaaataggtaaggggctcgccctattgtacactcatctcccttggtttgtttttttgtgtgttttcagagagaaacagccgtacttaacaatctggtttcagattcttttaaccttctgtttgcctttctctgaaggtgctacagtttgtttgacaccctcttcaagaggggccagtagaactaaggataaaatttttaagtcttcccatcaagaaatgtgtcgttaacattaattaagtttcctcactgttatcaatgaatatccctccgtatccttctctttcactagctgagcattatattatgtgttgttcaagggcagatagtctgtgaagaagtgctttaaaaactgatagcgtgtgggctctgagcatgttgtgcggctgactggcccccacctcctcttgtttcctttctccccagaaaggcctcacttgctgcatgacaagtcaggctattgtttgctcattcgatattgtcagctaagatgcttcacaattccttaagaatttattattgttgttgttgagggatgatagagtcctcttcttctcatttaagtgacgtgtatcgaaaaggaaaaatgacaaataagaaaggacttgggaaaatttcctccactcctgacttccagacctttagaacttaatgctttccgttcagtacttctgccccctaaccttaaagtcttgagagaagaatgactggtgttgacaggatgcttgtttactggcttctgcctaatttttgaggcatgaagtggccatctcatataaagcaagtagttcacatcctgggactgagactacaacctggtttctccttgtcttgtttcgatggagttattctgtatcctgtgaagaatctctgttttgtcatattgtattccctctttaaatcttttatatctctttctcgtactattttgcccctgatgctgtttctttctttattttaagctttagattcacctcttaagttgtcagcccacatggccatacatgaccatggttcttactggtgtgaagaaagcagattgtagctggttgtttgagatgccttcttaggtggaccaacctctctcgggttctttggttttatctcttgctcttcctcttgaatgtttatgatacttcctggtcacgtcatttctctttgactctttctttcttccttccttaggttccggattcatacaggtatgaatctacttccccatctttgccaaccctggcatcgtgcccccttgattccttggcttttcacaggctagatgcttaatggactctggaagcctttatctctaggacgcctttatctgtaggactgggcttttttgtttgtttgagacagggtctcactccgatcacccaggctggagtgtagacctggggtttctaaacactcttcaccttgtgctcagctccttgtatgataccgaccggatcctatccatggacaataacaatcttgaatgtgttcacaatgcctgggggaataagtcccaatccggccaggaaatgctgatctccttccgacgggatctgcttgtctcacctcagcgccagttgcttccctttacaatctctttgctggccaggttagaacatgtgctaattctctgaaaacacaccatgctttccttcctctgtgtctttgcttgaatggttctctcagtccagaatacattttaaatatttctacttccacaaatctattctatagtatttatcaaaatagtaccttccctattaagtctcccctgattctttagctgaaagttattttgatttcctctgagttcctgttaattttgtgggtacttctgttaggcttcttagcattctacagataaggagatgggacttcgtttaaacagctctgggccacaaatatagcatgtagaactgtggagattctaactcacattttaacctaaaatgccatactctttttatcctattacattcttctcattccatatatgtctatcttatgtagtatgattgaaggcagggtgcttgaataaggtgtaatgtttttgactacttagcatatcctaggcactgtgtgacatattttgcatttatttaatttggctgtcataaaatttctgcaaggcaggtacagttactattcccactttacatatgaggaagtgaggtatggaaagattatgtaacttgtccaaggttaggcagctagcaggtgacaggcaggacaccagcttaggcagtgtggcatcacagcctatgcttgtaactgccgtgcaatgctgtaggtaagcaagagctaacaatataagcctgaaactactggctttctcagttgatggtatttgagaagtgtggtctatgatattcctcagtaactttcatccatggaaaaccaacatatctcatttctataggttttaggatttaaatatttttaaggatttttctgttgtagactttaaatttacgatttgagataaactgaatgctaaatctttcctgcttgggaagaattcagatgtaaaattgtaatttgtattattggaaaacaactccagttttatgcattctatgcaaggatgagctatgtattagttcattttcacgctgctgataaagacatacccgagactgggaagaagaagagggttaattggacttacaattccacatggctgggggaggcttcagaatcatggtgggaggtgaaaggcacatcttacatggcggaagcaagagaaaatgaggaggaagcaaaagcgggaacccctgataaacccatcagatctcatgaaacttattcactaccatgagaacagtatggggggaccatctccatgattcacatgatctcccacggcatccctcccacaacacgtgggaattattggagtataattcaagatgtgatttgggtggggacacaaagccatgactagaataaaccacatcaagttacctgcttatctaaagttttagaaggtgttcacaatgttattcgaaagccaacttagtgtagtgagcatttggagaagcatcctttatacaagtgagatgacatacattgttaatatgtgcttttatgtttgtctttgcaagatctgagctagaatagaatcatagctctagggccaattagagtgggagatagtttaatagataacacaggtgctattttgtcaagttgcatggtttctggacagtttacagagaaaaaatttttagctgagagcctgatgaagtcttaaggctattattaatagtaatatttggggactagcaaagtgctcacataaaaagcaccaacaaggattaaaaaaagagaaggtactgaccagattcactgccttctattcccaaaaagattattaaaaggttcatgtaaatagaatatgcgcacacccaggagaaagtgatttatttttaagctgaagccgaggttttacacatccctgataatagggtttaattaatgtttggagtgaataaaacacactcagaagaagtgtagtcatatccttaatttccttgattggcaaagtaattgatatcatgtgtgacatttgagtcagtgctattttatcagtcacttgctctctgcgagacagagactgtgattgaaaacagtaggtatgggtacttgattttaaaatgaactctatcataatatactgattacagaatcagaagggcaatgttggtgaatatttttgggcaaaaaatgactgtaacctattctagatatggtaaaaccagctctcagtacttaccctataaagagaatattggtttttttcagaattttgcagagggtctttttacttagggaacaaagagaactgtaattgtcaaatgtggttgtaaaacggtaaatctatttttgttcatggctcattcattcacttggcatttaaaaaaaaatttttttatttgtttattttagagacaggattttgctgtcacccaggcttgagtgcactagtgcagtcatagcttactgcacgctcaaactcctgatcttaaacaatcctcctgtcacagcttctcgagtagctgggactattggtgtgccccaccacacctggctaattttctattttttgtagagatgggatcttgctatgttgtccatgttggcactgggctcaaatgattctttgctttcgcctccccaaccactgcgattacaggcgtgagccaatgggcctgacctcatttggcgtttattgacaccatattagaaaccctgtactacgtataaagattattgggggaaacttctcagctatgcatgtgtgtacatgcatatgtgctcattagatcttggtgtaagtacagtttttcttctagtcatggtttaaaatatctgaaaaggtgctatggggacacagcagtttacaccaacagggaccttataattaagtagatatgactgtaacatagagagcgataacgttataaaagaaacacaggtatgttactataagaatgtgatgaacaaatcatttgataaagatatcagcagaggcttagtgtgggagatgccttttggctggacttgggcagttggttaattctgaatggggtttggggtaggggagtcaggtgaggattggtgtgtgtaggtatgcctaaaggcgtgaaaatatttccaagaaggattgcgtttctttttgccactgatggcagagtcaacctcggcttctgagtttaagaagagtgtgagcacctcgagcaaataagtcagctaaacaaatggagctgaggcattagaaaacgcctgtcgatttttaagaaaaggagctcaactctaagagtgcaaggaaaaataaatgcgtggagtgacaggataatagtctataattacttttaagattgctatattgaggctgtgacagtcacttagttcctgagtcttttcaggaaagggtaagaggtaactagccagagctggagtcactccttgtagaagttaggtggctttgatagtgacattaactcttcagaaactccatgactattatttggtatccaaagcagaaatttatgaaagagtcacagaattttacatctgtaagataatcttttgaaaataattagaaagaattcaggtttagaatatacatgggtgatagacagagtagtgaaaacatccccagaatctggtcctgctcaaaaatggagcagagtttcttagaatgcactgacgtcttcacattgaccctgcacagtaccatccctgggagatctggcaaaggagacatttcagaaatgtgtgagttaggtgccatggcattaagatcttttcctactgtacaacttcccgtttttaaactcaccatcttgatgtacagctaactaatgtaattttccaaagtttctagagaagacaacaaccttattgagatactgggacatctgggtgccagtctagttccagttacatcttacttttgaaagaaaggaaaatccattaaaattagaatttgtctaggaagcatctccctcccaggagcggagtactagctcttcactatcattggtctaagcgcttgaaatgctcccatgtttggaatcccattgtttatgtatcagttctcccaacacttccactcgttaggggtatgatttaagagttaaggccaggtgcggtggctcacacctgtaatccaagtactttgggaggccaaggggagcagatcacgaggtcaggagatcgagatcatcctggctaacatgatgaaacactgtctctactaaaaaaaaaaaatatatatatatatataaaattagccaggcgtggtggcacacacctatattcccagctacctgggaggctgaggcaggagaatcgcttgaacccaggaggtggaggttgcagtgatccgagatcacgcccctgcactccagcctgggtgacagagtgagactccgtctcaaaaaatatcctttgaggtcacaggattgatgctatacaaatagtaattgtattattaatgatagaaatatgaagcatattggtattaaactatgagctgatacatggagcagcagatattgtatttttagttcatttccttaggcaaactcaaatattgtactcgcacagttacctcaggcattcacaagttagagttccagtgcaaacagtttgcagcaaatatgaaccacagtggtactattagttttgcatccactaggcacattttccagcttctgaagagataattgaaggagaacttggatatgggctaaattgtgtatatggataaaagattcagcagggatttaagcactttcgacccacatgaaacattaaatattagctgagactcacttgaagatggacttcttgattttgaagagttgtctgcatttttataaaactacatgagcatagtgcattttaactaataaaggaagtgaacacagttgagatgcattatctttcttagccttagggtactgggtgttactattataatttttaaaaatgtatgcttttcaatttttaaacagtttattatggaaatgtttaaacatatacaaagggatgagattactataatgtaccgccaggaatatattatccagcttcagcaataattgactgatggccagtcttgcttcacctatacacctattcctttccctcaccctggattattttgaagatagtctcagatattacgtcagttagtcacttctgcaaattttagtctttagtaggtatgtctaaaacatctctcaaccataaataacatgtcaggagagctcttttgcaagatgtttattgatcttgtgccttttgcatgagtatgggaatggctactgttttatggaaaaggagattaaagaatgcagtgtgggttttttttcatggccgatttctttctttccttctttttttttttctggaagtaggattggtttggggcatgatgtaggaatgttattgggtaagggtttaaactctatgtggcttctgtggtttggagagaccccaggttgatctgatctactatagttaacaagtcagataaactagattttatttgtaatccttttgtactgaagcccaaacaactggcattcttaaattagctagaatatcacttagtattccatttatagaagagttgtggttttaatttaaaaaatactgtaagtggagctactgaaataggcccaagtttattatagctaatacttcattacagagacttccgccattccctaaatctaaggagggggttgtttgtataccaaacatagtagatgtttctgtttgactagattacctagaaaatggcacctagggtaacaacttatgtgcttaatttgaatgaacacgcccagaaaaacaggagagaggaaaaaaagaaaagtaagagaaaagaggagagagagcacatagagagaggtacattatcaagctgtccacagcttcctgacaagagcagctgagttcttggtatcacagcacatcttcacaaaggcctcataaactagcgtgtctcagaatagttcattaataggagggaggaagaagaatttacgtagcagttcctgattcccatcgttcaaagtacatatttcctttttagtattgacttttccaggaaacttgttttattagtactcctactttccaaaataattctctatgtatggttttattttttaaaatgaaaacgataggaaagaaaattcttcgaattcattgtcatggggactcatactcagagaattggatatgacaatactcaacaccaaacctagttctgaaccccaatatctgattattatcaatagaatcagatcaagggaatacttattttcctcttagcaatctatattgattattcatgggggggggttctttgttctgagatcaggagaatgccctggttatatgtccatgtgtggccttagtcagtttctcatgtttcttatgttcatgtatcttttgcttaaaattggaaatatctaccttcaaggaaatactgtcgaagacatggttgacaatttcatagcagcagtttgatgaaatcattttgcacactgagtaaattagtcaattatgtaaaaattttatctgtagttttgtccaccttatgacaaaaattttggagaaaaacaacagccttattgatttacagacatctttctatttatcagtactagcatcagctttctgggacatgtcaactttcctgtttttgagtctgaatggatccataaacctaaacttgctgcaattggagtgcagatatcaagactattgcagaggtcttctcacacattatctgtgtgccttgagaatgggacctctactttggattctatttcatccatcctatacaaagagatcaagcaagataatcacgtattctctctgctttggcctttgaagactttaaatgacttagcttggtattaaatatttcatccaggagaagttgggacttgaaaatcaggctttgtcccttgcagaaaacttgactggttccaggcgcagttactgttggaacagaattctctttaatcttttgcggccattatcaacattgattttattccttgtgcagggcagtagagttccagcttctgtgttattacttttaaaacatggtataattttaggaaaccattttctttgtttctgaagtgtatgtataggctatgttcttcacattagatttttattttgaaagaacatggcaaagtgtggaaaacaaggaacatagttaacatgatcaagatatctgaaattgtgtaattagtgatagcttggataaagttgatatgaataagtaatatagagcagggagtgtccatgaatggagtggagttagcctcatgtcaaagtttactgtcccccagccagacctcagcttgtagacttagtattcaatttggttactctactgtgaaagagatactctcatctggagaagaccagccaagatagagagagaactaggctatgtcttgggaggaactgttgaaagagattgtaaggtgactttaagaaggtgataatcagggataccagaggaagacttagaggactccagaggatagaaatatgccagaatacagaacttaaacagaggcaaattttcattcagtacagaaaaagagtttctgacaaagtgatctgaaggtagaatgggctgtcctgggggatggtgagctccttcccactggaggattttcaagccttagcctagtgacccctaaggatatcaagatgtacaagggtcagtttgtggtttaactaggtgaccttcccctccaacctaaagacatttttgttgtctggctagacatcttacttcccatagtcttttaaaaaataaaattaaaaggcaataaataacttctgacaaaagaaaatagaagccatgttcttatcacccagtaatgaatatattgatatggttctttcaagtaacttttaaccttttacaatatacgtatcaaatgcatgtatcataggtgatatgttcaataatttttgcaaattgtgcatttttgtttaaaaaacacccagatcaagaaatagaacctcactagtcactcagactacttcatctccccatgaaaaacaccattatgatgtctaacagcatagattagttttgcttatttttgtatcatatgtaaaaggaaccacacagaatttattaagtatttttaattgtggttttcgttttttgactcaggcttaaatagctctctttttattgtccacagatttttatatatgcctagtcttgcaaagttattgtaggcagcaccttaatgaggttttaagggaattttgctattctaacattggaaaatttaggctgttttcagtttttatctgttaaaatctttgggcttgtagctttcctatcccctccacacccatttcttcactcatatttctcacaatatttcaaattgatttccatatgtggaattattagatcaaatggtacaatgaagttttaaagtttgatatttaccaaattttaatccaaaagttaccaaattatacttgcattagtaatatttaatagtgcctattgctttgttttaaaaaatgtgctaattttatgagaatggcttttcttcaattattaatagggcaacactttctttcacgtttgtaaactagttatagatttggtacatgtagtcagtcactgtgctaaattctccttaagaattacgtctcttttttgaaaaactaacttttaaaatagacattactattattattattattctcattttgaagatggggtaactgagaaacagagatactaactaatgtagctaatgaagtgaagctaattagtgtcacatttggagtttactcaaaatatgatactcttcagtttgatatgctactgcccttcatgttatcctttttaaaaaatatttttaaattgattgtatattattgcattagcatatttagccaatttatatgagcttcatatatagcatatgtgtgtgttaccttcctggtaacacaccaaatggctcatataaatttagccaatttatatgagctttatatatatatatatatatatatatatatatatatatatatatatgcgtgtgtgtgtgtgtgtgtgtgtgtgtgtgtgtgtgtgtgtgtacttttttgggtgtttatttttaattttgttccaatttagaagcatataaaagtttgtttcaatgtgttttttaaattattcaagttgtaatcaaactgaaactaattttggtcaaaggtgaggctctacattgatttttaaataatttacccgtttttccaatttcatttaataaataatcttttctagccgagcacggtgggtcacacctgtaattccagcactttgggaggccgaggctggcagatcacctgaggtcaggaatttgtgaccaacctggccaacatggtgaaacactgtctctactaaaaatacaaaattagccaggcatggtggggggcacttgtaatcccagcttcttgggaggctgaggcaggagaattgcttgaaccaggaggcagaggctgcaatgagctgagattgtgccattgcactcctgcctgggaggcagagcaagactgtctccaaaaacaacaacaacaaaaataatctttcctttactgattcatttgtggtgtctcttttactgcatatgtatgaacgtgtggggtgtatgtgtatgtgtgttttagacataggatctcactctgttgcccatgtaggagtgagtggcacaatcatggctcactctgaccttgaactcttgggtgcaagtgatcttcctgtctcaacctccagagtaactaggactataggtgtgtgtcatcatgcctgactaatttaaaaaaaaaaaaagtttagaaatggggtcctgcaatgttgcccaggctggtcttcaactcctggcctcaggttgatcctcaagtgattaacctaggcctcccatagtgctacaatatatttggcaattatatctgcgtgcacggtttcttcattaatgtcgtcttattcctgtgtaaataacttccactcccatttcattttagattttcttacccatctttgcaatatcttcaaaaagaaagaagacttacaggagtccaatgctgcataatattaataaacttaattttcttaaattttcttctctggcagagaccataagcagtatgatatttagtcatgctaggataagacctgagtagaaattgtactagctatccagctcgtttgttaatttacttttgatgagacagagaacggtcatttaaccagcttttgttcggtgtctgttcggtactaggatctcctgagaaacccttgcatcctttatgtacttggtcctcataacattcacactaagcattcatggcagagccagcactggcacctgtggcttctatgttgctttttaccttgcattataccaattcatactaagaaaattgaagtgtgccctaatcacagtctttcatttgtaagtcgactcaatacagtattggatttggagttttgaaagaaagtaaaacctaatttccttccccaaagctattattattctatttagataaatggaaaagcaggtatgtgttgaggtttctagcttttaatctacagtgtttaataggttttaagttatttgttattgaaatcttgaagaaaacacataagttagatttcttgcttttatagcaaaaaattttttggatggcttagggagtcaagtgaaccattttaaatacagtatgactaaatctgaaaggcctgatatggtagctgctagccccatgtgaccatttgaagttgaatttaaatctacattaattaaacttaaataaaacatttgtaaaaattagtctctcagccactagtcacattttgagtgctcagtagccatcccttgcaagtattaggacagtatggaacattcccaccactgcagaaagttctgtggtgcagtgtccatctagatgattctacaaatggaagatttaggggaagaggagaagtaagtagtgaggtgtacctaattgcttctataagttttagtacaaagaacccttcctttaaaatattgatatttggtgaaacattcagatatcacgttttaaagtgatttcatggacactaatcaacagagcaacaacatagatatatcattgactacaaggatggatcaatacttgttctacctgtttcataacttagaggattatagggcactctataacacagcaccttaagtatcagaaaaataaaggctgcaggtgtttgaatgaattgttggatgttctgtttttataaacatgtggtcttctcatatttacaccccatttggtttgggatgaatctccattctgagtcccttaaatgttagggaagcttaagatgagaccctttggattccacacaccaatctaatttcggacccaatttgaagctgaaaaaggcttactatggaaaaaaaaaaaaaaaaaagcccaagccccaaaacatacacacacaaaacaaagtagaacaaaaggggataccatgatctttttatcaaattaggataataggatgacatggaattcagaagacagtgtgatattctctgggaatttgttattttatgaatgttcctgactgaaatttaaataaaaataaaatccagagtatacttccccctttagtaacagatagaagtgacaccttgttgaattccatttctggattactctgtttttattttcatctattggcacccaggacctggtgtttggtttgtaactatgattagtgggttggggttaatatgagaaattccgcaatgagtaagtcggaactattcggtgttatgtccaagaaagctcacatgtcctagttaaggctgtgtgaagtgaattggaccatcctgatgtggtggccccaaacactgggcttaatcctctggtgtgactgctttcacaggtcttttcaagagcctaagtaccataaaatattctcacaaaagccttcattccaaagaatgtgtgtgtcggctcatgtcaagagcttttagtgtagaacaatgtgtcgaaaaccacaatctaataaacaaacagataatctagttcagttttgtctaagtaatataatgtctttattaaactatttcctgcacctttagctctattcagaaggagaaagttctgcgtgggaatgtgtgtatatttactcttaataggaggccgtgtagctcctgtgactggatgtcttgtttttctcttctgagtagctcttgttttccatggtgggaattttccgtcttggtaatttggtattttacttggttttcattgtgaagtgtggaagtgtgtacaccttagttttagaaatgttgttttatcacctgcatctcagttatcaagggccaagtcagaaagttctcacgtgtttttaagcctttctaccagaccttgaactatccattaagtcaaaggggataggctatttccatgaagaaggtttagggattcctggcagggcaggaagaaggggcaagatttgcgaggatcagaatcctaggtactctcctttagactgcctggtgactactcatttgtcatatggaaaatcatggctcaatagttcagtagaatataactttgtggaaatttctgaatattaaaggcttcattttcaacacggcagtgagatgggagagtcagggtcattcattggtattgtccacgttactggttgctttttgtctgatcttgcctggagaattatttttaagtaatgtgcctggaaagtgcctacttacagttaggttaacggccatcttatggcatcaggaggagctttctggctatacctattaaaggaagccttagtctcttattgccattaattgacccttgcattttgagtcatagaatcataaaccatcagtgtcgagagggctactaagcagtttccttggattaataaagcttgtatcttctttataatattcatgtcaagtggccttcctgcctctacttgaatacttccagttatttgtcaatctcacatcctcaaaccaggtaatttctatttaatttttgcccttaatcttcagggtttataaatacctattgataataccttcgttaatatggtgctttgaaactcttcatttttttccctaaataaacttgtaatttttctttctatatcatgacagtagaggctcatatttttatgccttttagtctcagttatatttttgtctgaagagctaaatatacttgaaaaaagtggtttctgtcatctcagaacatatatatatatatatatatatatatatatatatgctgggtaaactccacctgtttgctaatcataacattcatttttctcaatgtgatggattttgtcaccacctccccccgcccccccgcctttatggcattgctatgtgaatcattgcaaaaactctgcactaacatttttcattctgtttataaggttcaaatagatagaacaattttctctaggctttagctctggtgtgtataattctggtcaggctcctaatctttttgagggatagtttccttatccataaaatggacctaagaaaagcaatcctatggggacaatataaaacttgtttagctgcaatcttaactcagacttgcttcctgaaattcctcaatctaatattaaataggggttttttgtttaaatgtggtagcaagattatagttacaaaaagaatagaacaatgcattaaaaaatagaagtatcttaaataatatgtttaaattttttaaaaatatgctgaaattataaagaaattcttagaaaatcatgaggaactctggaaaataggtaccatgaatacaagaacttttgctcttgtctatacttgtccttgcactgatgttcctactctgagtctagcactatgtgcagacttcccttcttatggtatgttgtggtgagcagaataatagccctcaaagttgtccacgtcttaatctctggaacatgtgaatatgttagggtacatgccacagggaaattaatgatgcacatggaactaaggttgttaatcagctaacctaagataatgaaattatcctggagtataaggatgggcccaacgctattacaagtgtgatagcaaatggaagaagaggacagaggaggtctttgaagtgatgtgatgtgagaaaaacttaacgtgtctttgctggctttgaagatggaggaaggggccacaagccaaagaatgaggagtagctttgagaagctggaaaagacaaagaagtggattctctggagagactccagaaaggaatgctgccctgccaacaccttgattttagtgcattgatatgcataactgatttctgatttatagaacagtaagataaatatatttctgttcttctaaaaaaccaagcttgtggtactttgttgtagtaacaacagaaaacgaatacacacaatatcatgttaaaatgatctgtttatatgtttttctcctttctaggcaatgaattcctcaagggtaacaatgctatctttgaaaaatcattttagtccatttccatatgaaaagaatacgaaatgtcctgtcaaacaccagaggtggtatttactcagtgtgtatgcaccatatgcctggcactgccctgggtattttgctttgaaaattttatttcctgtctgtttaaccctactaaatcttaactttcttatctgtaatgtgagtctatggactagatcaggtttggcaaacttttctgtaaatctggtaactaaatattttaggttttataggccatatggtatttgtcacaactattcatttctgccactggaatgcaaaagcagccatagacaataagtaaatgaatgaccttggctatgttccaaaagaactttatctacaaaaacaggaggtggtctggatttggccatttggctgttgcttgttgacctgtagactagcggacctctttattctgttctaattcctgtctaatatgattattctgtcagtttataacattgtgccgtgtcagttaagccaaggaagtgccagtaagacctgaagaaggaactcaagtgattggatgggtctgtttataagaagaagcataatattggagactcaagtgccaggaaggggactgtcaccatgtccttggcaaatggacctgggacaaattctctttaggatgagacataaggagatccttgaatgccaaagctgagctcgctgaacttgaaactcagtgaactggaactactgctggaggaataaaagggagcaataaatcctttgcactccagaatgaaagaccttctgaggcagctggccaaatgaagcaggaggagggaacaagttcctcactcagctaaattatgtctttgggctggccgacctggtctgctaaaataacaaggtggctgaacttctgctcagaacacgtcaccaaattttgcaatttgggactgtcttctatcccatgacttcctaatctgaggaagtgaagaaagcagagtgaatgaaacccaaggattgacttttttatggagggcctccttagagacaaaagttgatttttcaagagaaccctttatattgtgaactctgtattctaattcaaaaaccgttaagttcttggatgaagaacatccaatagattttggaggtcttgtaaactttgctattgatctgggacttaacctttgcagatgtgggactgtgtgtttatacatcaaagtgggtaaagaagagcccatccagagctaggcagacggaattgggatatgtttgtttgtctgattgcccggttgtggtggtggcggttgttttgacttggttacatcatcgcatttttgaggacaaaactaccctctttgattggtatgttacaatagcttgtttatgtcttgcaaattgttcgagaacagtttgtccattaaagaaaaaagtgacctagtaatactcccctacccaggggaatgtcgggttaatcagttgcacaagggcttgatatgccaagtcagtactaccccgaggctccgtatgcagttcctttccaagatttttaaacattctggggagaacacaatatttgtttatttggcttctaggactttgttttgttatcgttttagttacggtcttatgcttttctctcactccctgtctttcttttacccctaactctttggagccctggtgtgctaagagccatgttaacagtaaagcatctattcaataaacacttaactatattttatatttgagcttctaaatgtttgtgaagaatgtgtttctgggcaagtcacataaagaataatctcacagtaaaaataacttatatttatgtaggacattatagtttttatggtatttctaaattcagtaaaaggcgaaagatttataccatctgaagaaaaaccagggtgttgtatttttaaatttaaatactttggtctacacaaccctgggtagtataaaaggtaagtgctgttgctctcatttacaaacaaaaatattgagaatcaaaagtttcatgatttccctaggttcacacacatctagtaaatggttccaagtggacaaaaacttacacattttaatgtcgcagagctatttttttatatatgtaagttacctaactgcagcagtgattgccgagatcatccctatggtgatgttcaattgagtctccctatttcaatctttcaacctctcttttcttctctctctctctcatacacacacacacacacacacacacacacacacacacacgcacacataaaccacatacacacacattttgaaattggtagtcactcagtttctcaatcttcctttaaagactaatttattgggctagaatttatgggtgtagttgtcaaaaattcctgcatatacccactcaggaaatattttcccaaatcttctccatctcaactctgtgaggcattggaagaggtgcttttaggatagactgatgactcatatatgatgtctgccctcagggagcacacagtttagtgaggtaaatgtctcatgaatattccacaagatccaccttgataatgctctaaagttactatagagggctgaaggtgggaagatgctttcgtctggtggcaaaggatagtagtgtagggtgacatgggcctccaagaatagcttgggctcagatagtggagaggaaactcttaacggagacagaggtgtgagcaaagtcttggtgtccaggaagccagaggaagcattctggcagattaccgggtatgtggcttagcaaaagtcattattctgaaatataaaatgtccagtgctgctgtctgcagtattagtctcaaaggatacatactcaccagtacattccagagtttgttgacaaactttgacaacaaagcttatcaagtttctctccattgcctcataagaggcccatccagttagaggattcctccttttcagaatgagatcttgtcaaatcttgggaggctcagaacagacgtttaccaagcttccaataatactctcaaaccataattctctaaaacttcagcataattgccataaaatcaattgaccatatattagagagtttatttctgggctctgtattctattccatttgtctctatgtctgtccttatgctaggaccacactgttttgatcactgtagctttgtgataagctgtgaaatcaggaagtgagtgtcctccaacttggtccttttttcaagattgctttggctattcaaagagagccatgatatttttaatctagcaacagttgtatcaaatacattggaaaaacctgggtcaggaagaatgttgactatctgggctatttgtttagtctagatatgaggtaactatgcattaggtattttggtggcaaaggagatgcagagcagtaaatgaattagaaaaatttggtgtaatttaatatagcttgtttgtattcagagtgggtggttaagataaaaaggaaaagggttttccacctttgtgatagggagaattgtgataaggtaaatagaaaaatagagcacacaagaggaggttagcaggtctgtgggttatcctatctaaattcagatttgagcactgagctagaggttcatttgatgatgctcattcagcaatcagaaattcagaggtgaaatcaatgagtaccacaattattctgggtcttattttacttataaatggtgtatttatttagaattgcttttttaatgtaatgcatttatggttaccatggcacaagagccagatactgggaagcagttggggacagcagcaaaaatcaagatctggataaaggcagcttcatgaggcttctgtgccttacctcagctaagagtaaacagagtgctagatggctgttgacatgtgttttattttgaagtgactattattactaggatctgaaatccttagccttgatctcttggagcctaatgttcctgttctccagctgagagagactaattcaccatcttgtgttgtgaacactcactcattttaactgattacacctccaatgattctcaaatcactaaaattactaattgctattccttacacatcaaagagtgaatcctgaataattaaccccaaataaaattagatgaattggcccttttaattagagtccctgctgctgtttgttctgagcttccttttcttactgttaagagacttttagaatgattaaaactgtttaagacttaaacagccagtgaccttttaatacaatataaatccatgaaagcaatatttcagctagcaggtggtgaagtaaatttttagagcaagtacctgtcagctccagtattcctttggaaaaaaaaaatacatgccaaaaaacaaccaccttgaaatgaaatgagtgtctctatttgattatttttaaagcattcatgcatttgctaagcttcagacttgatgaaataaatgtcagggttgaaggagagtgagtaatggttggcatcattttatataaatagtaacaagaatttctcagtgagaagaatttgaagtcatttgtgcataaaagatgaatactggataaatcacagaaggcccctggcctcatgtagccatccttgtcttcggggattctcttgaagcaagagaatgagccccaacattggggaaaaggaagttttatggggtttaattgctgctgatcatcgaggcaggattaccagcctagccatgctgcattcagcctggattttgttggagatattttacatgttcctgctcgtctattccaagtctcctaaatagtaagaacctcttctcttcttcatagtcttctgaatttgtaggggtgtagcgggttttctcaccattcccaagaagtctcagtttctcacactaagtctgccatgtgctgtggtcagtgtgtccttagctagaagttaagatatttggggtcacagtgggctgcctggtgtggttctacactctttgactgtttctctattttttttccatggtggaaaatgtattcatctataaaaaaagttattggactagttcaatgacttactttttccttaaaatttaaaacataaattttaactttttattctgaaataatttgagaccctagagaacggttgaaaatagtataaaggattctcatttagtcatcacccagttttcccaagtattgacatcttacataaccacggtagagttaccaaagccaggtaaacactgacataatacttccttctaatacataaaccttatttagatttcattgattgtcctagtgatgtctcttttctggtctagaattatatccagaatcacatattgcattttattgccttgtcaccttagtcatctttaatttcagagagagagttgttcaatctttgtttttccagaaggtcaatgattcttaaccagcgctatacgccagaatcattgaaggagctttgcaaggtccttgtctgggtcccgaccccaaagattctgaattaaggattctaaagtcaagtctgggtgtatgtagtgtgagcaagtgccccaggagattccgatacacaccactggttaaaagtcagatgagtttcaatacctcaagctaagtattttcaaattctgtctatgacatgtatccttccccttccctcatttctctgctctttcttcatctccatctctcttttatgggattaaaaagcaaatttaaatgtctctttatactcttaagggatatacatatactgggtaaggcttatcaacagatcttttattggagaagatcaatacagtacagatggttgcaatatttctgaaggctagggtgcccccataaccaggtggtgacttgaggatgaagactctgttcctatactttgaagacataccctcagtaagataatgtgaaaacaaacaaacaaaaaacctagctagatggctacattaagacaggttattaactgtctagctgttggtatcatgaaggacctatgacccaccgtagtacattgttgaccttatgtcaatatttgaaaagtggcaaagttgaccatgggaaaagttcatgtgttcattgtctcaagagttctattcaatttaatatatgtagttttgtaccaataataatttatagcaataatatcattactgtttactgagtatctcatatgtgttctatatgctttatgtagagattataaaacagagagtctgccctcaaggagctgttaatcaggtaggggaaaccaatagttatccaattaagctaacaaagagcagaatattggctgtaatagagcttcagcaggaaggaagcctgcattatcattgacatgtcattgacaatgcattgacatgcattgacatgcattgacatgagaatggttccctctatagccaaagacagcagtggtgaaataaattaaatgccctatttaaagtgtttttattatgaaaccacactccctcaggcaccatcattgtctttggaggggttgtaagcttctggccttaatgaccaccacagggtaatgtcccaatcctaaggggaaaggatgtttttggactattctgtcagcactctgatatttgtttgcaagcttctttgtttttactggtaaattaagactttttgttgttgttttcctgggatgttgcctcattttctgtccatcacatgaatttttagatttttgtttcatttttaaaccgaggtaattttactttttcgcattggagctaaagatatctcactagctgatagaagactgatgcattaagctcaactcattgtcctatttattttgaatgctcatctttggaagtcaaaaatatatggtgtggtttgttgtctggatagcaattactatgtttttgtaaaacaaatgatacttggtggattcaaaagtgctatttggttctagtcgatgtgcagagctagactattgtcttaatttcatacgatttgaaatccatttaatgttttctactgagaaattgaatttgttatccaaccactgcatgacagagaattatagtatgcttgtatctcatgtaatacactgaggtgtctcacatttgtacagggtacttatttgtgattataaaagaggacttttaaagtctcagatatattctgtattagctaaatatggagtgaaactgtccaatttaaaatcagggagacgtcatctactttaaagataattcttcttgctttttaatttgagaatctcaaagagcatttcaagctaagttatttagaaagatgacagggacattaaattttggcttgagtacatatactgatgcattaaaattaaacgctgggtttgagtagattctgcgattcattttaaagtatcttatttttggttttttaaaaaaatgcatgcctataattcacttattgtataataattaagccaaaaggataaaaaattgaaaacaatgcttagcatctcatgagctgtagacaacccctgttaacataccggcctatataaaattgggaccatattataagcactattcaataacctcccttgtttcttacctgataagatatgaaaagcaggccgggcgtggtggctcacgcctataatcccagcactttgggaggccgaggcgggcggatcacgaggtgaggagatggagaccatcctggctaaaacagtgaaaccccttctctgctaaaaatccaaaaaaattagccgggcgtggtggcgggcgcctgtagtcccagctactcgggaggctgaggcaggagaatggcctgaacccgggaggcggagcttgcagtgagccgagattgcgccactgcagtccagcctgggcgacagagcaaaactctgtctcaaaaacaaacaaacaaacaaaaaagatatgaaaaacaattttttatgttcttcccccggatatgccaatacttactcccttactagatttaagtctttccccaaatatcaccttggtgaggccattttcatttttttttctttaaaattgcaactcccaccaccaccctaacagtcccaacccccttacttgccctacatttcatcatagcccttctcaccatgtgatattccgtttgatttactttttaagcattattcttctttggagtataagttccatggggcttcgtggagaagcacactttgttagttctatttgtttgtttttccctggggtctagagtaatgtatgatatatagatggcactcgatgaataaatagttgtaagatgtagatcaacatcattattttggtgaccacacaatttcccactgtatgattgcaatttatttttcaaccagtaccctgttaatgaacattctgagtttttgcattacattgctttgtgatgaagtttccttaacatgctcctctgcatgttaagttacttctttggtaggataatttattaaaagtgatattgctgaattaaagtttataaatatctttaaggcttttgattcctcttgccaaattttcttgagaaaagtttagtagcagtagcatatgagaatgctggtttccctatactattatcaattctgtgttttatcaatatttttaatcttagtccttccttttaattaatttgttagcaacttgagtattatcaaaattaatagtaatgttttctagttaaatagcagaaaatacaaatggaagaaaaatagaaaggttaatttttctaatgtataaaaggaacctgaagtttaaggatatctagcatgataactaaaaaattaatgttcctcggtcaaggtcacatatcttatttacagaggaagatgtgtcactgaagggagatatattgtgctattttgatgacaatgaggacagagaacatggaatggccaagccttgccctgataattatccctctcccagagagttctcaaaggagtttcacgctgtagaaacgggagcaaaatgagaatccaggtgccgctttattaatagcttcataagtgcttgctctccctctgggacagaggtctgtgatcccactgacatagtgcagaggctttggctctaggaataagtagaatttgtatccggtatcttcctcacaccactgtatcttggaagtcaacatactcagtgagctgcagctcctgaagacctggcttgacattctgatcctttgctttagagtcaagaagtacaacattccagctggtctgtcctgggagccagatgctcagaggtctgaagcaggaagtttaagaaggagatttcctgggtattgctttctaaaactgagactttaacagtagtagctggatcagtcaaattaataaccccttccttgtcagagagaagggcagagtgggacaggaaaagagcttgaaaaggtttcgtctctaatagaaatagcatgttgagcaagtcagtgcaattgctttcatattgttagttccaaccagtgcactgtaaataggttgagaaggccgagaagtgatgcattaaatgggatgtatcctcaatttttctcttggcctttgctgtaatgcatttcctggtggtttttaaaaccttactcagctgaacaattggagatgacacattttcaggtactgaaaatttctgttttgtgcatatgtgttatttaaaaattataaatgggtaaaataatgacaggttaagaatttgtataatggagagtatttcccttctactttcattcctcagttgcaaaatttagcttcatagaggcaacttgctgttatcaatagtttgggactccatttaaaagatagtccgtgataatacatacatatatgtgtatacattattaaataaatgataacgttatacatgctgtcctaggccttgaatgctgcatttaaaaatatttcacccaaggtgctttctggtacagttttcttggtggcacacatattttgatgcagattgaggatggagttgaagttgaaattggaagtgaagtcttcctttatttagtttcataataaattgcctgtagtctgtggagtgtacattatagctgtggcataattcattgccttatggagatcatcattgctgttacctttgttttatcctctcactttttctctttaagggaccttgttcagggagcttggtctcctcctctgagtgatcaagtttagattcagttgccctcttgtgcataaggaaaaagaaagcattgtcatgtataatgtagacattgtactaatcacttgcacgtaatttagctcagttatgttcaaaatgtaaattgagacctatttctgggccacagtcaatttagtgggtcagaaccaattttttttcaaataacagagcatttcaatgtgtgttttatttatatagtaggtatggtttcatgaaaccctttttttctagtatacatgtacgtgtacatatctagatagcaatattaccacattatataaaatatatttttttaatctaggttgtggtcaaaaagtttcagacttactgtgttagctgctttgatccacagattgacactgtgaagtagctgtggttttcctcatttcataggtgaggaaaactgggtctgggactatagaattgccttgcctgaaataaagggtagagctggggtttgtgttttaagtttttggacttaaaatttcgtactattttcctttcaaacatatatttttttctgtattagttactatatagttttttgtttttttgttttcttcttgttttgagatggagtcttgctctgtcgcctaggctggagtacagtggctccatctcggctcactgcaacctccgcctcccggttcaagcaattctctgcctcagcatcctgagtagctgggattacaggctcctgctaccacgcctggctaatttttgtaattttagcagagactgggtttcactctgttgcccaggctggtcttgaactcctgacctcctgatccgcttgcctcgacctcccaaagtgctggggttacaggtgtgagccatgcacccagccactagttactattaatggaaatgaataaccgtctttacttgaaacttatgctttgctaaccatgattaaaaaagtgttcaccttgtgtgtgtgcgtgtgtgtgtaggtattccaatccagtctcttttgacttcataatttagaaagttaacttgtggagtatctacatgcttttatgcttaccttaatagttagattttcctccaacaaccaaaaattctcccctcaacaaagtgggagaagcaatagctgccagctagcagaagctagagacatgtcactgccagtgcagcccatgggtctatgtcagcaacacctgagagcatgttggaaatgcagaatctctggctccagtgtggacctgaatcagagtctgcgtttgatctaggttccccgatgattggaacattgacatctgagatgtacgagtcaaagacaccaggtcatttattaaaacatcagttaaggaattgaatgggtttttatttttcagtcatgcgacctacagttactgaggatgttctggcccaaacctgtgactagagatgggcatataaagataaatcatgagtggactctacttgtaagaagctgcagttctaaccaggagggagtgatcataacacacaaatacaatcaagtattacagatgctctgatagaactgtatatgagacgcaaaaagggctgctatctaaatccttggatgtgtgtgtaggttttatatggatatttagatgaagaagagcatgatgctttctttgttttctttttgtaccacagtaaatgaatccaaactttgttgatagtcagagttgaattgttcccatgtgtttttctaccacaattacccataactagtaatttacttactttgcaggtaaattcttgttatcttcaccctctgatgggggcctttgtttcataaagggctaagcaagctctgcgttaggtagatgcctttcgtatctgactgacgcaagtgttagggtaaccacagtggggaatagctcagctggtcccagctaaccatccctgcttctcaaggccgcatcctttttacccctagattaaaagggagagcttgagaaaatatgcatagctaggtcctccggagtctttcctcactccctttttgagttaacaatatgcctaacaggctgttttctgaagtaaattggcagtaagtagtgtttgggaatcagagatggaatacttgatttgtccaactcctcatttaactgtttcttgctgctacctcttgcacccagcaaaaaccttttgaatattagctgaatgatttgggttcacatggagcaaatcaagcaagatatgtctcagcatctctccaagagtgagaatccatttcctgctctgtatttcaccagctatgtaactttgaataaaccattttacatgaaaattgaggcataaatatattttgtatgtaggtaggatttggaggatgagtggaggagtatggagggaccaggtctgaaggcacgtgtctatgaccactctactgcttctaaaactggacatttccattttagatttgatacatcgctgccaattgccggatggcattttgttttgttttgtttaaaagcttgcctgtacgtctcagagtctgagaggtgagttgcaatttccctgtaggtcagagaatctgggaggtgagttgcaatttccctgtaggtcacagaatctgggaggcaaggcagagaggacagggcatgcactaatatgaaggtctacagcttagctgtgctggctggaaggtactgcatttcatttcatccaggggctttcctccagaaggatcaccacctaggaatgaaagccgcatgctctttcattctttcattgttttcagaaatctattagaatggagaagacctccttcccccttcttctaatcatatataaatacagttcttttcattttcccatttttcttaaacatgataattctgccttgtctctaaagctgaacttattttcactgcaacttagaggcattttcctttatttacttgtctatgaaaatgatgagctctgagttagaattctcttaaacttttagtctgatttaggatagttattagcagtttttcattgaaactctcccggttagtttatgcctctctccaagggaaccatttcctctccttttatcagatttgtatctgtttttgagacatttgcccgttcctctacatcttttgaaaacgtgagcacctctctaaggaatgcagtaaggaccctttgatggttaagcttaaagaactgaaaactttggtctgacttaataattgatctaaataaagcagataattatgtgtttatcacgagggcttttaaacatctgccttttcatgcttagaatatagaatccatcttttcaagttgtttcttaaaaaaaccaaaaacattccacttttcttttttgttcgttttgaccctcccaggattgtcagcagcctgtgcctcactgtgtctgagttctattagagaaacagagtaaagaaggatatatttggaagggacagacagttgtactttttaagacttacttgttgtgacattttggacttttcatgtagcttctttatgacatagtttattgaacctttccaattttgtgggtctaaagtaggaataacatgttgtggttctcaaagtgcgatctcagacccagtcacatcaatcacccagggcctctgtttgataatatgatctccaagattttgttcagttctgatactgtctgatgctctgaaaatttcccatgatgtaacagaatctgatgaagtataagaggggacccaggaatccttttataaaatgggtatgaagaagacatagtaatatggtttagctctgtgtccccacccaaatttcgtcttgaattgtaatccccatgtgtcaagggagggatctggtgggaggggattggatcatgggggtggttcctccatgctgttctcatgatagtgagtgtgttctcacaagatctgatggtttaaacttatatggcagttcccccttcatgctctctctttcctgccactatgtgagatgtgcttgcttccccttcaccttctgccgtgattgtaactttcctgaggccctctagctatgcttcctgtcaaggctgcagaactgtgagtcaattaaacctcttcttctttataaattgcccattctcaggcagttatttatagcagtgagagaacagactcatacaacatagattcagatagaacatttgaacttggaaattaggttgtgaacagcaacctaaaccttttttgcctcattgcctaagctctcattgtgagcactgttttcatacatatgacctttaaaggcagtaaaaaacttcttgacagttctttttaattaacagatatgaaatattttttcatgcagtctgtggccaaatgaaagtttctcaatcctggctgcaggttcgaatcccttaggttttataggtgtcctggtgcctgaccccctcactccctgtcttctatccccaagattctgattgaattgctgtgagatggaatttggacatcagcattttcgaatgtgtttctttggtgattctggtatttaaccaatgtttaaaactactgaatggaatgcatacagatttatgggatttataattgtcataaggatatgtacaaattatttccacagatttgtgcacccagagaataagaggagtagaaattttctttatgttgtaagttattgaacatttcttatcctgtgggtctaaagtagtaacaacatacagtggttattaaagtgtgctgtcagacccaaaggcatcgatcacacagggatttattagaaatgaagatggttggagttctccccagacctactgaatcagaatctctggatccaggacccaaaaatctgtattttaaaaagacattccagagatattgatgaactctaaagtttgagaaccatcagctttaagggttgttgtatgattcggtggcagtgtatgaaaatcttagcacactgcctggcatggtgtgagtctagtaagcggagtactcgagagatagtgcttttgattgcttagcagtctgaatttggcttggggctagacctgacagttcttggcttagctacactttgaattctaagactgttatttataaggcaaatagaggcaaactgaaccatttcaaaggtgtatcagaacaacaaaacctactcacagtcattctaatgtgctcactcttccattcttatacttctatttctcagggcctaaactgtgatgttttgataatatccaaaagcaactcacttaatgatggagactgctgccctaacccacaaagtgttgagcaactaaaatgcaaggaaaagctactcctccataaatagaaaagatctcttctccaacacatcaaaaacattatttttaataggaaaataacaaataaagaacaggttaaaaggtagaagtttctgtttccccaatacaattttttgcagactatttaaaaaggtttcattccaggaaccataaagctcttggatatatgtgtataacttagatcacagagatcaggttcactccctcaataactctgacagcagtgtgcttctcttgttggtaagagatgctaggtttttctcggtatcccaaagtctcattacttcttgcctggattatgtatagatttctaaattgggtgtttcttattcatttctcctaatctgtcctgcatggacttttacattagtctttagtaaatcgtattgtaaccaagtgtttctttctcagaaatccttggtggatctctgctgcatgcatgataaaattcaaaccctttttttgatgtgcaacatgtaaaaaccttaattttatcgcatatctaatctttataactcactggcattattttacattcctgtgtcccatgtttttcctatgtcatgacttgctttttattctctatgctctgaactttctgatcgccatgcctacattctcctgtctctctaccaaggatggacgtaccttctacatcatgtttcaggaaaattatatgatccactgagacttccatgatcctccactttatcttaatttccagaggttattcatgcatctttataaattacaccttgtgttatctttagttttgtacaatttttcttcctcctctatttgattgaaaatgtattgagggcaagcaccaaggtgtataaaattcagtaactctatctcccacccaagctcattcttcgctttgcttaatatattgacccctctagactagcttttataccatttctaaatatcaaatccgatactctttcttctgaaagttaagactactaattaaggctactaattaaactaagatggggaataattgctatacaacacaaaattatgtgtcaaagccaattataaaaaagtaaaatgccagcaaatatatcacgagtactataacgttgcatccttattaacttcatgttgtttacttcttttctgtaggtgattttcttccacccccacctccacctctagatgattccagtgcccttccatctatctctggaaactttcctcctccaccacctcttgatgaagaggctttcaaagtacaggtaagagctgaagttaaagtcatgttaggtaagagctgaagttaaagtcatgtttattagccatcctagggagctcatgaatttcatgattgtttctgtgctggataaacatttatccagagcctattgagagctttacaacttatgaagatctaaggtactttaatgcaacatacccaactcaagcttcccagagttctgctggcttaccctctgaagccctcaaaatacttttgcctactaattttgtttcagatcccaaagccattttttttttaggaatactatttgagaaggcaacatttccttgttattttggaggacatacagccatgtctttttattgctatgttctctatcttcaaacattgcattcaagtgagtaaggctgacattttaaggctgtagttggttaatgtggatccttttggtcagcaacatttttctagcaaaagcaacatcaaatatccttaggattttctcttctgggtaagttcaagggtgcacatcatacttatcaattatatagaactcttgggttccagcgagtggtaattgcaaagtaactcggggctgggatcagatgtgacattagaagtggttctcagactgtgatcatcggtaactgccgaaagctgccaccatttaagctgaagaagtgctttatgtcaagaagaaaatctaataaagtgatagaattattgttatagttttaggtgtgactatgttcgcatagatacattgaagaaaaaaatgagtcttctttgtctttcagagaaacattggaaatgtttgtagataaaatggaatgggccgggcgcggtggctcacgcctgtaatcccagcacttcgggaggccgaggcgggcggatcacgaggtcaggagatcgagaccatcccggctaaaacggtgaaaccccgtctctactaaaaatacaaaaaattagccgggcgtagtggcgggcgcctgtagtcccagctacttgggaggctgaggcaggagaatggcgtgaacccgggaggcagagcttgcagtgagccgagatcgcaccactgcactccagcctgggcgacagagcgagactccgtctcaaaaaaaaaaaaaaaaaaaaaggaatggtgtctggtaattattttcaaaataataagggttggaaactactgagtgagaacatgggtgaaatagggttggttatgatttgataactgttgggtgcatggaagtttattctgttattccgtctaccttttaaaaaatacctaatatcatttgtggaacataaaatatattgaattattgctcattaattttatcatttgttttacagtattattttttcattttaatttttgtagctacaagtaggatatgtatttatggcatacatgagatattttgatataggcatacagtcttttaaacatatacctttgtatatgtttaaaatatcctataataagaagtgtaaaagagaaaaagtcttagggaacaactgcttaaatggtttgttctattatttgcctttctttctcctaaatttgaggttgaaggagacaaagaaagaaatgattcattcgctcaacaaatattctgtattcctatgtgggcattattcaagcactaggaatgttatagcaaaaaagacagacaccactctgtcctcagggaacgtaaaagttagtgggactagtggaaataaacaagatacgcacattacaaagtacattagagtggataagtggggaaacagggagggggtcaaggcttacctactaggatgggcattatcaatatggccccactgagaaggcgacgcttaaatgaggacttgaagaaggagaggagggaatgagctctagagatttcttggggagtgtattttcatatagtagatattaagaagtagaaaaggcttttgatattatctatcatttgaaatcagtaaattgcagttgtaaccagtaagtaccaattcagtttctggagtctagatcttttaaggctattgaaaaatatgtgtattgcaaatataggccatgaatttcttgcattttattttggtgtatactaataaaatcaactatcagatgccagtgatgaatgagagtcctataaagtttgtatttattttatgtaacagatagaacctttggcaaataaaaccaatatgagtgatttttcttaattttagtcattttttaataaaatgaggaaatccttagctttggctttaatatacctttggtcttactttgctgaagttggttttttgcatattgtttaatatgtacaatttttaaagtcactgactctgtttcctctcttagattgtcatagaaactattttgttgcattttaaatctttagttctcacaatgttatttgaagtagtgacagaagactcgtgattgaaaactagttacatagattattctagttgtgtgatcttgcgcaatgcatgctgagtcccggtttcctcttcattagaaacaaaacaaatatatatacctcttacaattaaatgaaatacagatggatttgaaagtattaaactgaaagggctatacaaatattttgatgttatattaataatcactattaatatgtaagaagactagtaaggattttccagtgggttccattaaaaaattcaaccatggggctttcaaaagataatgaagaatttttttcaggtggaccttgttctgttagatgtactcaagccatggctttgtttttgaagaggaaggaaataaacaaaatgcctgttgtcatgttggcttaagttctctgtaaaacagaagggaggaggataaaaaataaaatacggtttgccaaatggaaaaggacaaatctggtagggagaggcctgttatttttgagacgcttcatatggaagattgttgatacattcaaaagaaaacgaacatgccctccccttgtgcagaagtgacttagatgtgatagcggcttggtcctgctctggcccaggtttgtaccagctatagaaatgagccatggtagagcctaaagtagcatgatcactggagaaaattctgcgcagtttcctctcggctatggttaaaacctcatgttcccaagtccaaattatagctggtaaatgtgtgtttttatgcagaagactgtttatgtttccagccagattttcaggtcagagccaaaagaacgtctactaagagtgattataagagttgtaagattttgagagcagaaagggaccttagagatcatttagtccaactctggcgccaggcatctagttacagtcctttcaagtatttgctaaattaatttccttttttttttttttttggaaatggggaaactgagacccaagaagggatggatcctctggtttctgacagaggtcttattgaatttgaaaaatcttgactcctggccttgaccttcttcctgctgtcccagatggcccatgaacttggttttgctttagtcctctagcagacttcaaggctctgagattcattgcagagggttacacgtttttatttggaaggagcaggtgatgccggagttttgcttggctgtctgaatttttgatatatgctataagcttttatttcttcaaaaaaggcaaataaatatttagccttaaggattcttggtttaacagttctcattttcatgtgggaagatgcaacttggaaaacaggggaaggatttggtttgcttttctgtcaggatcaacgtgacctccatgcctgtgatgtttgtagtgacacttcagcaatcactttattaattcatttgttcttcattcattcagtgtaaattgaatgcttcttgtaagtagacatatatgctagtgattatagccttaaaacttggcatcataggtttaatgctctgagtctcagccttgggacggtcagttagttttatttatttatttatttatttatttattttgatacagagtctcactctgtcacccaggctggagtgcagtggcgggatcttggctcactgcaacctccacctcccaggttcaagcgattctcctgcctcagcctcctgagtagctgggactacaggcacccaccaccacgcctggctaatttttttgtattttcggtagagatggggtttcactatattggccaggttggtctcaaactcctgaccttgtgatccacccgccttggcctcccaaagtgctgggattacaggcatgatccaccgcgcccggccagttagttttattcttatctgaccccacagttggtaatttcttcctcttttcagccaggccataggcaagtattagtattatataacattgcttaaggtagttacaaagaagtcacgtgtctcagaattttggacttgcaagagaattagagttaatacattcaagttcctttctattgtttgaatcttgtaattttttcctacataacaaaatgtttatgggtaattatgataggtgaggcagtgctgcaggataaggagatggatcagtacagtactcagaatcacattcggaagatgcatatacacagtcatttaagtcattttatggtaaattatgctttggtcatcatacattgatcagaagcataatctaagtcctaggttagtggtggagagtgagggaagtaaattaactgtgactggagagaggcaagaaggattcatagaaacaatttaaattgaactgaactttgatggctgggtgggaccttaattttcagataggtgagtggatttttcagcaataaaataaaagaattaaaacacagaggaaggagagctcaaagtaagtgtggtaggccttgtgtttctaactgtggaacctactctttgttctgaaaccattgacaatttattgtaggggcttgttattattttaaatataagggtgatatccccagaactgttgttggatgccaagtgatactgttaacataaattaaggcaaaacatgttgcacttgcaggaaaccccatgcaaacaattctgagttgtctggtagacttccttcagatccatggggacttacctgctgacatctgatggctttgaattcaggggctcaatatttaacttcctctttttatgatatctttgttcgtcttttcttggtgacttccagttgacaacttctaactctgcttctctgtttgtttcccagtcctgtggcttgctttcatttgcctactattcagtatttgcatacctctggttttcatctttccttttctgtttggtcctgcaaaatggccaggcttgctaatgtaactccaggccctccacattagaaaacagaggggttttgtccattggtgattacttcaaatgttaaacatttctctttgttattgagtagaaatgtgtccctttatgatgtcctcatattggttttctttccccttttaaaaagtgatgcaaagtcagaggaatgaccaggccaggagagagataggtgctgtatgtctcaaggagttgatgagtaaagctactgaaagatgttacttttcaaaggagtgagtaagcacagagtaacatgagctatgcccagaattagtggaaaagtagagaaatgtctgaaattgtttattttaaagtcagcctccaaaagctcttgagcatctattcttgtgaaaacaattcaaagctcatatatgtgtatgatgaatagtggcttataatcttttttctttttttttgagacagagtcttgctctgttgaccagcctctgcctcctgggttcaagcgattctcctgtctcagcccaccgagtagctgggactttataagcacgccccaccaagaccggctaattttttgtatttttagtagagatggggtttcgccacacaggccagtctggtcttgaactcctgacttcgggtgatccgcccacctcggccccacgaagtgctaggattacaggtatgagccaccatgcccggcctcattttcctacttactaattttatgtgtttagtttaacaatgataatttgaaaatcaattcaagttttagcaaaactggcactggaatttttttttttttttttttttgggacagagtctcgctctgttgtccaggctggagtgcagtggtgtgatcttggctcactgcaagctctacctcctgggttcatgccattctcctgccttagcctcccaagtagctgggaccacaggcacccaccaccacacctggctaatttttttagttttttatttttagtagagacgaggtttcaccgtgttagccaggatggtctcgatctcctgacctcgtgatccgcctgcctcagcctcccaagtgctgggattacaggcgtgagccaccgcgcctggccggcactggaatttttgtcttgtgattccatgtaggactatcatggtctcaggtacagaacaacaggattttatttttagacataaggaactcaaacctacagtatggccacattcattcatgaactcacagaaataggcagctgaactggctttacgtgggttggaccaccttatcataaaagtctgtctttctgctgccggttagtgtgataaaggaggaggaggctgggtatgaaaagagatgtcggctgtggagattaagagtagaggtagtggacagtgttgccagggcaaaaacaacatggtcagcaagagctttaatgtattctaaaatgcttgttttcaaaagggtgagaatacaaggatatcttgatccatgaaaacataccaaagagatgattgagatgcttatttcttcctggccctttgcctagttccttttgggtcagcaaaccccagttgatttgtagcttgtttgtgaccctgacagcaacagtagcagcagcagcagcagaagcagcaatagcaggagcagcttgctttgcaattatctcctatttttatggtccacatatgtaggtcattgtgtgtttattaaggctgggtaggctcttagcatgtcactggctctggtcattgtgactttctagaagcgaatgtcacagttttcctggttgctttttgctcttaatcatcatctgattggttattcagataagaagatggacatttttgttgtctggacttgtaaaaacccttttgacagtagccgacctagagtccaggggagtattccaatatttcatttagcattaggaaacttttaatggaatatcatagtttctcttctttactttttaagaacttaaagaggtaaaactttcccctgggattgatagtggagtatgtgtacatatacacatacccacctactcacctatatcaacctgattaccactgccaccactaccttgaaataatttgtgacacatttatactctctgcagtgaaagattggttaactgctcgacaaaaaaaagtcttgtggggaattgatggtggttagttctgttgaatgtagggataaccaatgaggttagctttgccttagctcctgagtttctgtatagggagtaatatactatgcttgcatatttcagaacatttcctttgctcaaagttaagtgagactatagttggttctttttgagtcagtgaaagttttatcccaatttgtctctcccatcaagagtcttagtggtttcttcaaaggtgaaatgtacttattgttttttttattttaacttacaaaaaagtagtgggtctttttctacttataagaaagtaatgtcagccgggtgtggtggctcacacctgtaataccagtactttgggaggctgaggcaggtggattacctgaggtcaaggagttcgagaccagcctggccaacatgatgaaaccccattgttactaaaaatacaaaaatttgctctgtgtggtcgtgtgtgcctgtaatcccagctactccagaggctgatgcaggagaattgcttgaacccagtagacagaggctgcagtgagccgagattgcaccattgccctccagcctgggtgacaaaagcgaaactccgtctcaaagaaacaaacaaacaaaaacagtaacgtaaaaaaatcaaacgatgtagattagatattttcaaatttatttctctatgagggaaaaattatgatctgcttatatgtcctgctcccaataaacacgccaaatgatgcttgaacattcttttcttccctgctccatcccacattctattaaaataatttggagaatatgttgtaacatttttaactttatagcaaatctcttttgagaattgtttcttgcattaaattttataaccacatcagtaataaactgtaacttttacctgtttgctgtgctattttctatttactatctttttcttgtattcatcatcttgattcttctcttttttgttctttttttctgccatagtacttcattaagtaattttatgggaaggctacatgcttgatgtatttcctgagtctttgtatatctaaaatgagttgttattgccttcatatttgagtaaaagcttggctataagtagaattctcgggtcaaatttgctttacttcagtattgtaccaagatttgcacactatcatttagtatcatttagtattcagtgcagcagatgagaaatctgatgccagtctgattccttttccagtttagtaaatttttcttgtttggtctataggctttatttgtgggattcagcaattttactaaactgtgtctagacacagctcgctttttacctattctgctatttctactcaagtcaaggttttctttatgtaaatgggattttcttctttcttttcttcttttcttttcctttctttcttttctttctttcttgaactcctgagctcaggtgatcctcctgcctcaacctcctaagtagctgggactaaaggtgtgtaccaccatgcccagctaatttatttatttattattattttatttttgtagagacagggtcttgctattttggccaggctgatcttgaactcctggcctcaagcagttctcctgtcctgatgcctctcaaagtgctgggtttacaggtgtgagccactgctcccagtcaagattttcttataatatgttgaaaatatattttaatctttcattcacctttttcttctttatgaactcctactatatggaattggatttcttctctattcttcatattagttttctttttccaatagttctactacatggagggatttctgttgcttacttcccttttatattcttaatttttgtggtgatagtctgcttttgacttataaatgctctataaaactgaatttggggagagtatttggtaggagtggctctggatatctgttgttcagggtagctagcttgcacttaaacctttatcttttatctgaaatgggaatatatagttatttaaatgcagggtggccatagggtatatacgttcagtcttcaaccatatatgtaattaggggatgcaggccagcagaagaattgcccttagatgcacaggtcaagagcagaccagcaaggttaatctgggtcctcaaggctaatggtttggggattcataggcaggtagcaaagcccctcccttacatgccatacatgtatgccaggtgagggctgcaggagctgtggccagcgcttatgtatattggtctctagttgaattctcaagcccctttgatttcctccctcattgtgttttcatcggtgactttgcttctcaatgacacactgtcaccagcggtgctgggaattgtggcagagtcctttttgttagaaagcataaactcattaaatcacttcagtcaaatcacttttgactgactttcattaaatacccctaacgtccattctaaagagccttgccccacccctcaccctttttgttatgacagttcctggtgtcctgctcaggtcctggtgtcttttgctatgtatctcaaactcactttgctgcctgtgaggagttcatcacagaaaacgtgctctctgatagcattatctaagccaaagaaagcttcagagacagcataatgcgatggttaacactgcaagtgctcttccaggcttcctgggtacacatctggcttcctgcttactggctgcatgactgtaacgtgctgctcaacctttctgtggcccacttaaatcctctgtaaaatgggtgattgattgttgtgaggtttcaaagacataatgcacataaagaatattttatgtaattgacatgtcctaaaacttagtaaatattttcactgttgtgatattttgggctagcaggtctctgtgctgggttttgccatagttgtcactgacatttgatttgcaccatgcctcctcagagttaacccgtgatcccatcccttgctattataaggttcaggattttatatatatatatatatattttatttatattttattatatatttttatatatttatatttatattttattatatatttatattatatttatatttatttatatatatttataaatatataatatatatatttataaatatatatatatttttttttgcagaagaaatactcccacaaacttcctctataaaatgaatgattgaattaaataatcatgtagctctcttacagctctaaaattcagtgccttggtaataaaatatcacttctttgtaatttcatggtgatttataatttgcaaaatacattataacagcacaagtataatttaactaatgaaataaaaatgaggatccaagagttgaaggaacttgtttagatctcataattgtcatgaaagcagttacttatttttaaatagacaataacaaaatcatttcggtgactttttacaaatgagagaatgtggatactcttaaatcctcaaaaagcagccattgtcgtcaataatatatgttgatgtttagtaaccatgaacctccgaggtagttttctttgtaattttttagtggaagattagcacatcttccatcctggcctctagcatattttctgacaaaccccttgttgattgtatcacataccttttatccatggatttggtacgaaagccctattgggcccacaaatctttcggttcttttgtaatttacataatccaatcaacaggggcacagaaacaccttgttctgaaagaaggagtgaaagggagtagaggatgctgacaccaaaaacctagggcactaactcatattttatctctgaatatagtactttgaaaccctagtgtcttaggaaggttttctgttcatagctgatttcacttgatccattcaaaagtcaagcatttttgtactcttactatataacttaaaatatattatagcatggggtgtttataccaatccttgaggggttaagctattattatcattattttatcattaacttctgtgagtttgacttgtacagggcctcctagcctgcaaatttcaaaattgacgtcttttttttttgagacagggtcttcttgctctgttgcccagtctggagtgcagtggcatgatctccactcactgcagactccacctccagggttcaagccattctcccgcctcagcctcctgagtagctgggattacaggcacgtgccatcacacctggctaatttttgtattttttttagtagagacaaggtttcaccatgttggccaggctggtctcgaacacctgacctcgtgatctgcccacctcagcctcccaaagtgctgggattacaggcgtgagccactgcacccagcaaacattgctttttttaataaaagactttcatatactttatctcacttgaacctttagacaacttctgcaaagggaaaggtagggaggattctccatcttgtatcagtgaaggctctggggctctgaggttaagcagcattccaggtttccatggcattaactgtcccaggcagggatgaagctctctgagacgtgccagtccatttctctctccattgccatcgctgctgtattgttactctccctttatattcatttttagtgaaggaaacaaaacagcagttgtcactttcctttcccagtagtttcattatttgctgtcaccagttctgttgcaggatcctctattgtaatattgtcttcagattttaaaaaatgtatctctacatattggaagaaagcactgtggtggaaaatacaggaaaactgtgtacagacctgttaaatggaaatgttttcataatttttagttagttttatttgtattttactaatgaaatttagtaaagatgtcaatgtcaatctttcttactacggaaataagttaaattttgccaactagtggaaaaaaagtttctgtggcattttttttttttaaggaatacaggattgatacaagaatgagagcattcatattataagaaatataagttttgtggttttttttgaaataaaaatttggtttatgagaggcttaaaaaatgaataaattcccttctttcctgatagtttctgtcgttcccttggggattaaaggagtgtgaatctatcctacagccacttcctctctgaactgtagatgacacatcaggatgtgatttggggtagatcaagcctcagagtcgaatctcagtgtctagccgtagaggtggtatgatagtatgataattccacatgtcctgccttctgggctttttgacattcatagcatttctaaacaagtgaaggatttatcttaaaaaataaaattttagtattttcttcattattcgtgagctttaattctttccattagaaattatgtcatccccatatttagagcaatgaataattgcataacttttaaattgtgtatttgatggtatggtgtatattgaaaagagaatgagaaactatcccctgaatagagatttagtgattcaagccatcactttctaaaatatacgcacttcagagtgaaagttcagtgtcagaacttcatagagtgtctggccagctagagttaggtatttcatggagagatgatcaaacaattgaacagaaaatacagcaaccagaagagtttttcactgtgcatgttcagaagacttcatcatttttattatcattttatatcaagccattttataagtagagatgtgtctagaggattgttttcatttccttttagctcattgaaagtcatacagtgtcactttagtaattctcttcttgcccagtggggatagaaaccagttttgggccacggcaactatatagaagtattttcatagagttacagattcattaaatgagaccctctctcctccccttaacacccactgtgtttctgctataatgaggatttaagcaacagtcccaacatgaactagctcatttcagtactagggaaatggctgttgcatgggtttaccacctctgattctgcaacaattgttctttttctgacagcgtcttctacctcctccaggcaggcacaactcttgatgacttgaacctcctatgttcttttttttcccccccagcttgtaaaattatggtaaaatacacataatataaaatttactatcttcaccgtttaatgttctgttcagtagcaatatgatgaagtacattcatattgttgcaactgtcaccagtatccatcttcagaactcatttcatcttgcaaaactgaacctctataccgcttcaccaataaccccccattccactctcagccagcccctgaaaccaccattctactctctgtctctaagattttaacttcacgagcacatggtaaaattgtaatcagattgtatttgtcttcgcaactggcttattttacttaacataatgtcctcaaagtttatccatgttgtagcatatgtcatgctatatatatgtcatgttctgcttatccgttcttgttaatagacatttgggttctttccccattttacctactgtgggaataatgctgctataagtatgggtgtagaaatcactcttttggaccctgctttcagttattttgagtatatacccagaagtgaattgctagataacatggtagttctatttttaatattttgaggaacattcataccattttccacagcagctgtactgtttccattcctcacaacagcacacgagttctgatttctccacgtccttgccgacactgttttttgtctcgataatagccatcctaatgggtgcagagtgatagctcattgtagttttgatttgcatttctctaatgattactgattttgagcatctattcatgtatgtattagccatttgtatatatatatcttctttggagaaatgtctattcaagttctttattcatttttgaatttgacttttttttctttttgagttttgtaaggtctctatatattctgaatattaatcccttatcaggtatgatttgataatactttctcccattttgaagattgcctttttactccattgatactgtcttttgatttttaatttttatgaaattcaatttgtctcttgtgttatttgtgccttttgtgtcatattaagacattcgttgccaaattcaatgtcatgatgcttttgcatatgttttattctaatctacaattttagatgttacctttaggtcatggatccatttcgagttaacttttataattatgctaggaaagagtccacccttactcttttgtgtgtggatattaaattttcccagcaccatttgttgaaaagactgtccttcctgtattaaatgatcttggtgcccttgtaggcagtgacttgaacatatatctgagggtttatttctggactgtctcttatgtgttattatgccaatagcacactgttttgcttactttagctttgtattaatttttgaaatcaggaagtgtcggtcctccacctttgttcctttttactcaggattgttctgcctattttaggtcatttcatattccatatgaattttaggataggtttttctactttttaaaaaatgtcactgggattttgatcgggaccgcattaagtctggatatcatattggttgatattgacatcttagttatattaagtcttgcattctatgaacatgagatgtctaccatttatttatgtcttctttaattcctttctgaaatgtattcaagttttcattgttcaaggcttttaactatttattcacgttaatttctaagtattttgtcttttattttttgatgctattgtatatggaatgatttgcttaatttcctttttgaattgttcattgttgatacaaatgtaagtgatttttgtgtagtaactttatatgctctacttggctaaattcactatttagttctaatagtctttgtgtccaatctttagggttttctacatataagattatgtcatctacaagaagagatgatttaattctttctttttaattttgacacctttatttttttttcttccctgattactctgatgaggacttccagtattacactaaattgttatggcaaaagctggtattcctaatcttagaggaaaagctttcagtcttttatcattgagtatgattttctctgtgggtttccatctgtggcttttgctatgttgagatagttttcttctattcccagtttgttgaatatttttcttatgaaaggatattgaattttgtcaaatgcttttctgtgtcaattgagaagataactttttttccattctgttaatataatatataaccttgatttgtttgttgagtatccgttcgttacaataataaatttcacttggccatgatatatcaaacttgtaatatgctattaaatttgacttggggtatttgattgaggattttgcatcaatgtttattagggatattgttctgtacttttcatgtagtatctttgtcggactttgatgtcacagaatgagttaggaagtgtttccttctttttaattttttggaaagatttgaggataattgttgttagttcatgtatcaatgtttggtagaatttactagtgaagccatggttccagattttttcttactcagattttggatactgattcaatcttcttagtattcatagcatattcagattttttatttgtggtttagtcttggtgcattttgtgtttcttgaaaatttccctgtcatctgggttatcgaattttttgccacacacttgctcatagtactctcttaaatcttttttatttctgtagaattgttagtaatgcccctacttttatttttgtcttttgtagtttgagtcttctctctctgtctctctctcacttcatctagctaaaggtttgtcaattttgttgatcttttttaagaactgttggattttgttagtattctctattatttttctattctccattctacttatttctactcttatctttattatttcttcccttctggtagatttgggtatggttttttctttctttttttccaagtttcacaatctgtagatttaggttgttggtttgacgtctttcttatctttaaatttaatggtgtatagctataaattgcctcgtttgcactgttttcactgtttcccatacgtttggtatgttttctttcatgttcattcatttttaagtatttttctatttcccttgtgatttctcctttgatccattgtttgttaaagagcatattattggctggatgcagtggctcacacctgtaatctcagcactttgggaggccgaggtgggaggatcacgaggacaggagtttaagactagcctggccaacatagtgaaaccccatctctactaaaaattacaaaatattggccgggcgtggtggctcacgcctgtaatcccagcactttgagaggccgaggcgggtggatcacgaggtcaggagatcgagaccatcctggctaacacggtgaaaccctgtctctactaaaattacaaaaaattagccgggcgtggtggcgggcacctgtagtcccagctaatcgggaggctgaggcaggagaatggcctgaaccctggaggcggaggttgcagtgagccgagatcactccagcctgggtgacagaggaagactccatctcaaaaaaaacaaaaaccaaaaaacaaaatattagccgggcgtggtggtgggcacctgtaatcccagctactcgggaggctgaggcaggagaatcgcttgaacccaggaagcagaggtttcagtgagctgaggtcgtgccattgcactccagcctgggcaacagtgtgagactccattaaaaaaaaaaacaaacaagtatattatttaattactgcaaatttgtgaattttgcagttttacttatgtctatttatttctatttttatcccattgtactcagagaagatactttgtatgacatctactttttcaaatctattgacccttatttagtttatgggcttattcatgttctatcctggaacatgtcccatgtgcacatgagaagaaggtgtattcaattgttgttcaagtcctctatttcctgacttacctattgtttggctgttctatccactgttaaaagttggacgttgaaatctctattattatacaactgtctatttcttccttcaattctggtaatttttggtttatatattttgatgatcttttattaggtgtgtatacatttacaattgttacatattcttgatgtattgagcctcttattaatataatgttcttcatctcttttttgtcttttagccttttttgacttaaaatctattttctctgatattttgctagtctgctttttgtgggttactatttgcatgaaatggtgttttctgtcctttcattttaaactgtttgtgtctttggatataaagtctcttgtagacaacatatatttgggttatgtgttttaatttattctgccaacccgtcttttgaccagagaatttaattcatttacatttaaagtaattattgataagtagagaattacttcttattttcctacagatgctccttaagttgtgatggggttatgtcccactaaaactgtcttaagttgaaataattgtaaatttaaaatgcatttaatatacctaacataccaaacatcatggtttagcctaacctactctaaacatactcagaacacttgcattagcagacagttggaaaaaaatcacctaatataaagcttattttataataaagctttaattatcttatgtattttattgtatgttctactgaaagtgaaagacagaatagatgcttcaagtatcgtgtttaatgaatgtgtatcacttttacaccatcatatggtaaaaaaattgtaagtcaaacccttataaaatttataagattataaaaccatttatatttattttctatatgctttatagtttctttgtcctttatttcctatataattttttttgtgtattcaattgattttttgtagtaaaatatttaaattcctacctgatttcttttgtgtatattctgtagctattttctttatggttacaatgggggttacatttaacatcctaacgttataacactctaatttgaagtcataccagcttgacttagataacatacaaaattctgttcctttttcagttgttgatgtaacaaaattacatctttatacattgtgtacacaacaacataagctaataatttaatacactcatttcttaaattgtagaaaacaaaattgggcttaccaatcaaattacaataatatgagattttaaatttgtaatttaaaaaaatattagtttcttaaatcatgtagaaaacaaaaagtaaagtcacacatcatgattacaatgatgttagctcttataagcgtctgcctatttgccttttctgacatctgtatttctttgtatgatttttgagttactctgtagtatcatttcttctcaacctgcaggcttcctgttagcatttcttgcaggagaaatctaacagtaataaagaactctctcacctctttttttttttttcatgactggcattttgattttctttctcacttttaaaataaaattttgccagatgtaggattcgtggttgataattttttttccttttagcactttgaatatattggccctctgttttctggcatctaaggctgctgctaagaaaaccggataattttattgaggatcccttgtatgtgatgagtcacctctcttgcaactttcaaaattctccggttgtctttgtcttttgacagtttaattagaaggtgcctcactatttgtctgtttgagttcatcttacttgtacttttttgagcttcttggatgtttatactcttggctttgatcaaatttgggggagtttttggtgattatttcttcaagtattgtccctgccttttctctctgtctcatacttctgggaattccatgctgcatactttggtatagttgattgtgtcccacaggtctcttaggctcagttcacctgtcttcaatcttttttctttctgattcttagactaattaatttactttgacctctcttcaagttttctgattctttcttttgctgttaaatctgtctttgagttcctctagtgaattttttatttcagttattgtaattttcatttccacaattgcttttttttctttttctgtattgatattcccattttattcatgcattgttttcttaactttctccttgcttcctttagttctttcagcatgtttaagacagtagttttaaagtcttcgtcaggtagatcccccatcaggtcttttttagagacagtttctgttggtttatatttttgttttgaatagaccgtgctatcctgtttctttgtatgtcttttgattttttgttgttgttgaaaattgcatatttgaaactaataatgtagagccctggaaatcagaccttttctcttccccaaggtttactgttaccgtttgtattttgtggggttattgttgccagtctctgtgctaagtattagctttttttgttaacttgtggtcttaagtattttctgagcctgcatgtttccctggttatgtgccatgactttctcatttcctctgttgttttcaaatgccctggttatcaaggtctgtctcccaaaatgagaaaaagtaaaaaataaaggaagaaaaaaaaaaaaaggactggccttttgagtcccatggaagtcacttcagctggagtgagaggggcaacactaatgatagttgcccctttttctttatgtgtgtgattaaaagcagcaattaatgttcagtccacagatccttgatatatggaagacaggtcctttttgcccagcttggatcatgtaagctgtatgcaagctgcttcaagtacatgtgcacagatgcctgccaaggatctaagaggtggggtataggtagttgctattgtgctgagatgtaaactttacctaaattaaccacaacttaccatctaaagcttccctccagaaagtagactcctttaatagactctggacttccaaaataagttgttgatatagatggtggcagtgcaatggttgtctaggtggaaagacagatttgtggtgcctcctgctttgccatattctcagaatccctttcacttccttcgatttttactaagcagaactaacttccttaattcctctgccatgcctgcaactattccttttctcccttctttaccaccccctcctcctttctccctgtctctaaatttaggttcccactcagagttctcactttgaccttccgttttctctcagtagatgtcactactctaataagatcaactttgatctttctttatctaattatttgaactgcttgtgacttggtactgtgttttcctttgacaagttttgtttcatttatccatgagatcttttcatagataacacctgccttttcactttcaatgtatccctaattctactcatcatcttactcaaaggcttacattctgttagacataccattatattttctagtcttgccaactaaatcgtgttcattgatgatatatcttgctttctttgtatatctatcaccaaggcttacaggattatttcaatctctttattttcttgcccatcatcctagttcatatcttctgggttacaacctactcattgccttcattctatctttttcacattccaactgcatatctgtaaccacttagtggtttaaaaaatattattttcttcctctggcttttccacattaaatttctcctcttggtttatttttcagagtactctatgacctacctcatcctatgtagcacactgtatctcccactgtgctttttatacagtccttgctcttttgaagctcatatcgtcattgtcagcttcatatgccaagccaatttttcttgtgtctttctcaatacctgatgaaccctcatatcctcatttttagaagcctaactctactattttactcatacgtgtctgacaactggatcatcttgatctctctcttctctgcatcctcagtcttttgattgagtcatgtgatgtggtggcatgagcccagggtttagggctaagaaaccctgctctgttgcttatcactgcatttcccatctttacatgcaaaaatgaggatattaataacaatttttagaaggttattttgaggactaattaagataatgtagagtatccaacaactgctggttcagagtaaaggctactatgagtcagttaataaatagatttattaatgctgtttgattttttctgccacttaatatatacccttttgtggggtaatgtaatcattgcatgtacattaatcttgccaccaaactttattttataagccagaatcataaaataacatgggagacttgtagaaattatttaaaatcacaaatcgtagagcaccagatttgacatggtcctaacccctctgccctttcttgtgatgaggaaactggagcctaaatttcttaagtgaactgttcatggtgacacagttactaggagagctggtcctaaccacaactagagatttctggactcccaggcctctgctctttccattaccttcttgttcatttattttagcaattgcctgaaggcaggatcacaacccatatttctgtatcacccataacctttattttcatttcattttattttttttgagatggagtcttgctctgttgcccaggctggagtgcagtggcgcgatctcggctcactgcaagctccgcctcccgggttcacgccattctcctgcctcagcctcccgagtagctgggactacaggcgcccaccaccacacctggctaattttttgtatttttagtagagacggggtttcactgtgttagtcaggatggtcttgatctcctggcctcgtgatccacctacctcggcctcccaaagtgctgggattacaggcatgagccaccacgcccggcccataacctttattttattgcgagaagatagaatagctacttgattgatatttgtggcttgattgatctattctttcttcgactgtgcaataggaattctctgggaaaggactatgaagtctgtatacttatcacccttttgatgcttttggggttgttgtaagcatgcaaagggttcattgtgcactgcttctgtatactgactcagggtggtggggagaggaaatgggagaggaagttatatacatcttgagcaaatcaagcttttctatttttagtccttgctactgtttggaaagtacagcctctgttcatggcagtctggcatgtgtttccttagtgccatttcgaaagggggaaaaaataaatatgggaattttttttttttgtagtgaaaatagttactcagtgaaatcacataagtttcccgtttttctcttgatgaaacctcaaacccactaggcacagattcctcaacctcaactatgcatgtgaaaggctcatgcagaacaggagaccagagtcagcaaaaccttgtatagcaagataagctgtggtgccgcagagaagcgcggatgggtggcggaggtggggaaggcagggaagggaatggtgatgttctttcatatttagtggggaacttggccaactaccagatcgttgccccctggaaaaggctgaaacctgaactaagataaagagacacatagctttgcagctttttgcttaagctgttccttttgcttcagtttctgtccttggtaaaagtttccctgactgctttatagctactcccccaattcaaataaataatttttctttaatagttgtgatggcatttgggagatttttccaatctaaggctatatcattaggacacgataaagagccttttatgctagtaaataaaatgatttgatctgtatttagatggattgctataacatagtggtactcaagtgatcagaaatggtgatgacagagtgtcttggagtcaccttcaggggtccattgaggcagacaaggaccttaaccaaggtggtggccatgaccatggagaaggggaacaagaatcaaaagcaatttggaaagagggggcttatgggaaagagaagagtccaggatgcttggcaggattgtgactttcttcagggagaatacatatccttcctgtcctagtatgtggcaaatggaagaatcctttggaaaaaaatgaggactttgaagcaggtgtgatgtgaatgttactagaggaaatgttgataccaatgagcaaatattgccctttgttaatgaaagggactatacagtctccagacataaacagctctgcctagacaaaattgtagcagtagggtgagaataatgcattgctataattaatgctaatttgtggatattgctgtattgttgtcattgttttttaattgaatatgtattaagctccaacagggtgctatgaataatgccaacttatagttgatttatgagaacactcagaagactttattaacaccagtaaatggaaactcgcactccttcgaggtggtaaacgtctttgccatttcgacagatgaggagaagtgaagtagattgtgttttctctgttggcactgcgggtgagaacacagaaactgtcgaatgagagaaaagtattttccttgtcccctggaattgggttagaatacattagtaaagaattctttaatgtgttcagagttgtgggattttaattaaattgttccagttattgttagcacttggattagcaactggcaaccaaattctaggccagcagatttcaaatttagcatggacaagaattggggtgaggccgatgggtttgttaaatgccaattattaggccctgccttcaaaggtttagatttggtaaatctaggagggggcttaggaaaatcttatgttcatggatatcgaaggtgcttctgtcctcaaaggttgctagcttcctttcaaaactccagtattttcttattttaggacgtatctttggccaccaaaatctagcttcacctgagaccaagggctttttatttaatagctgcaaattctcttataacacaccaagtataatcctgtaatcctcttttatacacaacataccaccagaaaacatgtgcagaagacttaccgtatgcttagcattctagtggacacatgatttctactaccttatttcacctggtctccaaaatatccctgtggggttggtattattgctcccttatttcataagaagacactaaaactaagagtatacgacttggtcaaacatcacatccagtttaatcctttctatcttaacctggttaggcatatattttactttaagtttgaacaacaggtgggattctttttggcactgacagagtttgcagttgacagtagagactgtaaactcggcttaagtggacccgtcccataaagaaaaacattcacattggaacaagggagaggtgaaaaggaaagttggaagtgagtaattcaacttttcatttttttttgtccccttccttccttccttccttccttccttccttccttccttccttccttccttccttccttcctctctctctctcttttctttttttttttttgagtctcactctgtcgcccaggctggagtgcaatggcatgatctcggctcactgcaaactccgcctcctgggttcaagcgattctcctgtttcagcttcccaagtagctgggattacagttgtgtgccaccatgcctggctaattttttttttgttgttttttttttttttttttgcatctttagtagagatggggtttcaccatgttggccaggctggtctcaaacttctgaccttgtgatccgcctgccttggcctcccaaagtgctgggattagaggcgtgagccactgcaccgggcctgtctcatttctttaatacgaggtactaaactgtcactgagtaaatagtagacatttgattattatttgactctgaatattttttgaaaaaaggaacatttcataagaaagcctgaaatgagacatgagcagaattctggggtatagaaatgatttttaagttgagacaagaatagtgaagcttgagacgacattattccttgcctcctttagactttcttcagcctccacctagcaaagtaaaagtcttgtcatagcagtctgttgcattgtattccctgggtctaaggcagaaatgtgtacgtgctccaataacccttgtttgttgtgctgtggaatcacgttcatttctgattaaggtgaaatcagtagctttctgatacggtctctcactcactttttatcaatggcaacctttttcctaaaaataggaatttctgctgggagtgttttaatataaattgtctgtgctcagcctgaaatatgtgtgattcataccatgtgtttgttcccacatcaacactaagtcccaagatacaattacccctgcccactctctccttcgtcatggggaatgtgtttatcctttagatatcagcaccttgggtaagagccaatctccttatatgccttggtttgcacacctgcattgtctgaccacagctgaccctttgagtctgctcttactctatttttaccttaaagaacactcgtgtttgccaagtacacttgcacattgcagagttccttctatatctttatgctcatgttgtaaatatgttaaatacttgttctccatttaaggccttctcaattctgtcgccatatagctctctctgatttctctattcagctactttctctctttcctctctctcattttgcttttttctcgaacatcttgtgtgtcttacctacatgtagtctgccttctaatatggacatttgtggataaactagtttcttcaatgcaactgtaagctcttggcagagaacccctgatccattctctttccctccctccccttccttctccctctccctcctttcctttctttcttccctccctgcccccctccctccctccctccttcctccttccttcctacctgcttccctcctttcttcctacctgcctccctccctccctccttcctttctacctgactctctccctccctccttccctcccttcctcccttccttcctcccttcctccctccctcactcccttccctcccttccctcctttctttccctcccttcccttccttccttgccttcctgccttactcccttccctttcttcctccctcccttccttgcccctcttgcctgcacctcatatcaccgcgacctgactattcgccaaccaccttacacgaaagtccccgacacctatccttaccgccgaaccccctggcacaaagggcgtgccccctcggcttttccgctgaggtttaagccccgcccagttcccgcagcctcacagggcccctacccctctccatgacgataaaaggtacgaccccttcccctttccgccattcctttcccagcctcctcccccgctccccctttcgtaatacccgctccctttcgaagatcaatcccaccctgcccttctcccccccccccataatgacccgtttgattccggccgccccgcaatccctcctcgtcccgcgcccacacacactctatacctcagcaacccgctacgacccccccaccaaacacacgtcctccccgcgatcttcgcctccgccccccccgttggggccggcccggccgcgacggccccaccccaccccccccccgtcacatccccnnnnnnnnnnnnnnnnnnnnttggtaatctaataggcccatataatctctgcttggtgttagaagggaagacctttcaccttttgtgttttcttcctaatgtcatgcaaagtgctagagctttggagcaaaacgtttgatttccaaattccaattcttccgtttactgcccgagtaaccctagaaagttctctttttctctctgatccttgggctatcctcttttgaaaacaggaataataacatctactaatctctaggattgctggaatagctcgatgagatcgtatatatgaaaatgcttttctaaacctgagcacttctctgtgataatggccgtacagagggagctatgatattttccctcttgttttcccagtagtgactatgtcccaggctgtgtgcagtggactgggtagctgcctagtaatattgctggcttgtaggatatttcctgttttatatgttcttaagaagatcagttgaaatgtacgagatgtcgttttggaaaagatgtttcacagtgggaggtgttaaagttttagtcctacttcagccccttcactatacaaactaccttacctttttgggggaattgtattatctttaaatgaaaatgatggaatagcgacgtaaattccccttctagttctaatattttatgagccttatttccattttctatgcttatcaactataaatgattctcttgcagttgttcaaacatcttttatctgcacatcctcatcaatggtatttaacatatagaatcagaaccacaaatgtttgaagaaaattctcggccagacatggtggctcacacctgtaatcccagcactttgggaggcctaggcgggtggatcgcctgaggtcaggagttcgagaccggcctggctaacatgatgaaaccccatctaaaaatacaaaattagccaggcgtgttggcacgcacttgtaatcctagctactcgggaggcttaggcaggagaattgcttgaacctgggagacggaggtggttcaatgagccaaggttgcagtgagtgccattgcgctctagtctgggcaacaagagcaaaacccggtctataaataaataaataaataaataaataaataaataaataaagttcccaccctctgtacgtttccatggcatgacgctttgctttatatctctgagtacatgatatggaatatgggacatgggaattgaatacttttttatggtttccaattttggtaacatttaaggggtcaaacaagagttcaagaaaaaaaatacttgaaaatgatgagctaatgtataaagttaacatcacatttctaactatttgaattttggggaatgtgagaaagtggcttttgaaatgtatcatgcctgagcttattaagcctgtgttaccaaaatgaaaaataagaaacatgtcttccttgaggttttaaaaaacaaaatcaatagcaaaattacctgacaagttctgtttgattcataaatccacacaattgttgcacatctccagccccctcaccacatatgaaagttttcttaatgtaaaagtaaaccttttctcccctacctctaaaaacttctgtctaccaattttattatttcatgttattttgttatgcaaaggattcctggaaaaatatccatgatcctagatgatcttatggatatctttataggtatttcaatgtagaaatttcaaataaatgtatttcccttttatgcacaaacacagagttcagaaaagacagttcatttagagtttgctaaactgtgtgtgtggactaactggtaaggtgacgctctaggatggcacagcttgcctagataatctgtagcagtggtttttaaactattaatttcttagaattgcttcaggaaatattactaaaggagatgggggataaagcagctctgtctgtatatgtttcatacaatgggtttccgtgtctgatttcattttaccaggggatctgctgcttaaaaagggggtgccaaatatctattttactgtcaaatagttcatcttattgtgattattcttagagttcctgttttattgatgaatagataatatatgtattgttccttattattatctatgcaaattgacctttattttaattgtaaggggttactttaaaaatatattatttatattatttttattttataaggattggaattcagtagaaatcattcaacgagtaggtaaatattgtgaaaagtgaggggtttttgttgcatatttagttttgctttcttatttgaatagaacagtgaacagtgaggctacttgtgtatacccaagttcagatcactttaaccatgaccctgcccttacttataaaagagttggcttaaactcggagttggcctaactcttacgggtttagtctgatggcttttgaacagcaaagatagtgacaggcaagttgtgaaatgtcattatagatctatgcagtattagaggttaaaaaaatagaaaacgacctggaaggtgcataccctcatttttgtagaggtaaaagttgagttccagaaagtcaaagaaactgcttgataatatcagcgggacttggtcttgtttaggctgcttcagtagggctgattgtgtgaaacagaggccccctggagtagcgctgaatcatggagtttatcttaaggatggatctgaatgagatctgatatcaggaagctcagggtcagggcagatctgtggctgaactcttccatctatttttcttctcattgttttttttccctctctcccttcctcttttcctctcctctccattcctctgcttctctagtgttcgcttgttcattgttttcctccacccaatgatagacttcctacctcctgttgtatgtttggattgttaataattaaccatgtacatcatctttttggttgatcacagccatagctcatccctgtggcaattttttattttttattttatttttttttttattttttgagtttcactcttgttgcccaggctggagtgcagtggtaagatcttggctcactgcaacctctacctcccgggtgggttcaagtaatttttctgcctccagcctcccaagtagctgggattacggttacccaccaccacgcccagctaaattttgtatttttagtagagatggcgtttcgccatgttggccaggctggtcttgaactcctgacctcaggtgatcctcccgcctcagcctcccaaggttttgggattacatgcatgagccaccgtgcctggcggcagttttgttacatgtttttcagtccaaacgcataagagaaggagatttatttgcccatctaatctccttgtcactgtccaaaagttaggttcaccagcctatttatggacccttggttctgtgggcctcagtgttctgaaatggagtcgcatggttgaaaacatggctgttttggcaacaaagaatgggggcaggaccatttcctttaaaggagatttgggttggccaaacattgctaacactgggtgagtgtgttagggctgaaaaggatgaaataatgtaaattgtgaggaaaaaaaattcaagcatttatcaagcgtagcatttatgttctatgttgacgtttgatacggcttggatgttttttccctccaaatcatgtcagaatgtgatctccagtgtttgaagtggggcctaatgggagatactcgatcacagaggtgaatctcttatgggggtttagtgccatccccttggtaatgagtgagttcttcctctgggttcacacgagatctggttgtttagagagtgtggtacctctccccaagccttgttcctcctctcgccatatgacatggtagctccctgttgccttcattcatgattataagcttcctgacgctctcatcagaaactgactggatattgacaccatgcttcttatatagcctgcatagtcatgagccaatttaacctcttttctttataaattacccagcctcagctattgttctatagtgatgcaaaaatggcctaatgtaacgtttttgtgctttatcatgaaaaactcttgtcttctgttgttaccttatttcttgtttatttaatgctgtgttctcagttgtcaagccagtattgcacttcagattatggaaatgtattcccccttatgaatgctctagtgtttgctcccaagacagcttttgcgacaacttttcccactgcctttaacatgtggagaagatgtccttctcggatattaataagacttgagtttaggcctggttttgcatattagaaaagttgaattgtatttctgttggccattagataagaaggattttagggaaggggactgtttttgtttttaaatttgtgtctcttccacatagttttacaaagagtatcaaataacatagtgaatttgatatctctaggcaaaagtgcaagtgatatttttcagtagaatacatatatataaactcctcaaggttgggtatcatggcttttttacactgcatactacttagcataaactattttctagagcagcatgggagaaaagccatccactcaaatccatcatgagagttaccctatgaacattggtgtcatggaaaattagacaaagaggagtcagttatcaagttagtgggttatttgtaagtcctcctcccctggagaagggtacatttggggagatagataggtaaggtttttggaaagctaaacacttcaactgaatgactgggaaagaggatacacatcccaataggaatgcattcattttttccctaacttacaacagtttgtatctcattccataaaatgacatttctattagataaaatagatcatattttctgcaattctcactactgaatacggcctgtgtccactgaacattaccaggatccgtttggtgaggctgctcatattactatacagcatgagagattatattaaatagaaatgttactgtcttcatttttatttttatccaaatacctcttagctattatttggtgtgtcaattggtattttcatggcatcattaaccatatatatgacataatataggttgtttttaagggaaataaactataaattcactcagtacccacccttactccccctgccccacacacttaaatgttcattgtgttagaaatccacttagaaaagtcattctcaaagtgagaacacctcactttgagaatgactcagaccagcaccatcactggggatgttgagaacatccccataccagcgccatcactagcacctacgaacttggtagaaatgtaagttcttgggcctcacccaagatgtacagataagaaactgtggcaggtacagcctggtaatctaaggtttaataagtcctcctggtggttctgtataggctaatgtttgaaaaacactgatctaggattgtgttctttatggttaattcctggcacccttacacatgttcagatgcatagaagccccatctactgaagcctctcagtaacttagttttacttttgatcaaagtactttataaagtcacatactcaattgcctgactattaacagaagcatttattttgagactattgtcaaagtaacaattaaatagctagcatttattgaatgcttattatgtgaatattacttgacatgcataaacctatttaatttttacaactgcatgagggacccgagagctcaggtgaattgttgaaggtcacaaagccagcaattgggagatacaggtattacagcctgactccaaagctttcaccagtattcttttttattagggatactttgaggaaattacttaatacaaatgattatagacaaataaatattgattgtttccccaatttcatcaaagacagatgatggaaaaaagattgatctaacttacaacaaaatgattacactttcaagagaaactagatagaaatagtttggatatctgtcccctccaaatctcatgttgaaatttaatccccaatatttagatgtggcctagtgggaggtatttaggtccctcatgaatggcttggtgcctgtatgagtctgttttcacactactaataaagacatccccgaatctgggaagaaaaagaggtttaattggacttatagttccacatggctggggaggcctcagaatcatggtaggaggtgaagggcacttcttacatggcggtggtaagagaaaatgagggtgatgcaaagcagaaacccctgataaaaccatcagatctcgtgaaactttttcactaccatgagaacagtatggaggaaactgcccccaagattcaaattatctcccccttgttccttcccataacacggggagttatgggagtacaatttaagatgagatttggatagggacacagagcaaaactgtatcagtgacctccccatggtactggtcatacagagtgaattctctgttagttcataggacagctgattgtttaaaagagtatagcacctctcctcgctctctcttccgctctctctcaccatatgacatgctgcctcccattaccttcctccatgagtaaacgctttctgaggccctcaccagaagcagatggcagctccatgcttcctgtacagcctgcggaaccatgagccaaataaacctcttctctttataaattacccagcttcaagttttgcattatagcaatgcaaaacagactaacaaacatagtgtgttttgttacttaaaaagcacacactttcaaaattcctttagttatcaccattttcccccactgatattagaaagaagagagtaataaacattactgaccataatagaaaaaaaatacagtgaaattcctgttgtattattaaatttaaatgaaactaccattgaaaagaaaagttgtatgtaaacacaatgtaatttttgtattattagcctcttaggttttactaaattaagacagttttatattcctaagttatcagggaaagcttttctaattaatcacaaaaggaagctcaagcttgggtagggtctgggaacctctttgttttccatatgggatcagtggtaagacattccttgagctctgtgaagcacaattgaaaaaaataggattatgtggttactttctcaggtctgtaattgagcagtcacattcaaattccggctttttgaactcacaatctataatgtgtcagtatggttgtctacctcagagattctgaaggttgttgaagattagttcatggtcatgtatgttttgagtatgacgctgggcattggatctaattctagtatataaacatccaagggtggagactgtttcttaattaaatagaccattccccttggccttttgtttcctttaatatcctggataagattttcctatgtaacagtttttacttgatgattaagtttctgatttttttttcatagcacaggacttttcagttagtcctgctcccctaccttgaaaccgaaatgaatactgaacaaataaatcgttaacgtattaggcaagatatgtttattttcatcccgtttcacaatcattaaggccatagttagttcaggcaaagatcatctatggacactaaaaccactgggtgggtgaaaggtttttgactagtagaatactcacagtgccccaaaatatcacctcacagattatttttaatttaaaaatcatgcagtcatgcttaaaatggtgaaatctggtacacactaccttaatcgagtcatcaaactcagcatcaccaagcatgggccaaactgacccttgagcttcctgatgggatgcagcagaagggatgtggcctcacgcatgtgatattcctgcctgacttatttaatctgaatccagtcatcaagaaaaaccagattggttggactttttataagacacctgaccagaattattttaaaagttggctttataaaaatcaaaaatcagctaggagcctgttctaaattaaaagagaataaaaagacatatcattttatgatgtgatccttggatttggggtgaaaattaacagtagataaaagaacactactggcaccactagtgaaatgtgagtatgggtgatattagataatactgtttctatgttaaatttctccagtgtgagaatggttttgaaaaaattagaaattcttaggagatgcaaactgaggtgcatatgggggatgtcggggggtggttttgcaacatcttacagatggttcaattgcaacagcaaatctaatttatgtagacagaaagctagtgtgatgaaatggtggccactgatgaatctgggtgaaggatgggtgagtggagtttattttaatagttgttcaacttctctgtgaatttaaattttttggatataaagaatgaaaaagtaaataaatacaaatgaatgctctttcataaccaattgctggtactcctcgtctatcacctgtagttagtgggttagtgatagttggcctgaaatatgacccattcaaaatcagactcttgataatggcctaagttcatttcattcacacgctgtacattttggttctgggctatttattggactgtctttatgtacttacagtgggggagtcatcatcctataattctgctggcagcacttattatgatttgtcaagtcataataagtcccaactgtggtttggtgagctttttatcacatatgtattcagataatgcataaaaataaatataaaaataacatgttcgaatggtttattcataggatttttgtggtccttggtaaagggacgctgtcagtagacacctttggtgccccacctcgcatcttcccctcccaccttcgtgtaccagcagctgctacagcgatcagctctgcacaggtgtgacctggtagcacttggcttcaactgcaacacctttcactcactttctgtgccgggccttctctgcaaccatttaacttctgagacttgtgagacttattcacaaccaggagaacagtataggggaaaatgcccccgtgattcaattatctcccacacggtcctgcccacaacacatggggattatgagaactacaattcaagatgaaatttgggtggagactcagccaaaccatatctccttccttctctgcttaactccttctagtccctcagtactgtttctcagaattgattcccaaaataaatggccaacatgcgagcttttctcacaggcattgtttttcttggcagaacacagactaagacgatgtaatctttgaaatctctctagtgatggttaaagagtgtggggattgttataattacattaactactttataaaagtttgtggtggtaactagaaaaagcattagtcaggagaatcttccttgttgctggcattgggaaggtcatttaccagtcaggtaactagcacagctacaaagatagggagttaggagaaagacatgttggtaagtctataggattctgttgcttggttataggactttggatcctggtatctactataagggattgagagtagcaagatcccctaaatcgaaaggtaaatgaatatctacagattcgtggcaggacttgggcaggacaacagttatttgaactgagatataaaattgagactcaagagtgaaaaaaaggcctattctaattcataatggaattgaaatgtaggagtaaagctactatagtatttgcacaatcttctcccctctcaccccacgctcccctgttatccagtttttgtgcaaaatcacacagcattagactggaacttgtgataaattgcatcaacctaatttgagaaactgaaaatagggagcagtctgaacttagagggtagggagaataaggaccctggaaactaattgatgtcttacaagcacagactggttgcatatcataattacttgttttattgtgtagttcagggtaattctgtgacttgttgagtctcagtggttagatattgcagtgacttcaggcatagtcagttgatgtactttctgcttcagtaaagtacagatgtagaagacctgattaaatcctgtctctttactaataccccaagggaacacttaatgaatgatgcttccctcaagaagaagaataattaacaatagctatattattcatattaatttatagttactggttgctataattaatgctatttaggaaaatcatcataattatagcactttacaacttacagagtattttcccatccattttcttatctaaatcttataacatcaccctggcttagatagaacatgtgatattctcttcattttatagatgagaaaactatggcccagggaaagatttaagcagacaacactctaccacccttgccaatatattggactatctaagagtatgtggaaatacacttaccaaatttatgtctactataatattttatatctgcgcacaagaggatcaactttactcagtttttagttgcattccaaaacaataatgtcctgtctttccttgtaccaggacccccattacccagaatgttcacatgaattttaaatgttaaatggaatttttcttaataataccacagtgtttcatagttattactgccctttgatataaacatgaaatctcctctgatagagggattagcaccttgaaaacatctgtttccagtatacagacctgctggccttaaacagtttaatcagactggaaattcagactcagaaaagtctaaatttcaaccaacctgtcatgtcactctttttctatttttggctatgacaagagagttgaagaaaatctatcaatttcacaaggctagccttcaaatctgggccgtccagcttgatgatacacacatagttaccagtgtgagcgtgtgtgtgcacacacagatggacactgaacctctttggttccgtttttatatcaaattctagagtatccactgcttattgttgtacttctaactgtgtttacccaaaagatagtgctatgagaaaggttactgcctgtgtcacagtctgtcattattcactgatttatttattcaaaaatacttactgaacacttatttgggctaggtcttgaaagagagtccaaggaaacaggaacaaaacagacaaagcttctcatgaagcttatatgttctaggggagagactgaaaataaacagaaaaatacacatggtggcagatattatttaaaaatggatttaaaagggtaggggaataacatgacgtgatgtagaggggtcataataatacatccagaaggagaaaatcataaggtggctgttttagataatgtgataatatgaaatatatatatatatatatatatatatatatatgtgtatgtgtgtgtgtatgtgtgtgtacgtgtgtgtatgtgtgtatatatatatgtttgagacatatatgtgtgtgtgtgtgtgtatatacatatatgtatgtatgtttgagacagagtctcgctctgtcatgtaggctggagtgcagtggtacgatcttggctcactgcaacctccgcctctagggctcaagctattctcctgcctcagcctcccaagtatctgggattacaggggcctgccaccacacccagctaatttttgtatttttagtggagacgggtttcaccatgttggccaggctggtcttgaactcctggcctcagataatccacccgccttggcctcgaaacctgctgagattacaggcatgagccaccgcgcccgtcctgaaatccatgtttaaagagggctcacaaacaaggaagccaactgcctcttgaagtaggtttggctccaaggacctgggccacaacttcatagacagttgatgttactgtgcttgagagagatcaggcccaggaaggattaactcaagctgactaagttcccaaaagaatgaccaaaacaccagatccctttatgtttcttttacacagatagttaaataagctccaagactcaggtaaggtggtttggtgagtaagctactagggcatacggaactagtggtcttcacaggccattaccctttacgcttgcttcaacatattcactaaaacgacagattgacttcaagggttataagatttagtgctagcctgtcatggcacgctacttgttgttgttactgaagatattctagtttcttggttggttaatgctttttctaaactcttttgcagacactagatactctcttgatattttacgtccttagacaagtccagtagaattgattagattattgtaactttccactattgtattgccattgagtcttgctgaagatacactttggtctcttaatgaagttttaagagcttcttccatattcatatatgatcattattaaattgtcactttaaaaggttatttttttacttcaccctgcctccaaatactagggtcatctcactttataatccagacagattctttgcttctttttcccaaacctgatcataattcctggaaacaccctgtgtcgatgttgttgtcctctactctcctgttgattctgactgcaggtaatacgaggttctgacataggaaatccggagatcctgacttcattgtccatgctcactgccacatgcttcccctgcagccccttggcagaaccctaagaggtctctttccagttcatgttctaggtgcatctcttgggtcttgccatctctcgcacacatgcatacctaataccccctggacctgagacttccaagcactggcatgctccaatgtcttcaagtgctgattcctctttctggaatgtccgtgttccttccctgctccttgctactccaataaatattattctaggcagtggtgtctaaacaccaagtgcttgtgagctctcttcagctggttctgttctttaggtgcaggaatggagacatttattttcctttacttgtatacttattttaaacaacaacaacgacaaaactgctaaataagtgtgtgacctgagaaaaatcatcttttatttttcagttttcatatctgtcataaagtgataattctatctcagcctacctcactgagattttatgaaagcttaattaaaaaaaaaagaggtgcagaaaaacttggacaaagccacattataacttgagaaatttgaacttataatgatatcaagggaaatttcctttgttaacatgtctgtgttgcttccaacaggggaatcccggaggcaagacacttgaggagaggcgctccagcctggacgctgagattgactccttgaccagcatcttggctgaccttgagtgcagctccccctataagcctcggcctccacaggttagtgcagcccacaatcatctccacacagccattcccagatattctactcttatcagaaagaacatgctgcacctgagagcttatttccccttccttccttccttccgtccgtccttccttccttccttccttccttccttccttcctctctctctcttctttctttctcttttttttttttttttgatggagtcttgctctgttgcccaggccggagtgcaatggcacaatcttgtctcactgcaacctccgcctcccgggttcaagcaattctcctgcatcagcctcctgagtagctgggattacaggcgcctgccaccacacctggctaatttttgtatttttagtagagaccgggtttcaccatgttggtcaggctggtctcgaactcctgacctcatgatctgcctgcctcagcctcccaaagtgctgggattacaggcctgagccaccatgcccggcccttttattctttcttgatcttcttagagtcaatgatttaagttgcctttttatttaatatcaacatgtattagtcaactggcagaaatttcttaaattgactctttgagtactttctttaaaaataacacaacatcatacaaaaatgttatataaaaaagtaaatctcttattccattgccttgctcttcttacagctttgtctatatggatattttgttacatgttgttatagttttcacaaatatgacttagcttggctatgtaaggttaaggtgaagggctgtgtcttttgcaaggaaattagttttgttggatattaaggtgattttcattatttttgtcatggttttaaataatgctacaggggacatatttgtgtatattttctttggggttatttcctggcctcagatttctaggagtggggttgctacattgatgaatgagaccactttatttacttttctttcctaaggttgtgaatagttgatactggtaccaccagttagtttgaatatatcagtttctcctcaagttcactagaatgtgatggttgcaattaatctgtgttttgtaagtgcaaatggtgccttgttagtttttctttgctttttaatttttttatttttgcctactttggagcttggctatttttcagcatcttcacttaatatctgcattccagaagctgatcttccactgctagtgatcattccctgcctctctaaagtcttgaaagggttgtggcaaatctgtttcagggcttccaattcctcagaagacagccatcagaattgtagttgcaaacgctagagaagcagtattgtcactgtgctgtttgactcttgcgtgacatttgtttgactaagtgagagtgcatagagcctctgagcctcactccagttcttgagtggcagcttctgtatttacagtggttcctttcttaaattaagaaccagtcttgtttctctgctgtcagttatttcaatacttaactgctcataaggtggcagcactttcttcttcttcttttttttttcttttatgagatggagtctctctctgttgccaaggctggaatgcagtggcgcaatctcagctcactgaaacctccacctcctgagttcaagcaattctgcctcagcctcccgagtagctgggattccaggtgcctgccaccacgcccagctaatttttgtattttagtagagatggagtttcaccatgttggccaggcttctctggaactcctgacctcaagcgatctgcccgccttggcctcccaaagtactgggattacaggtgtgagccactgtgcgtagctgctgtcttctttagatacattccctgtaccttttcttaacatataatggaattgttagccatgtgggattcatggcaaaatatactaccacttagctcttcctcactgaccctgctcttggctctatccatcctgtgagcagtaaaaatatactttgtccctgtaaatgtgtactgaactcatctgtagaaggcactgtggtcttttgggggaaccgatgaggcaaaaaaagtggatagttgagaggaagagaaataggactccgttgtaatcttctaatagcctgtaatgttatatgtgaggatatggcctatactgcaggagcacaaagaagatagtgatatattcttctgaaggtgacacagtctgataattcttatcaaaagacttgcattttcatctggaggggtgagtggaattgtatcgttcgagacagcagcagggagtagcctgagccacagggctgcaagcaagcaccaaggctgcatttagagatctgtaagcaaccagatggctgcagatgaagcctttgaaggcttgtagtagaatataggtctgggaccagcctggccaacatggtgaaaccccatctctactaaaaatacaaaaaatagctgtgcgtggtggcgcccgcctgtaatcccagctattcgggaggctgaggcaggagaatcgtttgaacccgggaggcggaggtttcagtgagccaggatcacgccactgcgctccagcctggggacagagggagactccatttcgaaaaaaaaaaaaaaaaaaaaagagagaatataagtctggtagtttcctacagacagcgtgtagacacgtttaaatgccagattatgattttaatctgtcttttgtagataatgggattatttgaaggttctcaatcagggaaatctaaaattcattctgaaaaaggaacataggaaataagaccaactctagaatgatgcaggaaatgagcccaggtcagaaaaatgttctccagcaagccactcttcatactttctgaccattgcttgatgttcagcaattttttttgattccacccaagcaaatgccccaaatctcatctcatatctgaagacaggaaggccactgactttgccactggactcagcagtatcatgcccaaatgcttttttgtgctccctttccttttttttttttgtaatgggttttcactctgtcacccaggctggagtgcagtggtgggatctcggctcactgcaacctccgcctcctgggttcaagccattctcctgcctcagcctcccaaatttagggaggatagcaacagtgtttctggctgcagtaaatttggggtaatgactttagcttacatctactttataaaaaatcctccatgacactgcatggatttatgcaattgaactaccttaatatttgaaactaaaatttctaaacattttaaaagtgtttgtcagggagtagttttagaataacagatgagaaaagttcagacatattcctgtagtgaattgcagataaaatgtgagcatagagtatcagagctttagtgggccttccaggtcatttagccaaacttacaggtgtgtgccaccatgcccagctaattttttgtatttttagtagagatggggtttcactatgttggcaaggatggtctcaatctcctgacctcgtgactgacccacttcggccttccaaagtgctggggttacaggcatgagccaccgtgccctgcccctccccgccccccagctttttttttaaacggagctttcatttaaatcttttttttcctcccctaaatccttataacctaatagacactgaggagatcatgctttgaggtctattgtttaatacaacctttattcttgaaggctgtgtctatacatgcctctcataaaccattgcattttaataggtttattctgcagctacgttttgtttgaggaatctttctgagcacacaaattcatcatcactgatatttggacagtactgattgtgaagcactttcacatatattctcacttgagtgagatatagatatctcagttctgagatgtgcgtgatgtgctcctttcagggatgatgaaactaagactcaccaagaagattaatggtttctccttggccatatgtttgagcaccgcgtgagcacaactggactttgaattttggcttgtgcttgattttaagttctaaacaccagattgagggtgtcaggttttgtctttgtttttgtaatgattttaccatcgatgaaagctggcatcagtcatctgagtgacactgtcccttgaatgttgctttcccataaaaagaaaaacattcagaaggtcaaaaaaaattaattgtaatagccattaagtagaataagttcataattatggtaaaatacactttcgatgtgcctgttccattcagaaattaaaggatgatccattctaatttttttctattactatgatttaacaaagcaagagttaattgggagatatatctcatccttttgaattatcttccctctggtggaactgaattagatgtgttaatatttattggttaacataattataggctgtgagaacaataatcacacacttaaaatattaaaagtatgtgccaagagaagatgatgtctatagtagacggtgttgtgttataattgaaaggtacttgaaaagtcctagaaatgtagaccgttaatgcccaacattgatgtttctatttttgttcaaagcaaatttcaaaacctatagaatcacctgactacttaaaataggctagtaggtctgtgatttctcattagtcaaacatgtgttgtaagcttttttgaatccatgtctctatcatctttggaaggctgctttgactcatggtctaggaaaaatgatatatatgtggaatgtttatatggtaagaggttccaaggagctccattctcaaaacaagtctgaaaaatgtgagctcttgaaaataggttttgctaaagcattttcttccttttattctagggagtattttccgctcccaaattttctgactttagttatgttcacttactaatccctatattgattttggaaatttggcttaattccacatattcattgattcattgattcattcacctaacatttgatgagatcctcctctggatcagtcattggagatttaaaggttagtatcaacaggtctttcctttagagtgatatttaatcttacagaagagataagcccgtaagtaacccaaagggacacaggagaagggcttcaatgtgctacttaaattgtcacgtaaatcaccacgtgtcaaaattattgggagataaaatacaggaataccaacattgtaccttatacctttcagtgtcagagaggactgcgtagagcaggcagtatttgagctaacttggcttaaagtgttacgggaagggcatgggattcaaggtgcaagaataacaagagtgagaaagtcaaggaacgtggaaagtgaatattatttgaagaataagtttgtctaatggggtatgtaaagtgtaaatgggattactgctgaaaaactcaaacttacttagcagtacctaagtagcccttttgatgcccaagggctttcattgttagaaagagaaatttacagggggatagcaacagtgttactggctgcagtgattttggagtaatgactttagcttacagctactttataaaaaaatcctccatgacgctgcatggatttatgcaattaaattacattagtgtttgaaaccaaaatttctaaacattttaaatgtgtttgtcagggagtagttttagaagaacagatgtgaaaagttcagaggtgatcctggagtgaattgcagacaaaatgtgatcatagaatatcagagctttagtgggccttccagctcacttagccaaactcttattctacagatggaaagcttttgcccagagagggaaagaacacactcaaggaggctcatttagagacagtttcagtgattctttgtattttccccgaactatgacacaaaggcccagcttgatgataaccacgaccaggggagagtttggtttcctttagtatcacaattggtttattccaaaaagtctttcttttatggcgtcttctttaaaataagtctcaaacacataacaaagaattaggcatatcaaagacgtacttcaatggtaaacagaaaacttatgacgttgtaacatctttaagctagtatatatctaaacccaacccattaggtaggcatgatttgttagtataagtacagcttagcctctagaagctatgcaggggttggaacgaaattctgtctatttcttagaagacaagagatcaatcatgaactaatgacttttgtgttccttcttttatcagagttagggtacagtattcatcttctagtttctagtacagggctgtctttttttccccaagtaagtttggtaggattggagctgatgactgagtgacttggaacacttttcaaataaactgtcttacgttaatatttcatggtagctggagatttagtaatttgtgaatcaagttgcttttgaattgattaaatgggctttcactatcctcatttagactagtgtgatactgtgaaataataagaaataatatataaatatatttttctactccagtttctgaatcagtgtttgtaaatccttataatttcctaggtgataggggtgctggtagcatcttttgttctaacattattttgttattgaccttggttcctgactcagagctactgaattctgtggaatttcctgagtgatggaaatatctattgttttgatgaggcaactcttggtgggctcctggattttggctggttaccagaatgaccaagcaatgatttgaagcttggaagtttaatcttcacctctcatcctctggggatgagaaaggggctagagattgaatgaataacaaatcatgcctatgttttgaatgttttgaagtctgtataaaaatccctgaagtacagagaggtttcagattgttaagcacatctttatgccaggagggtggcataccccaactctatggtaacagaagctcctatacccaggacccttttggatctagccctgtgcacttcatcatctgcctgtccatctttatcctttatcgtatcctctataataaactagtaaatgtaagtaagcatttccctgagtttcatgagtaattctagcatattatcaaacttgggaaggggataatggcaaaccccaatttgtagtcaaatcagacagaagtctgggtaactggtgaccacccctactctgccccaccaccgcagcttgtgattgacatatgaagtggaaacagtcttgtgggacttgaacccttaacctgtgggatctgtaatagtaactccaggtagattgtgtcagaactgaattgagtcataaaacacccatctgataccatagaatcagttgatgtatgaaaaaaaccctcacatttagtgccagaagtaaagtgttctgtccaggcatggtatctcacacctggaatcccagcactttgggaggctgaggcaggttgattgcttgaggtcaggagtttgagaccagcctggtaaacatggcgaaaccccagctctactaaaaacaaacaaacaaacaaacaaacaaaacttagctgggggtggtggcatgcacctgtagtcccagcaactcgagaggctgaggcaggagaattgcttgaacctaggagacagaggttgcagtgagccgagattgtgccactgcactccagcctgggcaacagagcaaaactctgtctcaatcaatcaatcaatcaatcaatcaatagaagtgaagtgttctgtgagtagcatagaggaaagaggtgagtttttcttcttcaactaatatgaaaaatttggagatattttgaaaataagaatagggtggggcatagtttgatagcctcgtctccaagtttgccaacgggaagagcattggcttcttgattccctgaggtcccctctctgaaaggagctccatttatgtgaacctgtccacgttaccagtttgtgcttccttttggttatttcaaaaatgggcagggtaactacactccattcccccttttcaaaagatagaatagtattctcaagctacaagaaataagatgatggctcaaagcaacagctcacacagtcattcccatttcattttgggattgttagcttgtgtctggagtttgttttaaaacttcaggcctttgaaggttgggggctggtcctttctgaatgctgttcatcctataaacgatatatttaattcctcactttaaaaactattctaacttcttagtctatttggaaactgagtactgaaatgctgtgtggtcatatggacacatcgttagctgcagtcccagcactcccacactgggttcctttcatagagcaataatgtatgaggcaacctgagaaattatttcaggtatatgtgtgttgtatttagagctttttataagaattcatgtggtctgagggcttgggtgcagtgtaatcagggtggagtcttgtggtgccctggatcttcccttctcatgtgttctgtgttctagcttgcaaacgccatgaggagctgcaggggagattaattagtaattaaaatgtttaatgcttcatattattcaatgcaagtcaaacatgtaggctactgggagatgaaaactacaacatgctgatactgtgtgatgagacatagactgtccctacagactagaaactttgctgtttctggcaaggctgcttgggacttgagataggaactgggtaataaatactctgttgaaaaagaaaataggtgtggatagtggcatcttcctcctcctatattctcttaggaaaaatttaggagcttttcatgatttgctgagaaatagatttgtctatgtattggcattgtctgcttaataataactttctttgagagctatggtaaaagttgaaaccttgtagaaacctctggtatgtgatgttaagtggaatacagtaaaataaaatttgcaaaacaccattttaaaagagaaagggatcttattcttcacaatgcccatgttttacttagaggatctgtgttgttttgaattagcctgtacccgccagaaaacttcaacagttaaataacaatgatttgggggtggaggagtggttagctgactcagagttgcatgccatgacttttatgacaggcaattaatttttagatggtatataattgcatttcaataacatttatacctcatcatttttttagaagatgatgtgtttgtgtcatgcgtaataagcataatcaacgttagctttaaataaattttgttttgagtgccatgaaaatgtaacattttcagagtggaaatttagcctaaaaatctaccttgcattgcacctctacaaagcttttgcccaaaaatattcatttcatttgtcccagtgtaagagctggctctgaatgtatcttagctcctagtggggataggggagggcagctgagcagatagctgctgagtgccatggggtgttcattcagctaaagcatgggagggggttgtcttctgtggttctctagccatggtccttgtggtagcctttaactgtgatttgtttgtttgaccttgatgagtccttggctccgagatgattatgttacattacactgaatcactcaatccaacattggtttgaaaagaaacgaacaaagctgcctgttgagtttctctattttacaacagtatctcagtggaaataattagtcctatgtctatgcagaagcacacatcacatttgcaaaattaaagagtgttcttgttaggactggtttctctgtttctttcttcctctcccactgtttaaatatctattttggtggtagtgttagtatgaaaccccatagttcctttcttttcttttctgatttaaaaagcaaataaacaagaaaacacaagtctagctatgttttttaactcaagatgactagatataaccacagcaaatatgtaggattgttgtgttttaagagaaaaagccgtgtctcagataatttgtagtcattgttttgtccattttgacatctacttctttatatactttatagccaaactagagtatagtgataataaggatgatctctagacagaaggttggaggtggttaataactcatcctacatatcacaatttttcatggtgagtaactggtttgccctccacacaaaatatcacattggaatgtaactgctaaggttcttcacactatggaaaaattaccagtaaagttaaacactgcctttcagtgggtatattaattataaagacaaaactatagtttatgttgcataatttgaacatacatatttccttatgaatctgtaagctggaactattgaaatgaaatatacaaagtgagcacgtgttgctgttgagccagcagttacagttttcatttacaaatgcggacagaaccatttgctcattttggtctctctgctttgggtcctgcactcacactccaatatgcacctaagttatggggtcatgttgaggttccagactgcagaaggggatcgaattatgtttcattgtattgagtcacaaatatttcaatgtaaagtaaaaattttggaagttttacgtaacagaatataccttacaggaacaatagataggtataaaatgacttcggtttgcataacaaagaaataattgtgatgagtaccagactgtgaagtccctgaggcaaggttatcatttgttttctggcacatgagaggcatacaaatttatttttgctgaataaataaatattgtcttcaaatctttacatttccattctagaaatatgctaaaaaagctaatctgtaatagatatagagttagcacatgacaaagttatagctgctttgtgatttttttaaaataaagaacatgtatttgcattaagaaaaataagtgtggccgaagtgaatatttttttataagagcaacctaatggtaaccaatgtttcatccaaaattttcagctatactcttatattgccttatatcacttgatgacaatgtattttgttaagaagatgatgttatcatgaggtataattcaatattatatcaattctgttactgttgagataacataagaaagaaatatcaactctttttctatattctccacagaactgaggaaaacagaggactattatgttattatttcctaaataaagaccaatatgataaattccttatattcagtgagaggaaagaagttgcttaccgaatgtactgatatatgcttccttttttcagaaaacaacaacatcaaccaaaacacctgtataattattacatgaattttttttttttttttgatacggagtttcgctcttgttgcccaggctggagtgcaatggcatgatctcatctcaccgcaaccactgcctcccgggttcaagcaattctcccacctcagcctcctgagtaactgggattacagggatgtgccaccacgcctggctaatttttgtgtttttagtagagacaggttttctccatgttggtcagggtggcctcgaactcccgacctcaggtgatctgcccgcctcggcctcccaaagtgctgggattacaggcgtgagccactgcacccggccatattacaagatttttttttttgcgtttactgccaggaagctctgcttcattaaaagaagcctctaagattcacctcttccttcctttaccaatttatttctgatacttcttgacccagtatttcaaatgtgataaatatatgccaattataaagcatttcaaaaccaattaattgtctaaatctaagtcatgctttttaagtggaaataaactttgtgtccatacacatatatttgcctataaacatcttaaaaatatatctaaacttcggacaattttaaaaagagagtattgaattttaaatggattctttgcttatattgatggtaaacagtggatccattaaagtagcatattctgctggtgtaaataaaatataagatttaaagtgggttaaaaagatataatatttacttgttccttttaagaaacaagttgaagaaacaataaagcttgaagcctgtatagtcagatatatgaacccataaagtaaatcatttgtgaagtgtcttgaactctttctaatttcatcttgatgttgtactgcttatatgaaaatgctgaaaaatgttacttcttagatactgctagaggtgctaagcttcttaccattcaggaatcttcttcttggctctctccgtcacccagccaacacagagttatgttttatttcccaaatggccaacttatgttaacttgatgcttaccaaggcagtccaagccaggaaacaatttttataaacagcatcctggatgacttaatattctatgtaatattaattttagagctttttctcccatcatctagtctagcatagctaaaattatgatgtttaactttgttgatctacagtcacttgtgaatgagatctcccaaccaggaaggaaggaaagataggaaaatcagagtggtctgtttgcagctgtgctagcacatgtttccttgagtgccttctgaaggaagagtggatagagatgtatctttcagggccattgcctttctagcattattgatcgtatcacatgggcaaaagaaaaagaaacaatagattttatgacaaaagttatgtaaaaaggggctgaaatcagtattttgaaagttgtgactaattaacagtggctttctgagaagtgagatgggattcaagacagtggccattgtgtatgtatttctaagagccatctggatgctcctttttatttgtgtttttggcttattcactcatttattcctttattcactgattactaattgaatacaaagtctctgtcgatttgttcaaagatattaaagaagccctaaatctatggaaagacatcttctgttgattagttgcaagatgtaatattgttaagtgggatactccccaatttgatatatagatgcaaagcaatccctatcagaatctaagctggcttctttgtaagaattgacaaacatccttaaattcacggatgttcaagagacccagaattgccaaaatcatcttgaaaaagatgaggaagtttccgacacacacttcctagtttcaaaactttctttcaaatgacagcaatcaagcagtgtgatattggcctaagatatacataaagatcaatggagtagaattgagagtccagaaataaaccattatgtttatggacaattgattttcaacagggtgttgtgacgttcaaacagggaaaaaatagttttctcaacaaatgatgctggaaccaccagatatctacaaagagtaaagctggactccctacctcatagtgtaagacacaaatgtaaaggataaaactatacaacttgtagaagaaaatatagaagtgaggttcatgaaattgggttagtcagtggtttcttaaacatgacatcaaagcacaaacaactgaagaaaaaatagatgagttggacttcctcagaattaaccaaatttgtgcttcaaatgacaccatcaagaaagtgaacaaacaatccgtggaatttgcaaatcatgtatctgttaaggggcttatatctggaatatattaagattcttacaactcattaagaaaaagacagcccaattaagtaagaaacaaagtatctgaatagacatttccctaaggatatacaagtggataatatgcctaggaaaagatgctggacatatttattgatcaaggaaatgcaagtcaaaccacaacgagatatcacttcacgctcactaaggtggctataataaaaaaagacaacatgtgttggcaatgtggtagagaaattgaaaacatcatacgttgctggtggattgtaaaatggcatagcccttttggaagcaatctgtcaattcttcaaaattggtcatagttaccacatgaccaagcaattatatttctatttatgtatccaagggaattaaaatatatgaccacacaaagacctgtatagagatgttcatagcaacatgattcataacagcctaaaagtgggaacaacctaaatatctatcagttggtgaatggataaacaaaatgtggtgtatccatacaattgaatattactcagccataaaaaggaacgaagctctgcaacatgctacgatatggatgaacctgggaaacattatgctatacgaaagaaaccagacaaaagcgaccacagtttatgattccatttatatgaatgggcaaatccagagacccagaaagatgagtggttgccagtggccagggggaggggacaatacagagtggctactaatgggtacaggatttcttttggaaaggtgattaaagtattctggaatttgctgcacaattctttgaatatactaagaatcactaaattgtgcatttttaaagggcatattttatggtatgtgaatcatgtcttaactaaaaaatttgttttaaaaggctctgtattgaataatttgcctagaatacacacatggcattgggagtggcctccactctgaataagcttacaatctcttggggaaaaatgcaatctaacagttatagtacttaagcgtacatggtaagaaagaagcacatggagggtgcttattgaatgggaaaaggaagaaatctacctggatgatcacagaaggtgtttggtggatagggagtatttgcaagaagaatccgactctcgtgtagcttgagaaagcagaatgaaaacccgtatctaggaactgaggaaggcagtcagcaatgtaaggtcaatatttttctaaaagtaatggcagctgaagtacaacttaggctgcctgagaagagagcaagttttccttcattggagcatttgaaatgacactctggtatttacaaggtgaattattcacactctttaaatctcagtgttctgagttgataacacatttcagagttgacatgaggaccacaaggaataataagtgtgtgtttaatgtgaaaatacaatatcttgtacataataaacagttattactgttggtctcaccaccaacatcattatcaaatgaatcttggcagtaattctgggaaaggaatttaggcaacagatgggagctcatttgaatgatgctaggatttcatggtactcccattgttggttacagaactccaagaactctcattcttggagttttctgtttcctcatataaaacttggaaggaagaacagaagaccttcattctgttccaggcccttaaattgattatttctgtgcctaaagcaaactgctcagcctcaatcatgactttgcacaatttgctgtgatacctggtatagatgtttcatttgttaaagttgttactgacaagaacctccaatgaccttggaacatgacctggcccctgtgggtatcagtagaattttggtgaacactgagaagtctctgagtttctttcaatctgggcttctttcagttggtttgcaaactggacttgtggaattagatgatctctcatgcccattctatctttgagttggtattatttttgccccgtattaaagaaaaactatattgatatttctttctttgcttttgttatttcactatagaaaattttgttttaacattcggttggagttgatgatatacaacccaattatatggatttgttatatgcaaacataaggaagtattcacaaatttaaagaccaagttcatgttgttcaagataatgtgaacccaaattcattgtgctcaggataatttggaactaatttcatagagtttaagatatattatagtaattaaaatcatggattttgggagcacactcccctgactctaaatatgtggcctgggatgtcacttaaacattttgtgcctcagttcttttatctctataatgaagaccattatagtatctatctcccaggattgtaatgaggactaaatgagtttccatgtataaagcacttgaaacagtgtttgacatatttagcaccatatgcattagaagatcttattgttagctgcgtgcttattcttaaattgtctgagttactgcttttatataagaagattgacttataaatttggcccatgatgtcccatccaactctctgaaatagattatctacctcttttcagctgggcatcttacttatgatatctgaggacatctctctgttcttgtgctttgcccagccccctttggtttctaatgcatggagccaaaagctacagctagagccataatggtcttgtcctaccatctgaaagacatgttgattgctagaatgtttctgtggttaacaagataattcctctgataagtgaacaaccttcacttaaatgcaaaaattatgactcatagattattaatttgtcacaatttactaaccctatcattggcctattgatgtaagttattcttgtcacgcttcacctacccagacgctaaagcatgtaaagcaatagttaagtttattgttcatctgattgacctggagggcttgttaaatgccattactgggctctaccttatgttttcaattcagtagggctggagtgaggctcaataatttgtatttcaagtgttgctctggtgtggaccacactttgtgaaccctttaaagcttcttgtcagtcacatgtttgtaagcagcactgtcttcctctgttctcttatttctatagctgcacacccttaaggcttgccctagtgtcaaaagtggatgctagttttatgtcttttttctagaggaggaaaaaccataacctagagaagtatctttccctgcatacatagtacattgacagaatctggaagatgccctttaaaaaaaaaaaaagtaaagatttgtacctgccattctgtctttcagaattgtaaatttatgtttattgatattaaatatgcctgtaatcccagcactttgggaagctgggaagggcggatcacctgaggtcaggagtccaagaccagactggccaacatgttgaaattctctttctaataaaaatacaaaaattagctgtgcatggtggcgggcacctgtaatcccagctacttaggaggctgaggcaggagaattgcttgaactcaggaggtggatgttgcagtgagccgagattgcacccctgcactctagcctaggtgacaagagcgaaactccatcacacacacaaaaaaacaaaaacaaaacaaataaaaattgtatagatttatggtgtagaacatgatgtttgatatatgtatacattgtgaaatggctaaatcaaactaataaaaatttgcattacctcccatatttattttttgtggtgagaaaacttaaaatctcccaacaaatttataatacacttgcatctgcaattcttgaaagaactattaggtttggaaaactagaattccgaattcagttctgccatacctagaaacgtgaatgtcaactgtttgatctctctgaacctcattttctttgtccatgatattaatacctcctctgcttatcatatatgatattgtgagaagtaaatgacacattgtacattaaagtgctttgtgaactataaagcgctatacaaagattattttgcattctcatcccagttgtcacacacaatatcttgttaaacatcatctgttttatgataggcacatccttctctctctcagctagggtaaatattgacttttctaactgttttcaggaaggaaatagtgcactgtgaactacttgccttgtgcacagaatccttttatttccctcctgtgattattttttcttttctagtctcttgctttttaaagtaaacaattaagaagcttgtcatttagccatttatgcatctaaacacttttgtatatgtgagatgtggtcacaaacataaacatatattatgaatttttctcataacatccttttatgcaagacatcctacacaccacatgtattaagaatgaagtgagttgctgttttgcctgaaatgcattattttttgtttttgtttttgacgtttgacttggaaaagggagttgagttgagccaagagcaatgggtcctcttcccagttgtgtaaccagcaggttgtgttaggtaagtcagctcctttcttgaagcctcaggtacatttgtacatagatcgaaatctagtcttttctcatgccttccactctcaatgtctgtgttctcagtgttaaaaggaagtttcagaagatgaccttcaccttgatgaagaagtccgaacagagtatccccatttatctatctctattctgctaagatacttttcttttcatgcctcaggtctgactgctctttgcaattcagcctgttgcagtgaagctctgacatgtctttcctttaggatgtgactggtcttcactaggactctcaatttcttagggcttacgtttctgttagtatgatcggaaatagaagaggccatgtcctgcctttaatcccctgggatagagatgttggtggattgggggattgaggggtggagaggcttttatatttttagtgagtctttccctttagtgattttcagagcatctccctattagtgcacagtaagaagtatttgttctttttgccatgcaacaaattgcttaaaaaccaagcagctgaaaacgcgtattttctctttgttcttggtgagacaggaatctgtatatagcttagctggaccaccaacttcttggtctttcacaaggctgcaatcaaggttttgactcagtctgcacttgtatctgaaggttcaacgggagaacgatcagcttccttgcttaggtggtttttaatttttttatatggttcgatttcttccaggcagttgcataaagtgctttagtttatatctggttgttggctggagtctatcctcagttatttgtcatgggagcctctccatgtggcatctcactacatcaaagcatggaagctgagcaagcaataggtagagtttgattacaagatggaagccataatcatttgaaacctaaatgtggaggggacagcccatcacacttaccatagtctgtttgtttgaagtaagtgactaggattagcccacactaagaaagatggcattgtaaaagaatgtgaagcccaggaattaagaatactagggggaatcttataaacctgccgatcacaaaagagagtgaggttagacttactgtccacagggatttagtgcaaatgtaagtttatttgtagaatctgtcaagtcagaaagcagaggaggcatgtggggtatcatgagaagaatagaatctggaaggagtaacaggtaatgaaaggtactaacagatgtaggaagaactccagaatttaagaaagttatacctgaatgtggtttaggaggtcttttgatctaaccacctccatttctcaaggagtccaaagcatatagagggccttactcaggccagaagttgtggctgaacaatgagttggaacaaagtccacaaactcctgacttagtacagattttcagcttgatgtaatgaatatagctctggatttggagtgaaaagatacacatgttcaacttttgatttgcctctgagtggctgtgtcaccctgagcaagtgataagtaaaggaagcttgatatatggttacccagtttataacatgaagctatcattatcatgtatattcatttatgtctgatgaacatattaacttttctttatgaaaattctttgtaagctgacatgaacagacacttctcaaaagaagacatttatgcagccaaaaaacacatgaaaaaatgctcatcatcactggccatcagagaaatgcaaatcaaaaccactatgagatatcatctcacaccagttagaatggcaatcattaaaaagtcaggaaacaacaggtgctggagaggatgtggagaaataggaacacttttacactgttgatgggactgtaaactagttcaaccattgtggaagtcagtgtggcgattcctcagggatctagaactagaaataccatttgacccagccatcccattactgggtatatacccaaatgactataaatcatgctgctatatagacacatgcacacgtatgtttattgcggcactattcacaatagcaaagacttggaaccaacccaaatgtccaacaatgatagactggattaagaaaatgtggcacatatacaccatggaatactatgcagccataaaaaatgatgagttcatgtcctttgtagggacatggatgaaattggaaaccatcattctcagtaaactatcgcaagaacaaaaaaccaaacaccgcatattctcactcataggtgggaattgaacaatgagatcacatggacacaggaaggggaatatcacactctggggactgtggtggggtcgggggaggggggagggatagcattgggagatatacctaatgctagatgacacgttagtgggtgcagcgtaccagcatggcacatgtatacatatgtaactaacctgcacaatgtgcacatgtaccctaaaacttaaagtataattaaaaaaaaaaacattaaaaaaaaaaaagaaaattctttgtaagctataaaagcctttagaaaaaaaagtaagctttgtttaaattattaatgtgtaggttgaggcaaaacaagcactcccttttgacagaagggataagtactggttcatataaatacaattttatctccatctgtatctgtatcagccatttatttctgcttgataaattatcccaaagcttagtaatgtctaccttactcacatatctgcaattttgatagtactccatgaaaatagcttaactctgttctgtgaaatgagcccatgtgcctcgatttgggtgcagaggattcactttcaagatgctttactcatggctggcagtttggtgttagaagtgcgactagagttgtgtgtcaggaccttagtttctcttaatgtgagttcctctacaggctcctagggctttcttacagcatggtggatgagttccaaggccaagtatcacaagagagaaaggtagaaatgccagcattgttatgacttagttttagaacttacacagagtgtcctttctactatacactgttgattgaggtccacctgggctcaaagacagggggttagtctccacctttgttgttggggttgtagtaaggctccagacaagtttgtgggcaagagacactgtcgtgaccatctgtgtacagtacagcctgccattatattgtattttattgcattgtatcacattttactacatcatattttaatgttttatgttgtatttgtttccatttgtggaggacttaatatctgccagacatgtatattctgtattaaagttgacttaattctcacaacaaccctgtgatgacgtggtccttctcattttcaccaacgagaaaaccaagttataaagatggtaagtaacttgcctaaggtcaaaccagctcataagtggcagagttcaggttcaaaaccaggcaatctagttctggatcccatacttttcaccactctgccagattatttctatgttgttatctgtttttatgtcttaaataatatttatgccatgctgttactaatcaccatttccatccctgtctctgtatctcagttagagaaagtgggtagataaggactggatatcagactggatagggaggaaacacatgcaggagtatcattacctttgagagaggtgggtctgagcttgtccctaagtgctcctggaccagttctaggagatctcaagaaaagaagcaacgtaacatttcactagttccatacagagtttatattggccttaatgattttgcctttaatttaataagacatatgggagtctacggaatctagggaaggcagctgagtaagtaacgatatttttaaaaaaattggaaataggggccaatatttgaagactaatgaaattcaggggcatctattctcgttccacaaaagtttagctatctggtattccatctggtgatctattcaatcaattaactcttccatattgggatgtttgtcagagtccagcttacaaattgaggaaatccacagtcacttgtgagctagtttgtatcagttattaaaatttacttatttattgtaaacttcatcaaaccaacaattgttaagcccctactgaatgcaggacactgcagattacaatcaaggggaacacagtttataccctttctcacaccacaagggacttctactgtaagaaaaagatgtgtaaagccataacgacaagaatatgtgataaatatgataatgaatctatgaacaaggctgtatggatgcctagcggaaggtgctccaatattctcctggagaggtcagagggggcttttcagagcatttaagcatatatattacaggaactggaaatgttcagcccagttggagcttagaaaatgtagggcaagtgataagcctggaaaggaaggcacgtagatatgtttctgcaaatgcattccctccttctgtcttcctgtctgccttatatacacaatgatgactcagtaccaggaatctcaggaaacaaacaacacacatgcacaatataaattcctctacaatccctctatttatcctcagtgcaaaacctcaattaactaatagctcatctgaaaactgtcagggctagaaagtcccataacccctcaggataaaatcacaccaaccgtaagttacttaggctctccaaggtcagcctccttttatctagcttccctctttttataaagctgcgggcctgtctctaacaggatcatgtggtaacattcatgatttgcaagagctttactgctacaaagcacatttgcaatacactgtctcttttttttacttggcatttgcgatttaattgttaacccacctgatatatagtgaaattgtggcccagaaatgtgaaatgactgctcttaatttttacaaaaataaaacaaaataatctaatccttaaagtcgtgtcttcttttgcaaaatcctagtacatttttagtacatcagttgtgttccgtagctggggactctgttcaagtgaaccttaataagaagtgtgatgtataaaatggcagagtttgaggtgttctgactgaaataaggagtctgggctctggagcgtggctgagcatcttcttgctcactccagaaacggccctgaggcttcttcatgtctagtgttgtgaaaaccactcaactgcagtgtgcttattacctatgtctaaccttggagcactcagaaaagacctaatgcttattttactgtctgaagtgggaagacagccattgttaacgtgggatctcccctagcattctccttctgatcctagcgtaaattcctgtggatcaaagcccagcccctgagactgtaacagagagaataaaagaacaagaagatggtgaaggcgatatggtgtggtagatggagcatgtgaattctcctagttctgcttctaactcactttttgatttttagcaggcaagctatttcacttctcttgtgccacggtttccattcataaactagggaactggacttcttgtctcctcaccgtctgattaaaaacattccgtggtgattccttttcttggtaagacacatagcttagtccacctcaggtcccaaaaggaggatcaaccttagtgttttacgctctctaatatgacctcttgcggtcgatgttttagaggtatctatcatattgcatggattgagggagtttgacctgttgagctgggcgagttatcaccatgcagcacttcaggtgcttactctctttttatccatgcattggttcattggattcaaacatttcattagacttcctgccttcttttggggggatattttgaatttggggataataagtttagaaatctttgggatgaagaagaggaaagagaaggcagaaaaggagggccatgactataacatttatcagcaactgtgcctcttccagaagaatcaggatggactggatttgaatataaaaagtaggaagagaggcaaggcagaaactgggagaggccgcagatggtagtgattgcagatcctttataaaatgctgcatgtttcaactttcctctgcccaacactatcaagtgagatggatccttggaggtctttgggtccagtcctcaaggaatcaaaattacatctaggtagtaggaataggttctagtgttctataccacgtgggataactatagttagcaataatgtgtgatgtagtttcaaataactagaaggcagatagttaatgttttcaacacaaaggaaatgataaatatttgagatgatgaatgtgctaattaccctgatttgatcaatatacattatatgtatggaatttcactgtgtaccacatgaataggtataattatttttaatttaaaaaaagcagtttctcatgtaagctggatgttgctggatagtttaacagaagtctgtatagccttgttgtattttaatcattttatctttttttttggcctggaaaatattaagttagaatggctgtgctggaatacatcatccccacctgtatattaaagctctgtgttatttaaaaatttgtctaagaaacctataaattgatggagcctcactgtggtggttctacttctctattttgtgtgtttgtttgtttgtttgttttttggtctggtgccattgagccactgtctataggaataaaaggatgttagcatgactgatagttcagtgacctgtaagtagcgattttaaagaaaaattttataggtctttgttagttccaaatctgactacctgttaattctgctttatagtcatgctctgactttaccatgaaggctgtagcattgtgctttatctccttgtctccagagtacaagatcttggtaagagaaaagagtgataaacccaaaaaatacaaactcagtttacctgagactgagtagcacagaggtctccactaccactcatttccctcttcacatggcaatggaacttttcattaaaaataaattgtatttactcatgtatattcttatgctaaactgataccctttttcacaatggataaaacaacaataaatgtttgcagcctcgcacatcaattctcgaaccctgttctgcaatttctggcaataaaaggccttgcttagtgtgcattaaaatcttggttctaaagtcagtgtctactttcatagaaagtatagtttgtgacctctgttactatattttcaccagcaatttgcacacttgtcatgaggctttctctttgtatgggtcttagataatgcagtatcttgacatggtacttctatggtaagacaaagaggatgctgtttttgtattaatgcgaccaaaatatttcaaagccaatcttacagaatccccctattggacatcccccataaattttttaatggaacaaaacccctctgtgagaaataacaatttgtatacgatttcaaaggcataattcaaactatagctgaataagaaaaataatacaggatctaacaaggcaacacttaatgaaaaatcaagggccaggtgcagtggctcgtgcctgtaatcccagcactttgggaggccgaggcgggtggatcacaaggtcaggagatcgagaccatcctggctaacatggtgaaaccccgtctctactaaaaatacaaaaatttagttgggtgtggtggcatgtacctgtagtcacagctgctggggaggctgaggcaggagaatcgcttgaacctgagaggcggaggttgcggtgagccgagatcacgccactgcactccagcctgggtgacagagcaagactccatctcaaaaaaaaaaaaaaaaaaaaaaatcgaacaagtctttggatattaaccatagtgatcatgccctaagtatgtatttactttaggtaaatcttagtaaagcaggaattagctggttagctgcacttactggctttaggttgctggttagttaactggaaaggctgttagtttagaggtgatacgacacatagattatggtttaaaaaggttgcagcccttatttctagaatgtattcaatggtatctgtgctgcctaacccatagggttatgttttaaacgatatgatataaatgtgttatactacattttgaaacgttagttggtgtcactatatcttttggcaaagagtctccttatgaacttcagggagcttgtttctacagaaggagtttggttcataagatgttttccataagaattatataaatttttatataaaaaagtagtgcccaaactattaactcatggagagagatcaaattctggtctttttaaaattaagctctattagtccattttcacaccgctgataaggacataccagagactgggaagaaaaggatattttattggacttacagttccacatggctggggaggactcagagtcatggcgggaggcgaaaggcacttcttacatggcagtggtgagagaaaatgaggacgatgcaaaagcagaaacccctgataaaaccatcagatctcataagacttattgactaccacgagaacagtatgggggaaactgcccccatgattcaaattatctcccactgggtctctccctcaacatgtgggaattatggggtaaaagtcaagatgagatttgggtggggacagagccaagccatatcacaagcttagtgagaaacctaattgcttatatactatctattattttcaaattcattttaatattttggattcttatccaactaagagatatagggaacaaatgctgtaataatcacccatctgtaaaatatggaccttctcatagggaacttacgttttagtagggaaaatataacatatacactaatagagattacagagtaggaggtcctttacagagtaaaaggagaatggagatgtacagtttggtgtgtactgtgggttgaggaagattgtgtgttgcggaagatggtgacagctactgacgagtcactttctgccatagagatcaattttccattggtcaattgtggacattcactaatgtaggttggagtgatgcttcaggagcagacatggcataaactatttcaggaaaccataaacagcttagctttatcttcagagtagggtatgaaaagggagagaccaatggtaaaaatccaaattagaatgatgtgatgccatcttggaggcccttgtaagtcaagcaaaggagtttgtgcaaaaagtttgaacattaacaacaacaaacaaacaaacaaacagaaaacagaaaaaaatattgcattgtatctgtgggaccttcccatccttaggttttaattttcccctctgtcaaatgagagattttacttgataatctccaaaattgtgaccagctctaatgttttacaattcccagaattattacatcttaacttctccctgagaattatttactgatcacatagtagaactgaagtgatttctacagtagctctatagctagcaacccagcattggataaactcaaggaatgaaaaatctagtgtgtgctggggttgggagggtagtcatatattactgatttaactgtcatctggaaaactttatgggaactaagtagaggatgccataaggaccattaactgctcctaagatatgatgagcaaagactggagaataggagtgggcctagtctacagattagttttctattattgctgtaacaagataccacgaaattggtgtcttaaaacatcacaaatttcttatcttacagtgctgtaggtcagaattctagtccaggactcactgggttaagatgaaggtgtcagcagagcttcgttcctttctggaggctctagtcatagtcattacctttcccagcttctagaggctgcccatatttcttggctctcggactctgtctttctagtgacattgcatttctctgaccactctttcatagtcatgtctctctgaccacagctgggaaagattctttgcttttaagaactcatgtgattagatgaggctcacctggataattcaggctaatctccctgtctcaaaatctttaaccttaatcacatctgcaaagtctttgtaatcaacatgttcacaagttcgaggaattagagtgtgtacattcttggcggggtggggagggctgttcttatgcttatcacagtctgtttttaggaaagtagataagttcacaacgttaatgcatggaggctgagattgtgagaagaaatgaagcagccagtcataaagtgtgtttcgtgctaatgtaaagagttctgaagttattctgatggccatagagagctattcaattctacctagtagaggaatatttaatctataatgatgtcaaacaattgaagtgggtagcttgtggtacccaaccatccttcgcattttaaacatgggaaaatgaagactattttttgactcagtatacttgggacacatattagtgccatgtacctatcattattttcccatatcatgtgtttttctaccctttcctcctacttgtttttcctctagcctgtgagaatgccattcatgatttataatgttctgggtaaaaagttcaggtagacctacattaagcaaaggtaactcagatttggaagactgaagcttggtagcagggagggggttacttaggacagagagatgccttggaatggccgcacattgagctcgtgcatgttggagctggcattacccatgtgaggaggtggatgacctgtctatatattcaacactagcttttctttgagatccccacaaaacagatctaggaaatctaatgaaagaattatccctgctacaccgtgtttttaacataggaacggacagttaacttgtgtgtttgttcaagaatgattcataatgcagaagatgaactggtgaatagaagaagcctagtaaattggaagattctcttgatgaaacagagaaattgagatttattattcagtcacttccaattacactgttgtgttgcagaggaaagcagctaaacaggatgttggctggtaacaccagcaaagtggaatcaacctcaaaggagatggtgtcagagtggtgttcaatgcctgagcttctaccgagtgagtcacttgtgtgaaaatgtcttgacacagatagaattgaggtgcccacactatatctgatcacagaaatgttaatgcagaatagcaaactggctttcatcttcatgggattgcaggctgggggataaaagggggtgcatttttaaaggtcatctctattgcttatgagaaaacaatgtatcacatcccatgcatctgtgagactgtatatcaagaatcagaaataaatacatttgaaggaaaactgcaagttgtttctcacgtgtgaatttgatgcttttttttttaaaaaagaaagattttctggaagaatttagcctcctgaaaacttgtttcttctgtgttgtagttgataatatctaccacccactgtggtgcatggagaggaaaaaccttctatcccctactttatgtgttattgatgtgacataatttttcagaatagccacacaatttcaaatgtgacttcttttctaacttgcaaatagagctgacaacagcaagatatgtcctgtaaacaaaccccaaaagaatatttttgaacaagttgtagttcaatttataccagattatggaacactagagatttacagtgatgcgttcttttatttagatggaataggagaacccatagagttgaagctgtttgtctgaaggtttgcagcagatcagtggctctgccaagcctgcaactatcatcacctgactccaagttactctctttctagtccagcacagctgcctcccaagtttaatagtctatgactcacaatccaaatctatggtgacatataatattttactttgattccaaatcaacaagccagttttagaagtgcttacactgctgcattactttttatactattgggttcttcaagttgagtcttatttctagaactccaataagaataaccagaggagtcatttattttgttattatgacatatttattgaagacttattgggtggcaagctgtcttatagagggtgagggtacagctatgcataaaacaatgtgtattttcttaaaagagtttatattactgtgggagaggcatagtaaacatgttaggttctatagagaaaaataaagcaagataaaagtgaaagagtgctttgggttgagtggagccatagttgctattctgcacaaagtggttaagaaaagccttaagaggaagagatatttgaggagagatctcaaggaggtgaggaagtgagctctgcagatatttgggataagcatgttatagacagagggaagcacaagcgtgaaaagtctgagaagatcatggctggcatctggcatttttaagaaagagtgaagtagccaagggtgcctgaagccaagtgatcccaaggaagtgaggaaaaataaggttagggaggtagcaggggccctcatgatcacatagaacctcataggacctcttattcttagtttaagtgagatggagagcatttggagtcacattatcaggcttatgttaaggatcactcaggcagctttctgtaggctatgtggtaatccaaaccagaagtgacaacacaaactagaaattacaatcaaactcaaaatgatagttggttggacttggtaggtatagttggtgttggggaggggataagaagtagtgggattctggatatatttccattgcagcctcaacaactattgtgagcagatcagatgtggaatataagagtaatagaagagtcaagaatggctcctaggtttttaccctgagcaaggagaagaatggaattgctatttagtgagatttctggagacaggaagattaattttgcttctgtttttgttgtttagaagagaaaggagaaaggatgatcagccatttggctttgaatatgttatatttgagctatcttttagagattcgagtattggttgagtagacagctgtatatttgagtctggggtacaagggcaggctcttgacttgatataggtgtaggtgtcagcagatatacatttagagctttgagcctggatcatatcacctaaggtaatggaggaagccatgaatattttgatgtcatggagaaaatagaggaactattaaagaatgcttgggacaagaaacactgaggtgggaggaaatgcaaaggacagtggtgtccagaaatgaagtgaaaaatgtgcttcaagagtgagtgtgtgatcaaggtatccacaccattggatcaaatgccatgaggattaaaagttggaccaatggatctagatcttagttgaggattgccttgataagaacagttatcgttactcttctgagctatttgctcacacttgccttactttttgtcaaagtcgaggcccctctaaataatggttaaatacaagggctctggagttgccctgtctgaggtcaaatcctagtttcatatttactagttgtttgagcttggaaagtttaattaacccttctgtgtgcttcagttttttttgtttgtttgttttacttttgaaaggaaagaaatgatatgttttgtctcataggtttattgggaagattgcaaaaattaaacatataccatagtgtctgtcatatagtaaattaccaataattgttagctctagtgattaagaataaaatgatcactaacatctataaaattacacctgacttatatttccttcttaccctgaaaatcatacaaactctttctagagttgtgcttgagtcggttgcactattttctgcctttttgtttttttggtttgattttttttcagtttttttaatcattacatgaattaacctcattatgatctaattacttccacatagttctccagattgtgaatgctctgcgaaaccatagcttgttcatatcttagaaccttatgcaagggttggcacttttggcacttcaggcttgaaatccaggtttctgaatgccctggtgattgattgacatttcaccttcaaggtcattccaatacttaatgtagaagtgatagggtaaactcttaattactggaattacctataaataaataaatgacttaaatttcctaaaataatagttaatgtcttgttaatctgagttccttttctctgtaaattatttcacaggcatgaccctctgtaattttctcaccttttaaagtgatcctgaggtatatcatgcaggatagttgacctttgggattggtgttcttgccctacggtagatagctttgtgaagtcttccctccctttctatttctgggacctagaacttaaaatggcctcttatgttgaattcttctcattcatatttctataaactcaaataatggtgcctttaacatcttcagacgtgccttcatgcgttacaaaaaaaaagatggtttgatatttgtttcctttatcttctttgaaatgcacgaataaaggtaactatttacaaacctgaaataaagcaaaactgtgtttattagattcttgaaaagcggttttgcaaatctaaatcaagcaccgggctaggaggactacattaagcaacaacaccagcaatgagtggtatattttaggaactgtgtccatggacagaatgagatatcatgagcaaatatctgttgcaattcctgtgccaattcataaatggcaacagctgattcttgccttgctcacatagttgtagtctggatggtaaaaggtaatattttcaactccttggtttactttgtcaggagtaataagtttctaataaagaagctatatttatacttctcacctagcctctctctctctgtgtagtccatgccacaaacactgtacattggctaacatatttgtctgagtaagggtgagagacaagaagaacatgagggaaactagaggttgtacaagtaaattctattgttgctaatgccataatttattccagatattatctagtcccagaatgtgcatatgaatgttctggcgctctcttttctgtacttgtaataaacaagacatcagaagacacaagagttgagagggcccagtttcagtacctcttgttataaatcatcaagcaggtaaagagaagatccctgatgttatcagtacttttgagcagaaagcatggatgttatcagtatttttgaccagaaagagaatggatgttatcagtatttttgagcagaaagcatgcgtgtttgtacaccttcttgtttactccacataggcactccgacaaaatagtatctctacctcaaccagtaagttccttatctgtctctgagttcttttgtccttctacagaaacaagagtgtttctcttaaactaactccctcattctggataaactgatataataaaaacaccagaacgaaaacgcatgtattcataccatactttcccacctcactgtgctgtactctgtagagttcatatcctctcttcttttacacctcttcagtgagctctataattttctagctcttggttgtttctctgttcgtatcatctacctgcaatgccattcatcacttcctacctgccactctcacccttcattttttacctgaggagctgcctcctaccccgtatgagttgctgtacacgtttcttttgacacttgtcacatatataccctgttatggttgtggtcagctgtgtagattcaacttccttgacaaggctggaaaattgtgaattgtaggaagtgtgtttgagtgtgcttccgtttctgggattcccactgtgtctaaccctgtggtatctggcatgggttaggcaatcaacaaatgtttgctgaacaaatgaaaacaaatgggtaaaaaactcaaacctttaatattcattttttaagaaaaatagtaaatagcattaccatgactgacagaccacagttaatttgccatttctacctcccacttgctgttctcaaaaaaagtggaataaaaccacagatttgccaatggtcaaaagatgaatctaaagggcaatgatgttacaacttattattaacttatttcatttctgcctaccaagaaatgtgtatgactcagcttttgtccaagcagcactgcttttgttctattttgaattcgtggtggaaaggatgagtttttgataaagatcttgacttttttgtatcaaatagaggataggacggtattatagagattaggtaatgaaatgcatgggttctaatgcctgcactgcctctacccctgtctagctatatgaccttgaacatttccttgcctctgtctaggccttagtctccccagatgtaacatgagggagctgatgtagttaattgtcagtggctcttgcagccaagcatcctagactggaattctaggtgggattcagagtaattccttgtgatgacatatgactcaaccttcagctgttaactggctcaccatcgtgacaacaggcaccagattattcacacatttttgaatatttgaattgcataaggctgctcaatgatggtgaaaattgggtcctaaatgttctatcagatatatatgtagtgtaacctgttcaggatctcgtgtgagtgtaaaatgatgtgtgaaatatgcaccaagcaagaaacactttgcacattatgataaggcagtaatacaatttgatttttatgagttaaagatgatggtactataagagctctagttatatgaagcctggaactatagtatgtcttagtctttatagaaaggaaaacaattaaaaatgttgtttctcactcttgtatttccgtgttcgtagagtcaatagtttcactcaaggcaggaagacaagacctgatgttagcccctctgtccgagtcattcaacacctcaccccctccagttatatttatatttatacatattttattattcttttactatgccagtaccacaatgggaaatatgtttacttttaaaaagctacccagaatcctccaatttctcgtccgagaatataaaaacacttacctcacataaactcacttaagaaaatgtgaatgtaacactgttcccccaaaccgctttcttctttgaatgccagcttttcacatagcagctttcctgacctcctacttccaggacctcagacccctctgtctgtgggctggcacttggaatgtggctgtccacttggcaaagtggaaagagcttctgttctcactgtggcatctggggcctcaattctggttccaccactcagcagctctttgaatgctaggaggatatttcacttctccagatcctaatctcttcactggtaagagaggaataattatatttactttttgacatggctagaataattacagagaatgcatagagagcatctaacacagagactgacaggtagtaggtgcaggtttacttccccttctgtagatggtccagggtctctgacgcatctctgcttcttcactggtttatctctgtgctatgctaccaccaaggagtcgtctatgcacagataaagagggaaaatggtctgcagtcatcacttgggattctatgcaattcagtgaggtctcaaatcactactcaacaaccattcagcagcaatgcgatgtcaatgtccttatctgtttctcatgctactactgtttcatatctcctacgtaatgtagtttaggagaaagagtcatgaagtgggttccagtagtcctggcttccagttccgattctcagataaacctactctttgacccatgccaagtcatatccttccacatatttaaatgacaatcctataccttagttctctccagagatacatagattgttcaggctgatgcacttatgctttgatttactggatattcaagtaatgaagcctatctttttctatgttttcttctttttctggaattcaaagtctatgtgttcttgccattgcccctgaagtagtaacatttctgagcctggctgatctagaacctctacaaaggctgtccttccttcttgataataagtcagtgcatttacctaatatctgggagtttacaaagtatcttcatttattcattagtattgaagtctcagtagtaactcctgaagatggggattcttacccacattttagagatgaggaaacaggatgggagatgaaaggatgttctcaggagtcccacagtaggtgttagttacatagcttggatttcaagcagcatccttctcccaatcccaggtcctggcctgaatgtaaatgtgatttccaatccaagtttgaatgtctgtgcactcattagtccctagacaaatctggtttttcttgcatgagaatgaaattgaactttcaaacattttcttaagcctgtaggatctacattctcttcattttctaatatacttgtaactttaaattccttattaagcccgaaggatatttcacttcattgtagaaatttaccattgccattggcttctgcaaaacttggcagtgaactttttttaaaaaacgtggccattgagagtggtccccttgatacttgagtgtgtattgtcccaaacattgcctcaataggtagttactgtagaagaaaatgccgtagttttaatggcagccttgaattttctcctctctcctttaatggaaatccattctatacttattaatccactgagcttgtcagtacacatccctgtcatttctcaaaaatgtaaggaaacagcatgtatagaacaagcactggactaaaagtcggaggagcagattttagaccttccttttctaccaattatttggaatgtggcaaatcgctttacttctgtgaacatctagttcatgttttataaagcattgaagtagatcatttctaaggttcttttccaccctatttggtaaattgtctagcatgttctacttcccacttgattaaattactctgcttcattttttttaattttgcaaggaaatactcattacatataaggataggagacttcacttatttccacagatatttattgagcactgactatgtgaaacataattaaagtgtaatgggcatttggaggagggagacattccagaagaggaaactgttatgagtaaagataaagcagtttgaaagtgcactttctaatgagaacctggagattcatggagaatttgcagcgcatggacttgtgagcagttggcgttaaggttgagaagagggcagtgtggactgaatgtggaggcttctacagtgtgtactatttataatcacgcacacacagacacacacagacaaacacacacatacaaacacacacactcatcccttttcagggtctcctgacgacctatactgcctgttgctctttttacctcagccagcaaagagataaattgtcaagattaagtagatctgaacatttgagaaggagttccataaaaaagacaatgaaaatcaagtgtaccagcatctttgattcatacaaggatcattttcagtttaacagtttatctccgttgttggttgtgacttcctgcaggacgtgacttttgatatattcattcttgaacttccaccaagcacagtttcaccatagttgatgctcagtaatagatccttatttgttggactgaattgctgcctactgaagtcaatcctagaaaggagagaagatagcttttttacatagaataactaggaggggttttcttcttttgaatgagctaccaataacaaaataaaactgcaatgaaagaattgacagcctggatctgtaatctgcctgacctgataattgtaaaaactgattactgtgtcagcctgccagatggatcttctccttgaaatgtaacgtgcggcacttctgaatgtgattcaagtgcaagcttccttttctctccccttcatgtttgttagtttgggaaagaagcagttttatttgaactgaacccactcattttaagtgtgtttaatgacagcagtatgtgacagataaaataaaatcctacggcctcgtttgatgtttagtttcagaccttagtgaaaggaaataggataaaacaatgttgttcaaagggagaagttgaaaacaaatgatttgttattacacacttagccatatctctccagggaaatttgggaagtcaaataatataaacggtaataatagtagtacttgagatttgtggagtgcctagcagtttgtcgagtggctttatgttcattatcacatcaagtctaggaggttgcctggccagaaatcatcatcccactattacacacacggttgagtgagttacgctaaatactacttctaaaatggtagaactgagcctcactcttggtcctgttgattttgaatggaatagttcctctaattctctgtgctggctcaccaaccaaacatgtgtgcagtacattggaccacgttgtggaaccagcctgttccttaactttactgaagcatatatatgctggcaatatacaaataaattatcacaacggatttcagcagtgagaagtatatgaagttgaacataacagccctccctcagtacccattcattttctcccctgccaaccccaactctttttccaaagagtaatcaccattgtctttttgttgtgcatctttccaagcatgtatctatacatttatgtatacatttacatatatgtgtgtgtgtgtgtgtgtgtgtgtgtttgtgtgtgtgtggtatattatctattttttttcagttcttttcctctggatcttttcatgtcagtaaaaaggatttgccatactatttttaattctgtatagtgctccatagtgtaagggttcatcactgagtctcttttatagtggagagcttcagcttttctttattacaaacaatgttaagatgagcttccttgcatatgtatctttgtgtacatgtgaatccagaattggaattgcttgttttttttttgtttttttttttgtttttttgagattatcaaaattcagtgtgggccatcatcgcaaatgttagaatcctcatcttagctcatgttatcgacctgggtttccacttagttgcttggggatgtgttgttcagaccaagccagacacttctctaaacagacacttgtggccaagagagtaaatgttggggaagttattttccatggcactgtggtttgaatacaggcactcaccatggaagaagagtagggtattcttgtaacagtcttgtttacttaaaacagccacgactcttcgctgagatagaataaggtacttaacgcaataaaaatatctaccataatttaaaaatgcaaatgtagcaatgcactaaaaaatacctttagcttattttttgttaagaaacaagtgttttgcataatcaggctttaaaaaatataattgaattctctatactgattctatgataggaaggtccagagtcaggtccaccttccatgccatactccttctttccaccattcgcagctggtcctactgagggtaattagtaggggataatatctgaaaatgtaggtatgtaagagaatagagctaatctgcctagcttttatgatattacagatcgcagaggagcatcctcacggataattcccaaatcacagataatgtgttgttgtgctttataagcagagagacacaaaataaactctctcccctatccttctcttttatttatttattttccttctgttaatagatttagtcattttttaaaaccataatataccaggatgagccagaattatgtgtgtctaagttcttttaaaataaagaaatcgtttcttgggtctgttttagttaggtcctttcaggttgcaggaaccaagatgtgcttaaagttacctcagatgactttagatgatgggaatttatggtaatatacagggagaaggaaggaagtccaaaaacccatgtcagcaactagacaaccaagcctcatggagacttggaatatcattgaggacacaacagcagctgattttgtcattcctcagaaataaacatccagtgtttccttgtccggtgggtctttgttggacaaggacttagctttcttcaattttccttctgttttctgtggcagctcctgttagtgattctgtttagtcttcttctgaacactaggatgttcgttatatgatgtcctgctgcctcatggcctcctcatcctacgccgtgtgtctctggcttttgctccattccatctctgctcccagcttttctttttctgtatccttacactgaaaagcctgaaccaacaggaccattattttagctggttcttctccagtacacatggaggaggaattcttcctccaacacagctcctgggtatctagtctggtttgggttcaatgtctgatccaactagctgtggccagagtgcagaattacctgttacaaaactgtggcaatgtagttattaaaacaagcaactttttgagggttttgcttaaacagagtggttggtgtggtagagacaacattgtatgtacttctctatcacagagagaaatttataaagtcaaggcaaaccaaatatctgaggctgggacttcaccccagatgtttgcaagtaaacaagttgtggaccttagagatccgctcctctcactttctgactgcctcttgctttggtctgtagaccaatgttccactagtatttagttttcattctggttttaaaacggtttatctgtaaacctgtaatttaaacttctgataagcaaaactaacatagtaatgagcccattagaaagcaatcgtgagatactattagactttgataactttcaagaagctttattctatttttgcccattcaaagctaacatttttggcagttttaaaactgaatggggtttttgttttttcctaaatatgtttgtctgatgtatattatatcttattatggcaaagaaacttaaagtaccaaatagaatgaagacatatttgatattaaaataatgaaaaacattcaatatttgataacttcagagagactttgactaagcttcaaggttatttttataaacatgtactactggacaatgtatagaagtttcttagctcacagattttcactttggtagatgaggactaatgtgtttgccagaatgtgcacctcttctctatttaccgtaaagagaggtgtgggtaggagattgcacagtgtcacttagggcttagaggtgagggattttggaatagcttttagtttaacctgcgtgtgagaaaagaaggtttcatcgtgtggttaataggaattttcatatgataggaaaaggattaacaagatttaactttatattctcaataacttcccaattaaccagtgtctttgatgaggaaaaatttgaaaattatacagttgtgtttcttttcaatcttcccttgcacgattacaagacgatggaaaagtgcttacactttgattgctgttcctaataaccatgttagaatttcacaggtgatctggaatatcatatcttgactttcatatgtgggagcaagagtcagcaaacaacctttctgtgcttagagatgattttatacataaaataatattgttttgaaaatgaacattgatgggaactgtgtcatattttctgtatcatatttcatgttagctttattagttagctctcattacctcaccaaataactcagatttaaaaatatgtatcttaactgtgatcagcctaaggactctattcgatgatcaagtcatagtcaaatcacagtctcatctcttaatgtgttcctttgatcctcctcccaactctccctccaacattcataccaaatccttggatgtttctgcttagttcaaaaagccatgttctctcactatgtaaattataccaagaataccactaatcatatacgagaagctaacaatctatgcttgagttgtgtgttttttaatatcatgctttgggatatgatgccaaattggatctccaatttgcctttaattagtcagcaacacttatttaatgcccactaagctcagagcaaggcttggagggtggagaaggggagtaaggagatcgaaaaacaaatacactatcatttccagaatagttacagtatctttatgcatacagaaaacagataaatgaaaggatttagaaaacttaaaagcaaaatccaaatgagtgcaaattggtctgatacaaactgagctatataaatgcaaagaggatgcaaattataaaaacttgaagagtttaaaattgctatctttctacttttattttcataatactttgccatgagaattcttagatctcaggacaccatacccttcagtgaggaaagtttactggttcaattgtatgatttagagaaacaaacctaattcttagcattttatgggcttctgagagatgacgctgtaaaactttttgagtctctgttaaacttttctcgtcattaaagcttttatgtaaccttgaacaagttccttaacctctctgcgcctcaacttccacatcattaaaatggggatgataataggacccatctcataggattgttaggactattaaatgtattatactctattacttgtatcctataaaatatctttctcacagtttaatttcttgaaaattgaaacacatcctatgattgatgtggtaagaaaccattgtaacacatattaagtgacacctgttggttctttgttagtaggttagtagggaaaaaaaaagatgcagtttatagtcaaagccgtgtgtaaagtgtgtctaaagtgcttaaaacaaagcctgtcatacagttggtcttatagaatgatgctgttatcatcattgcctgaataccatatttgtggtatgtaaaatatttgtctccaatttcactggcttctgtcctatgaagcagatatacttatagttcctggtctttgagtaaatagagcctagaaggattatcagatattacacaactgccaaataatgacttacatcaaaccaagagtttattcctcttctcatgcatatcaacacctgtttaatctgatcatgttttcaaaaacccactagtgatctatttatttctagctatagctttcatcacctgtatttggtgatttgttgctggcagagtccatactcataacactaaatctgactactgtgattacaacagtctttctaagttagataccactaatgatattgattagggagaaggcattctttgtgatcctatttgcacgatctcgggtaattcacttactggacccaattgttagttgtgaaatgtgaatgttgaaagcagtgaatcttccagctgcttgatttgtgatatcactatcaatttacctactgaggagcttcatataaattggtcatttgtagaaagtagttcagtggctgagaatctggcataatattttatttttatgaaatttcagtaaacattattgagcaacttgtaggtttcaggctccacgatagggatgcaagcatgtaagacctctgtccagcaactgagaggtaaaactacaatgagaaagatagactggtaattcagatttatttttaaataatagctttttgagatataatatacttacccttcaatccactgactctggttttaaaggagatgattaatacattcactcaaccgatattgagcatctgatatgtgccagagacttcctatgtgctagggttatggagattgacaatagttatacaaaactgagcctgtcacaaaatgtgtatcgacagacagtcttccatttggtgctatagaccagtactcagggtcagcagagggtactctggaagcatattcagggacaaagcaaacctagtcttggaagatctgaggaagtttcctatgatcatgtctgtctcctgccataacaccctgaatgcatccgatctgaactaaactgaggtctgacaaacttgtaggagtttgcgaggtgagtggcttggggaaagtagagaggaagaagtttttctggaagagaaaagaaaatatgctgtggctctgaggtgaatcacatataatgcacaatagcttagtattgtgataacatttgggactgtgtgggcagacagtggctgcagggcctgaagggtggagagggggaacttacgcttcagtaggggtgtatatgtcttattatgaggtcacaatgaagattgaggtcagctagaggatgtgacattcgagttgggtcacaaaggatgtacaggagtttttcaaggctgaccacagtctaggcagaagaaattgcaattgtgaaaggaagatttgcgtgaaagaatggtgtttttggctgagtgaggaatttgaagtatctggaaaatggagtaagtggcacagagaaagaaaacagccaaataataataataataataaattggtgagggttcggagagccgcttacaattggattcggtgcaatgcaatgactttatatgttctgtaccttgtccttgtaggcagttgcaggcactagggacaggagtctggggggaagacaggagcattgaaagtttgaggaaaaaatgagaagcatgctttagaaagataatctgaatatacttgaattggaggggccctggattgtgaatgaaaattagaagtatgtcatctgtattgtgtaggatagtgcttatctacaaagaattttatgtagaattccccatcagattaaccctttgcagcaatagccaattatttctgatattaaaaattataattaaataaaagatatggattggtaactaaacatttattgagaagttactgtatcacttccacaaatcaattcacttatttttcttagtaatccaatgatgtagcctgtcatttctcccatttttcagcagaggaaattgtggcccagaaggttgtatgtaactcatcgaggcactaagtggcagaggtcatgtttcagcctcggccatctggctccaaagcctaaatgtatgaattggccactaaaggcacaactgaaaatactaacagtccctgtgttagtgaagagggatatttggcaaaaagtttttattttgcttttttacaattcagtgatttgtaatttatttacagagtcatgcaatcattacctcaatttaattttagaacatttaaaaagtccatgctcatttgcttcccattctcactctaaccctagataacctcaaatctactttagtggtagtcagtttgtatgaatggcaacttcagtttaatggcttttttttttttttgagtagtcacaatctgatagccttaatcactaattcaggagaataacattgtttgaccatatcatttctaacttctgcatgcaattagtgtactctattcataatttgatgcagagaagggtaaaagtgacaggccttgtggcagtcattggtcaaaggcatatgagtaagactgcctgagaccctaccctggagttctgtcttgcaggtaaggcacatagacaaactattaagcaatattggagaaagaaattattgtagaaatcctgatgtttttggtgaatggcttatgttaaacttctctctcctggaagtcattgaattgtttttaaaaacttagtatgtatgaagcatttggaatgcttggcattttgagaataaaatccacatcaatttaaaataaaataaaactccccatccagaatagagtagtaattgcaaggcataaaatagcccagctgtggagtggcttaaaggacaattggtctcaggcagagagtaccagataggacacgctacacaaaggactgtaatgtctcaattagtgtacctattgggtagcacatatatctgaaatggcttaaaataaaaattgcaaatgcaccagatttaatcaatcttagtatttccttctcttatgctctcagtccttagttaaaaataaaatttgcctgcctcattctcctgtgtgctagctagtaggattaactggagttctcaacaggaaagcaatagatctagtagacgacattgtatggtgggtgaaagcccgctagagataattatacagtcactcccactatattacccttcaaagaaactgagcctaatattctcctcctaagcaatttaaccaacttctaaaaaaaagtataagatattatttagagaatgaaatagctactgtatataatcaggaggaagaattatagcaaattatactcatttgataagtgtataaagagctacgctcaaagctttgtattgtacctcccaagtaattgttcagttgtgctaactgtccttaaaaaaggagaagagataaagaactgctaaagaaaaaaaaatcaatcattatacttgttcaggaagattttccttctgggcaaagattaagtcttatttcatgctccatgaggatcaagcacacatttggccctcccatgtttagtagtggtgatttctttgcctttctcacattcatgttcatgtataaacatagacaccaatataaaactaaatgcaataaaagtgtgttttaagatctaccacatgtatgtcctagtaggtatagatagatgttatatatctgtgttcactgcacttacatcccaatattttcagaagataggactgtatgcaaatgtttccaatatctctttctaggatcacaaaaaaaaaagagcccctgaggtctttctacttgtttcaaaaatgagctggtagtaatattagagccaatttccttttggtttgctttaaacaaaataaacagcccattatgtaaactgtataagacttaagtgtttgagcacttcccttagagtttgtaagtcttatgcccccaccatcaaaaagtaaacaaataaataataaaaagccaatctaattgttattatgagaagtcatacagcgtatttgctaagagcagctcctctaaagatgtcagactgccttagatggaacactctgtatcctccgcttgccagctgggtaacattcaacaggaagcttaatctctccatgcctcaattcctgacttcaaaattattgtagtaatacaatgcctacttcatacagttgcggagacatcagttaggcgctgttcctctcacatatgtcatcaattctgagaccgattcacatgcttaatatttctgactaattactgttacgtggtaatcatgacatagcggccattgtctgtacttgtacatcaaaatctgctgtctatggagattagtgacttggaagaaaatcctggagtcaatagtggaccccttttttattaagactcttgatggcccagaggtcagtataatgaggaaaacatagaacttccatgattttgacttgaaaagtaattcaaagggttgaaatttaaacgtaaagaaatttttggaatgctttcatttgttgcacttatattttgctttttatgtatgtagaggggtgacatatgataaaaaaactatggataattttaagccatttatttcaacaaacatgtaatatatattctaacgacaaagccctatgttataatttaaatggtagtaatttttgtttccggttttgtaatagctaatggtgtattttataatcagtagcatctttgatttgatggggtagtgtagtaagaactcaataaatgttagactcctcattaggatttgggtagaggttaatgtcggtagatacattattagagttaagggtcctaaggctttttaatgtgagcagagtgcaatgaaagaatattttggattgaccaaaagtctagagaacctgatttgtaactgtatcattatgacttactgaatttcattcagtaaatattgcatgaaattgagctgaaattcatgtctgctaaatatgtgtactctgcccttttctcttcattatgaggattaaattgaatgataggggtgtaagcactttgtaaatccaagtaagaattattagttaggatagttcaggtagtgctgtagtaacaaatacttaccaaatctcggtactgaaaacaagggtttatttcttacttatgctacttgttcatcataggacagaaggagttctttgcagactaatagttgtcatttccaacacttttgacctccatgccagagtaaaagagctctgagggtctcaaactggcaattccacactttgacctggatgtaatacatgtcacttcttatatagctccttagccaaaactattcacatggccctacctagccatagggttgccacagagcagagagctggaaatatgtggagaacagtgtcaataagtttgtaatagtaataatggttgacaatcattgtgtgcttcttagtaccaggcactgttgtaagtgctttagatgggtagagtcctttagtactcatcaagtgggtatgatcatgattcccattgtacagatgacaacccaaggcacaaaagggtagaccaacctgcacagaagagacagagcagggattttgcttgtgtgacattgatgtgtgtctcaaactataatggatttgaatgcattttttaaaatgtaaaaggaagatacaaatatagttgagaatcttctgttctgaaaaataagagatgaggtttggtgatccccaagcctccctaaaatttcacctggatcagccccaaatgacctacacttacaatgactgctgtgttcttttggcgcctcatcttcagaaaccaggggccctctcctggccactgacttacgtcgtagcttagcagaggggcattgtcccagcgtttcggtagatacttcctcctttgacttatttaacctttctattttgggagttttctaacgtgtagaagaacagtagagtggccacagtctactccattatcaatgatcaatacacaattaccaatacattctcaatcttgcttaatttcactttgcaagttaatctggctgcttgtcaagctgagctgtgaacacaaactgtgttcttggggttgcggggtatagagctcctaaaacaggaagccagtgaccaggggagggccagagaggacatgtggaggacagaattgaagggcttcaactggaaaagagggcgtctctaatcaatagtttagacaagtttgcaagtggaagataaatgatatgacaatatttaatcattcataggacattcttgtaatgtaagggggaaaaggagaaatatgttgttaatagggagccagaattattacctttctccgtagctccaactgtaatcttgcctgctattgaggtagttaataaaccaaagcctgtgagctctgttcaatgggacagcaaccagagaggcttctttccaagccctcccaccaggccaagaagcagctgagctggatagaaagcatgccttcagcaccctgggtttcctcttcagtggcatccagaggaccctgggtcacttcacctctctgtctctttctgaaaaacgtatataataaccgtctgggtgactcacaaatctattatagcatttaattaacaaatgttcctcaagtgctttgagctccctgtttggatagatgtgactgaaatgtaaaatacctttcactgccttatttattgctccagcgaacacgctatatgctggcaccatttatcttcattttaattttatctcccacaaatataggcattaatttaaatcacatacagaacataacagtttttatagaggcaaacttattccagtgtgctgcattttaatatcgcactttaccatcttttctcacttgattcaagaatagtatctcttcctgcctcagcatttaatcttaggacaacagaaacttttttgtgtgtgcatgttcttgctctcaaactttgtttctcactgctttgctgcttgttgcctgaaagttgttctgtcagtgtgagcacaggtgtaagtaattccatttctcttttgccagcttaatttcctgtgtgtgtgtgtgttgtgggggctaaggggggtgtgtaacatgatggattttacagctgaagcttatactcattcatcttcagatatcttttctaatagaaataaagacaataaaagtgataccctcctcctgaaatttacacattaaagaccccttcaaactgctcactttttttctgtcttttttttcattcagaggcaaaatttccccctttttttcatcactgttacgtttgcggcagatgagtctcttccttgaggggaatcgtggtaaatgggcctgctgtatttacagctatgaaacattccagttggctgtcacaccctaagcaaggaaggtttccccatccttaatttgcggcctgaaaagctgtggctctcctcaattaagactttccaaattgcctctgacatggcagcatattcccaggagtcaggtcctgggaggcagtaataacatgagcactgctgtataacaacgtagttttacaagccattttgtgctcttttcagaagctttcaggatgctttttctctgaagttgcaaattaaaaagaaaacaaaacttattttgattttttgtttttagttttcctagtctctgaatgtctaggtttagggacatctgtcatagtcttatttatttattttacgtttagtctggatttaaaatgtacaaattaatgtttaagttctctgttttattcctgtaacaatcctacaagaacaggttccattattgtgttcatcttgcagatgaggaaacaaggcctagagaagttaaatatttttttctgaaatggtacagctagtacgtggcagggctcagattttggatccggtccaccttaactaaatatgcttttgatgtagctctcttcaggctgaattcttgacctctcatttgatgctgactcttctcaaacccttagtctttgtgctactaggtagattttatctgtggcaagaacacggttaccctggaaacccactagctagaatggcaagccaattatagcaccaccgctttttttaaattaaattagcgctgctgatgacgtggacttcttgattgaagcatgctgagaaatgggttctcaccagttgttcctgcctcttaggatcatgtgggatcattctcatctattctatcaagccaaacaagaaaatgcctctatgtgattgactggatttgaggaataaaatgtgatgatcttttaggaccctgagctttcagtagtgagtagacatgcatggaaatgtttggaaagaagccctattggagaagaagcctgtcatctggatactttccacccccaagcacacaaggtccactgatttaaagccctgctcttaactactgaggctaatgttctctattttagtatttcttattttatttaaggccattggtttaaatccagacttgattcaggaaaggttgtagccctttgatattctttggtctttgcacacttctaatagggcaggaatttgctttagttcaaaccaattggtgcatttcctttaagtacacagaatttaaacaattgaattgatatggccactgttgaactgagtggtaccaggttggaggaaaggacattcattatatgttagtgggttgtgggctcactctctgagatggtaaacggtaggctggtagaatgttgagtagttcattctgcataacacacatggcgccaggcacattacctagtacctctatgattttcatccgctttattttctgttttgtagagtaggtaaaggtaaggagacgggcttgctcatttgcaaggctattctgtgatgcagggttctgagtacaggattccttatttgcagtccagtgctcttcactttataccaccaagtcaccagagtctcagggcctgtcttctgtatcgcagaaaacaaatcaaggattagcaacactgaatcttaattcttgaagttctaacaggaaaattatgttagtcttgctacatatcgtaggcatattttgtccaaaatgagagtaatcagggaggagaagaggctgcatcttactgtgtcctgatgggtgatacttccgtgactatctccatcaccagtgagcagatttccagaagtcatagttcaaaacgatgaagagaattacacattttcagaaaacattgtacattctttgttaacttttccacttgtaaaataatttgttttcagacatccaggtcctttctccatgatttactgcgttggtgacattaatcagcgtggttatcttggagcctcatttccccttgggtaaaatggaaggataacattggcaatcatacagacgtgttgtgtagaaaggagtaagaagcattttggaagtggcaaagtggcaataatcccctgtaagacagtagctgtttttaagatcactgagctctcaaacactggctttttctgcctcacactttctagatttgtaagacttaatctgaaaatatctttgctattcattatgtataattgtagggctttggatttaaaaaatcctaattctgttatttccctgacaatagcaaattattctcatctaattttctcttatgtgaaataagacatacaccctagttacttccatgcctaatatgattgacaaatctatatgttatctgaattgtgaatatattttcatacatatagaagtacatgtgtgtatttcttgaaatctaatggtcaatatacactaaccagttatttctgggattttgggaacaggcttctttctatacttctctacttatctttaaattttctctaatgagcctactttgcttttgttttacatacagtaattaatatatttataaatgtatgtatactatatattttaataaatttatataagtatatgtatgtatatacatatgttttgcaagtaaaaaaactttagtaataaatatctacaaaggcaatgagagctcgtccaaannnnnnnnnnnnnnnnnnnnttccttcttccttcttgccctttctttctctctctctcttttcctctcccccttctgtcttcctctccccacctccatctccctctctctctcctccctccctgccgccttccttctttccagaaagtcactaaccagaatctttcacagaataaactgtgaaacctagatcttaaatgtactacagtagaaaaagagatgagatttttgaaagatgatggcttgtccttgtctctgtacttgaatctatctcaaaacaaagatataactattgtttttaataataatttcaatatagagtgaccatccttgcctactaccctgaagagagagagcatttacacataagactggtggttgcagtaaacccctttcaagtggagtggccactatggtccttcctcttcccttccttcctttcattcccttgccctttccccactttccttctcttcctttccttttttcttttaaggttcataaaatcttgattggcctccttcctagcagccaggagtttgggtccctaatagctaaagcttatatactttattttcttctttctccagatggctgtggctatgaattttactccccatcccaggactacccctgctatactgacactaattttcattttataatactgtcttcatcagtccatgctatgctactagttttagttattataatattaacttaatccacaatgaaggcgacaggtttttttgtgtgtcttactttttaaaggggaaatattatctctcactttaaggaaactaactttagcaactcattccctcactttttttttttctttcaacttgatttgttcaactaaggagaccacatttagtacttgctagctgagacttctgttctacaattctgagttagttcctcatccgtccgaccctctctccccgtggtgcactgagtcacaatgtgatcaccagctgcatgtgctgctattacacacaacacattggctagcagaggagccaggattcagccttggaagtactttcaggcaaaggtgaagaccctttccccactctaagcatctttcagtagtttagtgtagctgatattaatgttataaatggtcattcctaatcctgtctcagttccagcccagatggagttttgattttagaaaatcattcagtgaaatgtatttcctgtgcctggtagtcattgatcacttaccaaaaaaaaagggggtagtgggagactaaaaataaacttatgataattcacatacacttaacctttactgactaataccaaaaagggaatgaagcaggctctgctgaccagcacttgcagatggattccaggaacgtggctagagctgccaaagccatcgctgaatcctgccaaaagcatcccaggggattttactaagggtggggagagcagggaacatggaggtgtgtgtgtgaatttgttttaaaactctcttactcaacactgagcagtgggaagaacactgggaaaaaaggtcggaaagtgacattctagactgggttccacccaatctctatgacactggaaaagtaatgtgtcctctttggaacttcaggtatcatgtgaacaataagggtgtcatattaaggtcttaacatgttgaaatgttaaaaacattctgtaattacttaaattatttcaaaacagaaagatcatacatgttcatcatgtttctgtgttaactggacaaaactacactaaaattaaagagcaataaaagcaatcgtgttaaaattttatttttaaatatagtacttctagtaactgaatatctaactttattaacaattctaaatctcgctttttttttttttaaaccccagtgaggctgggcaccgtggctcacacctgtaatctgagctctttgggatgctgaggcggtatgatcccatgagcacaggagtttgagaccagcctgggcaacatagtcagatcctgtctctacaaaaagttttttaaatagccaggattagccaggcatgatggcatgcacttgttgtgtcagccactgctcattgggggttgggggggttgggggtgggcctgaggtaggaggcttgcttgagcccaggaggtaggaggtcaaggctacagtgagccatgactgtatcactgcactccagcctgagcgacagagcaagaccctgcctctaattaaataagcaaatacacacacacaacacacatatataaaataaaataaaaaccccaatgtgttaagatctcaggtttaaacctcggcttatacaaaccatagtactaccgtgcaataactgaattgacaaggtaccaacacctattttaaccagaaaaataacataattgtgttatattttccatgagagtcatactcttgaaattaagtattttctcaatagaattgtttctcaattaaaaaaaaaaacttactcaaaacatttagtatttaattataattataggcagataaaatttataaaagattatcagtaagatcaagaacctctgcctctttaatcatgtttttctctaccttttgctggtctcttcctgattttgatgacctcattgtctatacgagtattaagacatttggggtagctttttatgttgtgtactttctttccttctccttatgagatggctgacaccttctaaaggattcagagagtttccatcttattgaaaggtccttatgaaaattcactggtagtgttctcagcttatactaggaaggcatgtttcttcagaagcagtatttgttgtatttagggtgggaatcattatgtagcaagagtggtctacatattggtcttgcagcaacatcagcaccccttatgaatggtttgtttcccaccaaaagtcaaagattagcctatatgatggatgatggctacagaaaatagtgccagaaaaacagaatcagtagaagatatatattaagacattaattgggaaggagtagcttgcatgattttgtgggctggctaggcaatctaacatctacagattaggcaattaggaagggcaggctgtaactccgtggcatgagatgaagctactcgccacaatgagaattccttcttctttaaggaatcctcagctctacttccaagacctttcaactgattgaatcaggctcaaccaggttatctagtgtactcttcattacttaaaaatcaactgattagaggctttaatcacatgtacaaaacaccttcccagccacatctagattggagtttgattgaataaatggagactttagcctgaaaaaattaacacacaaatggaccatcacaggagggtagtctttttctacagaatttaaatctgtggtagagaagcaacagatacctcagggcaaaaaaagtccaggaagagcataaaggttcaagcagaaccatgagaatgccagcattgtcgttggagatggtgactggaagtgatgataggtctagggaacagtaaatgtggacagactggcattttacctcgggcacacttggacctggataggctccaccagtctgccctggaaacagaaccacagtgggtcagacagtcttttgtattagttttaaatacagagttgattgtctctcttgcattcttaacttgcaatttagtactgtttatattctgcttgaaggttagagacattcgactaaatggtcttttctccacattgctgtcattcattaatgtcctggtcctggactttactcattgaccacaggacaagtggctcaactctctcctgccactacccaggctgttagtcctgttgggaggctcagggcccaactcactcatctgtaactctcatctccattcagctgcagcctctacagcccctggttataccctggatcttatcattgcttcgctctattttacctcctaaatcgtaaaaattaaaaccagcctcggaacacaacccctcattcttccagcactctctctcattcaggtaactcctattctacttttcttcagcatatttaccttctattacctttctttttcctcaccagtctcttatatttcctttattatccaacttacagtctgtggttcaatacttcagccgactcttccaacacatgaccttctttcggtaggcttttttcagagtttcccttttgtacttgcccttatgtaaatctgtggcacagtcaggccatcttgccaacttttcacagttattgcacaccacactctgttggttttcttcctaccattctgaacaatttcacttcagggctctccttagtggctcttcgtctccctctccttgaatgtcgttttacctttttctttttcttttttttttttttttttttttttgagacagactctcattctgtcacccaggctggagtgcagtggcgcaatttcagctcactgcaacctctgcctaccaggttcaaacgattctcttgcctcagcctcccgagtagctgtgtctacaggtgtgcaccatgcctggctaatttttttttcttttttcttttttctgttttctttttattagagatggggtttcaccacgttggccagtcttgtctcgaactcctgacctcaactgatccacccacctcggcctcccaaagtgctgggattacaggcatgagccaccgtgcctgggcttgaatgttgttttcctttggtggggcttggggaggggtgtctttcctagggcctgctcttgtttcacttcccacatttggttaagagagcctttaactactatggcctcaactatcagctctacaatatgatataaatttgtttcagtaaacttgctcttcagattcaattgtttctaactgcttatcgctcaggtgcatttggatgtattgcagaaatctcagcctcaatgttttcaaaataaactcatccacttctctcaggaattttttccactccaatgttgttcggtatgtggcatcaccatctaaccagtttcctaagccagaagtttaggtattatttctaagccctctctttcccttattatcaattttacctcctaaatatttcacaatctttctacttctcctcatttctgctgcggtacgtgatttcagatcagcatcatctttcatggaccattggtgatatccccctaacgggtttccttgtatccatttccccaccatcgccccaatctatccaccaaggctttcctaaaatgcaagtctgactgtattactttcctgtctaatatgttatctccttattcctgtagtataagacagtgattaggaaaacaggctctgaagtcaaatagaaatgagtttgaatctcatataactatgtgatcttggacaaaataaccttttttggtttgttttccacgtgcgaaataggaacagtaattgaacttttctttttagatgttgcatacctctctggtatacatgaagaagatgtgtagtatctcattcccaccccgcttatgcaccatgctatagtcacacactgcctttgctctgatccccagagacattgagccaccactggagagtcacatgatattgtttttagcctggaacattgttcactacctcagtcttttattgccttgtctcaacatagacgccatttcccttaagacattttcagcacactcctctggtataatttagtttaaatgtccttgctgtgttctcctgtgtttttctccttgaacttcctaatccttacaccttccaccctgcaaatgatcattatctcactgcctctcccaaatgataacctctttccacccattttaagttccatgaggacgatgaccattgacccggaccgcgttgttaaacttcttagtctcagctgccaagagcttagcacagtgtctagcagagatcggacactcagtaaatatttgatgaatgtttatagtgtgactgtctcgccagtgcacatacaacaaagtgatcccatctttccttctgtatcataaaatagaattttcttacctctgtaatttctccctaggaaccagactgcttctagagagcttcttcacaaaatcaaattaattggtattttacaaggagggaaagccccaggacaagtcccttctcttgaccacaaagttctgtgtttctcatctttcctcttgatgtcttggtttcagcaaagcaacatttctatccctgccccctgctcccccataatcctacaaatgtactatagatatgtgtaagtactacatccccaatcaagtacagcgtttggcctcgggtgggagtcaaacagcaagctgatttttaacattacttggaagaaattttctaggtatataactgacaaacattcatggagagctacttcatttttctgtcaagcttttgggggattttttttaatagttctgcactttgaaagaaagttcacaatttttaaaaggaaatgtggcccttttcattagctccttttacctcatgctgagtcatggatgagagagaatttgtaggcgggtgagctgcaggaaaagtaatactgtcatttacacttgcaggctgttatgctttccagaaaactttttccgtaggttgcgaaagtgattaatctgctgttaaaactgacaaagaaggttctctgataagagaaagaattaaatgaggaatttttctttaaaaagtaagcgcttctttcccattttagattagaaaaataagtttaaatgtttcttttaattttagtcgtgtgtgtgtgtgtgtgtgtgtgtgtgtgtgtgtgtgaagttggccatgacttaatacaatctcaagccattttctatttaaattatgtttttttacttattggcatggcttattcctcatgctgtatatctaaattattcatttctacatcctgttcccttgcttgtctctctttcttcttctttttttttcctttcattttctttatttgggtcttttcaatactttcaacatcatcttacttcggagccccagatctcttcttttctaccaaccttttttgaaacattaaaactggtgaagatggcctgagttctctctgtgatataaatttatccctccctgaaaaattccattcatgtaacatttttataacactttttaaaacttggatgaaagttttttcatgtagttgaaatgaagcatcactgcctaaagcgtttagaaatttttttactgttggttttaagaaattactctaggatttccactgaggactggcaagtattggtgaagtttgatctctcagagctcatgtttcagatggcaacttaaagggacaaataaataagtcaatcacacggcataatctaactttaatatgattctgcagagaaccagtgactcatttagagaaatcagagtcctcagaaaggtggaaaacatgttagaacttattaagcttgttgcctttagcatgtcaatgccttgtttttataagaagattcaatgggttgttaaaatgcactgtcttaaccctctcccctttgtatttttctactcttaagatgcatcattttatgttgggatctatcagtttattttacttgtttttccttcttcctctccttattttgaaggctgacttctgagcttgagccatatccttggcaactgaatgaattcatggggagtatagtagaaaagattttctcacaactctgacagcactgccccctagtaaaaaagggaagagacaaagagaaatggtcccttctgcaactgaagggaccagcacaggggacttggcattcttcttttagtcctaaagcttagacatacatactgctttcgcccctgggctacaaatacatgttttaaaattctgaagttgaaaacgtcaaaaccatttacaattaaaaacctgctattactgtatatttatacaggtatttcataagggaaaaagtagaaaacatgtaaatgtatttgttttatgtctgaagttccaagattatttctgtttctttactgaatgtgtttgaaatatatgcaaacacacatgtaaacatacctgtatatttatgtacagatataagtctacatggagaccagcatttttagataacactgttttacaggctgtgcatccatctttaaggtgctatagcataaggtctatgactgcattttgtaataaaagatggcaggctttctggaaagggtctctttggggcaggaagaggtgtgaagatcttttgcattctacttttaaagtacaacaagttaaattgctaccagatacattagctttatggaggtttgtttccatttttatagcaaaatcaaataacttttaaatcagaggaaaaaaatattcttttgttgtttttatttttgttgttgagattgcctgttttacgttgagtgcagtgtttttcaggtggaaacatattggtttgacattttaagaggaaaatgttctatatgtaatatgaaagagtctttttcttaactaaatgccagcaacaaaatttaaaccaaaaaatgtagtaatgaaacaatggtaatgagatatgattatggtttagtgagagaaaaaagccctgcagggaacagtacaagcacagtaaattatgaattgctactaaataggcctcattagtccactgtggaccatgtttaattgatattagaaaggagtctggaaaactttggaaagtacatgtaagacaacttgctgttaaactaataaaagtcgttagagtgtctgtttcaaaaattagtaattattaattgtgtgtgagggtcctcaggcagcacccattttactaaaacatgcttagagaaaagatatttctatgagaaatgaaactgcagaatgctgagcagtgcaatatgtgacagttccctgggagtttctcccctcctcgtaggtatttttagcaaaatagtccttaaacattgttttttttttttttttaagttggagtctcgctctgtcgccaggctggagtgcagtggcccgatcttggctcactgcaacctccacctcctgggttccagcaattctcctgcctcagcctcccgagtagctgggactacaggcacgcaccatcaggcccagctaatttttgtattttttagtagagacgggggtttccaccatattggccaggctggtcttgaacacctgacctcgtgatcctcccacctctgcctcccaaagtgttgggattacagacgtgagccaccgcgcttgccccttaagtgttgttttaaagaaagttggcgctctactgaagactggagcccaagaagacatttatagggattgtttattttcatgttgttactacactccatggtctgcaaaaccagagtgccagatgttaaattctatcagcataatgcatctttaattaaatattatatacgccatacaattaataatgtggtctgtttccaaaactttattaagaaattaccataattttgtataataggctaataaaaaggcactgtactttgaaacagcctttcataaagtggttatatgatttgtatctgttgaatttggaatttagattaagagattgtgggccagaattatctgatgcaatgtactcaggactttaaataagttgcgaatcttgtagggtctactattatttggcttcctttaaaataaaataggtttcttatttgtcgatgagctcactctttaagaggtttagggaataacttacctactcgctttgtgtcccccaaccctactttgtaaaaacctcaaacaatacaaaacatgataattccaaatatacagtacattgggctatgatatttcttaatgaatggaaagtcatgcatctggttctgtggtcatcattgatgttttaattttcacaatgtgttaacctgatacttaaattcccctagttgtcctgtgaagaaagaattttaaattcacatttcacatgcagacaaactctgatatttaaaaataatagttatcttttaaactgagatcctatgtggatatggaatagcgtatacagctctgacaatagggcttcagtaaaataacattttgcaagctgtgtttttcaagacaaaatgtcaccctcagctaaacagaagtaatttgcatcagaggtgtgtgtgtccttactcttaatgaaaaaacggtcccctctcttcagaaagtatttgctatctctacaatgtattattttcatcactgtgtccctcccctgcccttcttatgccctaatatttgtcccttaattctattaaattagttgtcaactaaaattaaaggtagatgttatccttcacaatctgtcctggtctaatttttcagtcttgattcgtcttctttactttatggagtgtagaggtggctaacagaacaactctggagccacaatgtgtagattcagataccaacagtagcttatgctgaaacctgggtcaaattacttaagctcacatacctcagtttcctcatctacaaaatgaggataataataggttcttcctcacttatatgtaaagcatttaaataaggactagtagatcgtatgtactagctgttattaaattctgccacatttgtttgttctccatacacaccttagccttttgtctatgtctctgttcacattgtttgctggaaacaggatccacccttctcctccaaggccagtgtatgtgtgtccacaaacacacagccatccatgtgttgtgattccacgcacctccgaagatacggctcagagagccaccctctgcttgccagattgagcatagttcatctggaactttcatacacttctctgtcttacttagcatttgcaactatactttatagttattttcaagtttattttgcctcttttgctggtgtgtgaacttcttgagtccatggacttcctgtgataaatttctccctactacaaaaagctcagtgccttgtgctgagctgctgtgcttagtaatagataggggagagggtgtttttttatatctatatacatatatatgtacatatatatgtacacataatttgatatacttttgagtgtacatgatgtggttccttatttttgcattaagcctatcacttccgggcattggcaaagatctgaaaattaaaaggaacacaaataagaaatgcatttagtccatttaagcaacatgtgagttcctcttactgagtttcttccctaatttagatctcaagttttgcaaaagaatgacaaattcctttatttaaagaaaaatgaaagcagatctgttaccttctgtcctatgaatgccaattctctatcctggataattagataaataagatatttataagcgtatggtttatgcacatagacatgaagctctcaatgcctgcatgattttcctgtcatgctcatgtgggttaaagcccaatagatgtattttgaaaactcgaatgccagtatgtctttaaaaagattatatcctgaaataaagttttaacatcctgtatcctatgataaaagttattttgcatttttttctttaccactgaaaacttgcgaggctcaaagtagtttaatttttatatattgaagctactcatttgccatattttaaaaacaaatcataaaacatggtaattggtaatttcacaaattttatcagggaatattttattattacatttttaaaataaaacctgtagatttatttaaaaagcatattttgaactaaagacctgaaatgtgtagcttgtgtagctccatttgaaaagatgaaggttttgctattgtttgcaacagttttgcctgatttttgttttccccttttgctctgtttttgtagttcagtttgttgcagcattgttgtcatgtctaatttttgtttacgttgcactgcacagcactctttcgtatacttaagtaacctttcttgttctgcactgctgaatgacagctcatttattctagggtggtaattgcagtgtagcagacccaggtgagcaatgtaaaaagttgaagcagataaaatgtatgatttcttttataatggtattgtgtgctgtgttctcctcatatagatgctttttgtttacatagagaatatctaggaacaatctacatgttcttcaagatcttttaaaataaatactctttcatttttaaaaaagatgtattcttggccaggcgctgtggctcatgcctgtaatcccagtactttgggaggccgaggcgggtggatcacttgaggtcaggagtttgcgaccagcctggccaacatggtgaaaccctgcctctactaaaaaatacaaaaattagccgggcatagtggcacatgtttgtaatcccaggtactcaggaggttgaggcaggagaatcgcttgaacctggcaagcagaggttgcagcgagctgagatcgcgtcactgcaatccatcctagacaacacagcaaggctgtgtttaaaaaaataaaaagacataattgcaaaagaagtatttcacttcaccctttattataggacagaccacagtgcaagcaagaagataaatggttaacttacaactgacctctgattggagaatactagagagtggtgaagactgtggcaagcaggagggctcaccaacctcccagatttaacccaggctgcatgtaggaatgcagacccagtgttgctaggtctctggaattaagttatatttaactagcctgtgatctctaaggccttcaattatgaggttcagcaccactggaaaactgagtcagtttagtgctttatttcacaaaggcaaattgatggtcctttctgaccctaaattcccagttttacttaaactatttagacaaatctaagaagtgtgtgaaataaatacagtggagcttgaggatttttgttgttgatttctggtccttttatatttcctccttccctctgagggttcacataggagcctccacagccagaggattactttcagaatggaggcaagattatttcttggaattttggtctgaggaaaaattatttaggtcacttggacacttatgttgtgctttcccacaaaattgtctagcattttctttaagacatatgcatgaccactgcccaaacgaaataaatcaccctttctcttaaaggatccagactattaaatatgaagaacatcaactaatttgactagcagaatgtaggccttcagtgttaacatagcctttttctgttattgcatttatctgcctttgttctgaagccccagtctagtacctttcttaatgcagatctctttgagcataatgtttccattaaaccagccagtggatctcatttgctccatacatattcatattaggaaatattattgtacaaagtaaaagatgctagtaaaagatatgctggaacaacatttctgacagtatttgttctgtagttaatgctctgggagcctttttccttcaaactctctattcctagttagggcctcatcatttcttgcctggattattgcagtagcttccaggctggcttcctttatgcccttcataagcatatggctgccagattaatatttttttcaacacagccctgatcctgtcattctacaattgagttcctcacagtctacctgatacagagacagaaggaatgtgataatacaaataataatggtactcacaacaacaataaatgactggtctttgatatttaatctctaatatcaattgtcttgagacaacaaggctttttgaattcaatatcagagggtttaactgtgaggtacttggcatgggtctgaattgcatgtatattgtatgactgattgaaagaagattatctgatacacatgagaagtgtggaggtgggagctgacattttgttagaagtgcatgcctggcattttgatatactattgcacctcctcaaatctttttaacagaaacaaactactttgtgatgatagaatagcataatacaggacagcggaaaaatcttagtgctttttgttctggttttgattttgcaactaaatatgtatgataaataggaaattagtgcattggagcatatgcatctgttaaagcagattgactgcttggttatcacactataaacaacatttttgaagaattttaaaatttataatctctgatataatgttaaatgaaaaataagatacaaagccacacataaagagggttcacatttaagcaccatcacctatacaaaacacacacgcacacagtcacacacacacacatacacacagtcacacacacacttacacacagatacaagtatacatagaaatacaaaccatgaaaataaagttaccaaaacagttgttatcactaaagttttgaatgagtgttttttatttctttattaaccttgttattacttctcatattttctacaatgagtatcactgtttttagttttgtttttgttttttaaatggagtctcactctttctcccaggctggagtgcagtggggctatcttagctcactgcaacctccacctctcgggttcaagcaattctgcctcagcctcctgagtagctgggatgacaggtgcccaccaccacgcctggctaatttttatatttttagtagagacagggtttcactatgttggccaggctgatcttgaactcctaaccaggtgatctgcctgccttggcctcccaaagcgctggtattacaggtgtcagccactgtacccggcgtatcattgttttaatgaatacactgtcttacacgagggcttgcctagctctctcaaaagtctaagaaacaatgaataatattattttatttaaacattatttaaaaacatgaaaacagtgaatacaaagttgaactctcctcttacaataataaaaattcttcttgaataattctgtatcctaccattccatgaattgtatccatggaaaagtgtatgtttttctgattcatttatttatttgcttctaggttattggatgaagaaatctaggaatagaatgaataactgtatagattacacctctgatgcctggtgtgtgtgtgtgtgtgtgtgtgtgtgtgtgtgtttcttcccttgtgattttctctccttttcctgcctaataatgatgtagctgatctgcttatcatgttcctttatttctataattccaattgttgtagatcccatagaggtgttcactcttgctctctctctctcttctctctccctctcacacacacacagattaaatagagaaaattaagtaaagagaggaaaatgaggaataatttcatactttaatatattcattcattcattgctctttgataatttttttcttttttaattttatttttccctaagttattggggtataggtggtatttggttacattagtaagttctttaacggacatttgtgagatcctggtgcacccatcacctgagcagtatacactgcaccatatttgttgtcttttttcccatgctcccctcccactctttccctcaagtccccaaactccattgtatcattcttatgcctttgcgtcctcatagcttagctcccacatatcagtgagaacatacgatgttcggtttcccattcctgagttacttcacttagaataatagtctctaatctcatccaggtcattgcaaatgctgttaattcattcatttttatggctgagcagtattccactgtatatgtatacaccgtagtttctttatccactcattgattgatgggcatttgggttggttccacgatttgctactgtgaattgtgctgctataaacacacgtgtgcaagtatcattttcgaataatgacttcttttcctctgggtagatacccagtagtgggattgctggatcaaatggtaagtagagctctatgatgttttgatactcttctatggcatagacttagtgctcccatgttctaagtgttatgaaaggctgaagataggaatattagaacatggcccccttcctgagttatatagcttagaacaatggtactcaaacttaagaatgtgtaagaattacctaggccatagcacttacacatggaatatcaagagggagaacagactaggagaagacgtttgaattcagctgcccatgtaaagtataaagaattatttttacccagaatcttgaaggggaaggaactgagtcacacagacaagaatgtgcctaaagcaattcagcagttcagagtggaatgaaaaggaccctggttccctgctcttaagccagtgttctttagctggctagaactcagctctctgtttaaaaaatgaatgggttgcagtggagcgctgtgttccaagtaggatttgtaagacttctggaattctgaaaaaattctactggttttctgcctgtttctctgtctatacttgaattcactgaggccaaaaatggtaactttttacccagtagctggcaacattcctggtaattagaaagtgatcagtaaatgctcaatgactatctgaatgattgcatttttcaaaaagaaatctgaagtctaaattttgagccaactaaacatcatatttctttggttttgggtggtttgggaaaaatccaatgtgttctctgaaaggaaaacatatttggagatatgattatttttttctgtaaataaagttactttgttgtaaatataaatatacatgctcattttataaaagaaaatgaaaggagaaaaaagagcaaaatatctgtattgacaccactcataattaccactcataatttttgttttgtttttcttattcacatataggacttttatcatgatatatgtatgaatttatatcctgttatttttctgaaacattatagcataacaggattaagtatcctattacctctacagttcctgatatttataaagataaattatgaaaataatgtttgaatgagaaggtttttctgtttatatgctgttccaaagaaccttaggtatcagaatttatctgagcccaaaaacgtcccttaggtaccttaagctacccaaattctttgaattctttcaatcaaatcccctaattttataaagaggaaattgaaacccaagaaacaatataagtgaatttgtttgaacccaggaatttcagtacttgttgtcctaatttaaaattgtgtcccaaagaatatttatctttgaatttgttgatgtttgctcttttaaaaaggaaagaagaataataaactaattcctcgttttacctttaaaaggaagtttcactggaggaataagacccaaatgaatgaacccccatcagtcattcgtatcccccagctgatgaggatttcagcagttgtgctgacaccttgatcttgggctagccaccctccccttgctctgccatggagcttggtcaccttgtaccatggtcaaaataatggtgctctctttcaaaagccatccttagatttccagctaatagtgtgtagaaaagagaaaacataattttttagtaccccaaattctaggttatctactgcactgaatgatctaaaatatcaagtaggcgctttcagcaaagctgttagaaatataaatagaaaaaataggaaagattatttgtgggaccattcaaactaagactgttgttgttctcattattattgttgtttttaaaggacactgtccatatattgcaagacatgttgcccactgcccttcacctatgggattatataaacgcaatcctattttttaaatagttgtgcagaaaatcgagaagggagctaccttaactgtgtattcagttcttgagtgacaaagacaggcgtgagagagagagtcccttgcttccaaatcacccctcctttgcctcacccttttcaggacaaaccgactaccagaaatgaatctaacccatgtggtcactacaggatttatctgggcatttgctgaacctgctcgcaatttatttttatttcttccgatagacatggatttggcacaggggagtgaattctttttgaagcagcagatgtgcctggtacacccgtttgctgtaaccatttgtgctgtggttgaaaaaaatttttttaagagtgcagaattgttgaagggggagggttaaaaaaccagagccattttagtgattatgcaaagttagaatgtgagtaattttgctgcagttagtcattatgtgctttcatagcttgttttacagggataaagggatgtgtacaggtttggtgaatagagctcttatttgttcctaatagtcactcttcatgaaaacattttctacccttcctcctactctgtggcaaaagtgctctctccttggaaattatacctttctgggatccattccttttatccatctacaatcagtggacagacaactccattttgaagaacaaatacgttagaagaagaatttttttctcctatacaatctacagtgtaactgatacacattcaaatcatcgtaatacagtgatcattataaaatgagagtgttttctgcaaagaggaaaaaaaaaactgagcaaacatctagtgactttgttaggagcttaatgtgctctaaatatgatgtccttcaaatattttatttgaaatatttgataggtcttagaaaattttgctcatggaattctctgagaactgtaacacaccacctattcctttttcgctttgctttcggtcacccaaatttttttagaaatatgtgaacgagggtctgtttgtttccactgaagcaaatatagccacttgctcacactggtggcttcttttactgaagtccgtgaatatgttagaaactcttgtatgaaaatacagcaacccaatttgtccctattgagcctactttgtgatttccatgccctgctgcctggtgtgtatacactgagatccactttgttaaagaacaaaactgggtttgttacttttttgtaggcttattattaagtctgagcattctggtgtgaggttaggaacgctggtttcagactctggaaaacagagttctaatcctgaccctctgaagaccttctcactttgggcaaatctttcctgagccttgtttccttgaggaaaatgtagagatgtgtgatattcacatttcttacgccctacagttatgtgaggaatactgtatgtttcagttatgcacagataaattagttatttcttctcaaagaatcctctgttaaaaattattccccaaatagctctttttcgacacttgtctcaaggtggtcacattttaatttctgccactgatacacaaatttcagtgataagaaacccctgaatgacttgagagtttcctgagagatgggatcccacctattttattatcttttgtctttttatggcttccgagtagcagtaaaagataggaatggttggttctattacagtagttgattataaccaaaaactagtgaaccacactctccaaatgtcctgctacctacagctaagaaacccaatgtttataaactaactcagaacttttaaaattagattgaactacagaaccctctatcatacttaaatcttcttagatgaatggtgcacaaaactgatgggggatgggaagtgtgggcaattctgttaccgaactatttcccttattgtttcatttgattaaacacttctctcttgtatggaatttgccaataatacattattgaaaaaactgatttcaataatatgttattgaaaaaactaatttattgaataaaaacatatggaaaaatctctttgctagaccctaaggatggaaagcccaaatttctacccacatggagtttagagaggaaaggaacactaaataagtaattgcaaaacaagacgtaagggttatcataaggataatgcaaactattaaagagacattaatggtgggcaccttgtctaattttggaggttccagattggcttcctaaaggaggcatcatttcgtttgaaatctgaaggatgaataaccagttagaagttgcgagatggaagcaggttggaaagtgttcaaatcagggcaaccacaggatagctggagtgttgactcctgtgtagaggaaagtaagagaggaggctaagaagataaacagtagttctatcaggaaagaatttggacttcatggtaagagcaatgagaactcttgagagattttaatacaggaaggcaatgatcatatttgagttcttaaaatttgattttagaatagagtacgtactagaggacaataagcagtcagtttctttaaaaatacacatatacgtgtgtatgtgtttgttgcagtaagctaggtcactaatcatagtggactggactagggcaccaataagttaatagaagtagaaacattgacggtaactagtagagagaattaacaagctttactgcatcaagaggagaaaaaaaattgtgatcacgtttataacatataatcacattgctaaaatctttaaaatatctgttaaccttgaaacataactgatttatatagtttttgtcaatatacatatgaaccattatcttacttttcttttaaactggtatttcgaattaatgttttctggctttccagctgcataccattccattagctcaatgttctaggattttctcaaccatcctctgatttttcctttaatataaacaagtaaaatcacttatgtgcgttttaatagctcttcattgcaagtttgtccaccaaaagaatcatttcaattttcagtgctaccagtcatataaaaacgcacctgtaatattcccactgggattgagttttattatttcttgcctaattggttgaactcacagtatttttcactaaacccctggcctgattggagaaaagtgtctggtcccttgaggagatgcttcagcaaacgaggtcgcttgttatggaaataggctcttctctcactacatttctagatgatagaacacactcagattgatttcaccttcatcacaatggcattttatccagtgctggacacatgcatgctaagaactgagtgtactgtatgggtatttataatacccatattcattctaggaaataattatacatggctgggtatttacataaacaggagccttggagacctctcaagttcaaaaccgatggcattctatctcatttgaaagtcattggggtgggagaggacactccttaaaatattggatttcttagttttaatctgatgatatgctagctttatgaagatgtgagtgcaggccctcacctggatcgttgcttctctttttaataggaactagaaaatgaagattttcaaggtagcatctgggtgctcctaattgacttgattttatgtttgagaaaactaccttgacataccaacattggggtctctagaagtccagggagatgtttttcttcacagtgtcatataccctatcataagtgttgtgaggattaaatggaaaagcttctgggacaaaaactgctctgaagtgccacaccagactatactgttttaactatttctggctctgaagctattaagaataacccgtcactagcagagcacaaggctgtgaaatgaataagtgctgatacatttcaaagaagtaagatatttatgtgtgcatctctctggcaaaaactatcggggactcgttaggggtgtgtgtgtgtgtgtgtgtgtgtgtgtgtgtgtgtgtggtgtgtgctttatgtgttcattgaggactaaaaattagtattagtagtatattggcagcaatgttttgaactcggtggcaccaactaaaattgtgtgatttttatttcgtgcataatatttgagattattttaactcatcaccagatttcagctactatttatcctcatttataaggttactttttttctttaatgtggaaaataaacaaaaacataaaatggagaacaaaattttctcttaactgcctcacctagtgtaaaactgtaaccttttaaaatacattgaaaccatttttaattttctgctatgcttcttcctttttttgtatgtacatacacatggacattggaataccacaatattttagagtgtgtttgcttggtttttaaaataatgtatatatttctgatatatattatgttaaatatatatttatttttatacatttatatataagaaatgtataatatatactatgcctatataatatatatttcttcctttgagtgaaaaagtaatatgtggtagacacttagcaaaataggaaaagtatatagaatagccaaaaataacccctttaaaataaccaatgttatcagttgggaatagatccttctagccatatatgtatgcatatgtatatatgagatatagatagatgcattacttatcaacaggtataaaacaatattttctaactgaattttaaaacaaagaaaaattttgatacatattattatttttattatatagtggtaaaatatacataatacagaatttcacattctaaccaattttaagcgtataattcactggcactaagtacatttacattgttgtgcaaccatcaccagcagaactgtatctattcaaactgaaatgacatatccattaaacaataatgcactagctacattcttccttctcccatcccatggcaatcaccattctgctttctagctttataaatttgactcttctaggggcctcctatatgtagaaccatatggtatttgttttttgttttttgtttttgtaactggcttgtttcttcaagcttcaagcttaatctcttcaagcttcatctatgttgtagcatgtatcagaattttcttattacattgtgtgtgtgtatatatatgtatagatatatagatagatatagatgtgtgtgtgtatatatatatatcacattttatttatccattcatccatcagtggacacttgaattgcttcttcctttggctattgtgaataatactgctatgaacatattaccatgattgtacaaatagctgcattcctgcttttagttattttaggtatctacccagaagttgaattgccagattattgatatattttgaaatatttttatggcattgttttaatgactgtgtagtattctattatatgactatactgtaatgtatataaacaatcctcatgtattgattatttaaattttccattatcttttagttttataaagtacactattaacacggagcttcttgaaactaaacatttatgctctctggtcatttccataggctaaattttaagaaatgaaactatgggtttaaaaagtataaactttattagggcttttgttacatatcaccaaattacaccactgatttcccataaaaattttatagaaacaaacattaacttcgtccctaaatctaaattatataatcagttttccttctaagacaagtggagtcacaccattatgtcactcatagcccctaactccaagtgggatttcctgttcggctttagcaacagtatctaaaagtagttttgaactctggttttaactgacaatcacctgccccttcccttttgaatttccagatttcactctgttgagtgggtttatctacaataacttgcatttaaaaagccctaaatgattctgttgtgcagtcagatttaagaaatgcttttctaaatgtgtggtattatgtttatatatcgcactcttggccaggtgtggtggctcacgcctgtaatcccaacattttgggaggccaaggcagatggatcacttgaggtcaggagttccagaccagcctggacaacacagtgaaaaccccatctttactaaaaacacaaaatgagctggcgtggtggtgggtgcctataatcccagctatttgagaggctttgacacaagaattccttgaacacgcgaggcagaggttgcagtgagctgagatagtgccactgcactccagcctgggtgacagagcaagactctatctcaaatatatatatatatatatacacacacatatacatatacacacacacacatatatatagcattcttaatctcatatatatataatatatataaaatatatatatataatatatatatatgacattcttaatctgttaggttgttttccaactcatggggtcatctatcaagtggatagtgtaagtggcctggttggatgaggaatggagatatgggtacttaccctgaattatggaagataattagtgagatgactcaagaaagcaaatttagttattcttctagtcatggttaggataaaatgatgatgtaatttttgcatagagccaaaagaagcagcaaattagggatttcattataactgaaataggttagctgtgtttccatttttgctcattgtacaaactcagaaaccaattatatttatttatccagccattatttattaagtgcctacctgatatgaatccctaataatgagaccaagctcttcttgggcaataaaactctgaatattgcacatttactcttggaatcactggatttttgagagtcagagtatcttcttttataggtacctcgaccccagtgaagctctttttttttctcctgagtgatatagaaatatttttttatttgaagagaaagattatttattaaaaaaaaaaaaaaggagaagagtaacttagcatttcccctcctttgttgttcagatgaagagtcagtctagagaagtcacgtgactttcccaatgtcactaaattctaaacagtggtaaagctggcactttttttctcggtctcccaagttccagtgcacaactcttcaattgcatgcttcctagtgatacttacatttgccagtatccataacttcaactgggaattgtaaagtgcacctcatgcactacaggtgacctgcagaaattgttttatttctcttccttgtgtttgaaataataataataataataataataataataataataataataatgaacacagctttaaagtcagaagagtaatattggatttatattccacatgtcagcagtgagctggcatgggatagcagctgcctttttaacagagtaaactcttcagctttatagttcacatcactttgttgtttcctagacactggcattctcattttctgttcattctccaatttattcaatttttcttctaggagagagaaagattttccagtgtctacattttgatcacttatctcttaaaaataggaaaactacggatagactgataaagaattttgtggttttttttttttaacatgtcaactattatatttcactgttttattacctgagagaggtggatggtttttaaaaccccaaactatgcagccagatgacccaggcttgaaccttcgatctgccacctactagtgatgtgtccttgggcagttacttaatctctcgtcaatatcttcttctggaaaatgaggattggtttccgtctcaggagtaactgtgaggattatatataaattatgttcaacacaaaatgtttgcaccaggtaatttctatataaatgtttgctattattacacatttttggggttaccaataggtattttagcttgtgttttctgccacagggatgtccagacaaagtagataactgaaagtgaaaagcacttgaggtattcttcaaataactcaaataattgtcatgaaaatataattgaaatggaaatattcatcatcttaatcttctagcaagtcaaccatcccccttttgatattttgtatattccttggccatatgaaaatatcattctctatggcctcaattgtattgtacaaatgaattcacatcatgtgtttttcatttaaaatttacatttaaatcttaagcagtttcccatgtcatgtagctgaaattaaaatgtaataaaatgattttgaatttcgtgctgctgtttaaacgttgaccttttgctactgtctattttctccttctgttacattggaaaattttctaagtagaaatcacttttactcatcacactaaattttgccccaaatattctgtaactaagaactttctgagtgcaatgagtgtgactttctttgtctcatagtgaatctagtaagcagctcaatgcctgttacatagtagactttcaataaatttctattgaataaataatttggattgaatttctgggatttgtggtattgtgtttacttggcagtaaattcagaatgtactttgttttagtacatgttgttaaatactatttttaaatgcattcgtctctttcctttcttagtaagtttatttaaaaattgccctttatttccagaggggatttgagtcagcatcaagtaaaacttacacatatagtatggccataaaaatgaaaacaagtacctcaaagtcttcctggaaaaataatagtatcaatacattccaaattaaaatcattaaactatttagaggtggaggggcactaatgagatgactgtaattaggcacacattacatattttacagaatttcttgattgtcaagtcaataaggaaaataagatagttcatattttttcatggtcagttataatctgaccaaagaaatgcatttttcttgggatattaaccttcattcattcatcaaatatttgttaaatgccagcttatgggctatgatatgatgaagcataatgaggaagcagcagggaataaaaaggacagtctctactagtatagaagcagacatatgcacatgtgatatgtacagggagggagaagtaaagagcacccactgtgctggaggattcaggcaaagtttcacggaggaacctgacattcagcttgagatgtaagacattcctaggaatcagctagataattcaaagacaatggagaagtgcattggtgtaggtatcattgttgagatgtgagagagcttggcacaatagacatgaaagaaggtcaatgtatctcaaagagaggtagaagaggtggatttgcatccatcattcccctaacctgttgaagatttttgagcaggaaagcaatatgattagatttgcatttgcaataaatcactctggctaccaaatgaaggactcattgaaaaacagtcgtggacattgggagaccagtttggatgtttttagagaattcataatgaaaaatggtggaatcttggcatgggattgtagtagtggaaatggtaaaatgtggacatatttgtgagttatggaattccctatttagagagtaggagcaacaggatttagttcttgaatggaaagtaggcagtctcagaaatgattcccagtgttctcctttgagcaacaactgggtggatgagaaaaccaaatgaaaagcagatcagggtggatgatgaaatctgtttttaatatattgagtctgaaaagcatatgagacattcaagcagacacatgaaatagacagttgaggatttgggcttagtattcagaatacagatgaattctggagacagaaattctaaagtcttcataacatagaaggtatatcacgttgtggccatggtcctggagacaatcgagagacaaaagcagagatctggtgtcaaataaagggaatcattattcagcggctattgagcaatatattgggtattgtcattagtaacaatttcacagaaagatttaagaagcattttatttttcgtaagataatattccatttgatgcagatagatagctttctggtaaactaggttgatccagagataaagattaaaaaattcccagggacatttggttaacattttacttccaatggttctcaactagagaggaaaccacctcctgatggggagtttggaaatgaatgggcacatttttataaactgtcacaatgactggaggacactgttatcatttatcgggtagggagcaaaatacattactgtcaaactcaagaagaccatagtactctgttgagagacactgataaactcttgtgccacatatgtttctctggcttgctgattgtgaagttccgagctgactgtcaagaacggtcacagaccttctctagattttcacctccacagtactctctttgtcctgaacctagaggagatgacggctctgcctctgctagttccatattatttccctgtccttcgtgactcctctgcaattacatggggccatgtacataatacctgtgtaaatcagatccttgagaagacctagttggtgtgtgctgtcatttttatttgaatcctgactcttatggctatcttttccacatatcatttgtctcaaatatagtttcctagggatctcatagttccagatttagcttcctgttaagttacaagaagctggatagagtggtatctttttgtttggttggtttttgtgttttgttttgttctgtttttttggatattcgtctttaaaagggtaaacttgtcatttacttttgtaatttaagcagcctggatattcttgtcttgttggtggaggggctttacctttctgcttgaaggtggtcccaatagtactaaatagaaacatagtttcctcattaagcaatttattaaaatatgtatgttcaagacattcctaaaaaatactcagttaagactccaacattctattacagaggacgtggaaaaggcgttttgaacctagaaaaaatttaaggtcagatttttctcgtcaataatgccagtcataaaaaagtcagcgtagatgggcattgaatgaaagagggaataaagctttgcttttctttgatgactcaagatcagcagaaacccagagttcctattttgaacactttacaaacccaactataaatggagacagtgactgagcaactgggctgatgacaggcatgctctctgctgcagctgtaaagtctgccccaagaaagcagttcaaaatttgcatagtttgaaattgaaaaccaataacattcattaacaaaaaagaatatagacctaactccttaaaagtaactttttttttataagtttcttctttcagtctctttcttggtgaagacacacacacacacacacacacacacacacacacacacacacacacacactatttaaacatcctgaagtttttgaattaaagcaacagggcacaatttcaggcagccattgctttcttctaggaaatacctcactattagagctctctttggagatgagaagatttttctcacctttattatgaatcccattgtgtatgtgtgagcacgtttctgaatattttacatattataactgtatgtttgaaaatagaagatatatatatatatatatatatatatatatatatatatatatatataatttttttttcctttgcagttttacgtgccttacatcacgggagctggaaggggtagagaataggaataattttaaagcatatttatttatgttcttcatggttaaagaaaactatgccaacattcttctggcccacatattcaattaaatacatagtgaatcttttctacttactggattatttggtgcttccaagcatttatttttggcatttcatttcgtttttgtttttgcaggaatttttgaagttttattatgatttaacatttttattttgaaaatcgagcacattttaaaaattactctgctgtagctgtagtctgcccccaaaaacagatacttcaaaattcacctattttgaaaataaaaatgcaggtatagaaatttacatatacagattacttatttatctatgatttgttatgtgtatataaatctatttatacaatcatctataaatacagatatgcaaatatgttattttttgagacttaaatgtctgtagcaatcctttttttatgtggtatttttccattagtcattttctaagcctcttcaacatgtaaagctctgtgaggttaatggggggagagtggtgtcctaggatgatgaatagtgtgtctctccctgtcccccagtctggtagagaagctgtgcacaatagattagaccaaatagatttctacattttcaatcagaattagctgtggccaggagataagaacagacaaggtgcacccctgtgtgtctgccttctctcttggagcaggccctccacttccccttttgtttaagttcagataacatgttacattgtttatgtcactattcttcatgaccaattgtcacaaaacttttcctctatgttacttcttttagaagttttagtttcaggcctttctcatctttaaatcattaacccagttttagttaatgatgtcagataagggtccaatatcattcttttgtatgtgtatttctagtttccctaacatcatctattgaagaaattttctttacctatcatctattctttgccccctcatcaaaaatcaattgactgtatacacgtggatatatttccgggctctctgttctgttctgttggtctgtatatcttgtttttcatgccagtaccatactgttttgattactatagctttgtaatatattttgaaattaggaattgtaatgcctccggctttgttcttggcttcaagattgataaggctttttgtggtcttttgtggttccatgtgagttttagaattgttttttctatgtatgtaaaacttcattttggtatttagatagggatctcactgcatctatagataactttgggtaggatatacattctaacaatatcaagtctttcaacctatgaacacagatgtttatccgtttgtttgtgtcttgtataatttctttcaccgatgtttaatagttttcagtatataatctttctcctccttagataacttttttccaagttttttatgctactgtaagtagaattttttcctttctttccttttctgctattcgtcggcagtgcacagatatacaactgatttttgtgttcatctgtgaacactttgaaggcaagattatgccttatttgtgttctacatagtaataaataataattagcagttattaatatttttcatttattcatttttattgagtttcgttggcagtaatttttgctttctttctttcttttttttcctattctttttagagctccactggttcaacagcctctcctccagtttcgaccccagtcacaggacacaagagaatggtcatcccgaaccaaccccctctaacagcaaccaagaagtctacattgaaaccacagcctgcaccccaggctggacccatccctgtggctccaatcggaacactcaaaccccagcctcagccagtcccagcctcctacaccacggcctccacttcttcaaggcctacctttaatgtgcaggtgaagtcagcccagcccagccctcattatatggctgccccttcatcaggacaaatttatggctcagggccccagggctataacactcagccagttcctgtctctgggcagtgtccacctccttcaacacggggaggcatggattatgcctacattccaccaccaggacttcagccggagcctgggtatgggtatgcccccaaccagggacgctattatgaaggctactatgcagcagggccaggctatgggggcagaaatgactctgatcctacctatggtcaacaaggtcacccaaatacctggaaacgggaaccagggtacactcctcctggagcagggaaccagaaccctcctgggatgtatccagtcactggtcccaagaagacctatatcacagatcctgtttcagccccctgtgcgccaccattgcagccaaaggtaagaaactcagtaacataaggaggagaatacaggggtgcctatcttagtctgccttccccaggaagcgaagcctaaggcaaaagtgtgtgtgttacttttatttcactgacaaatacaatcccagggaaggatgagtgaagccagagaggagagagagactacttagtatgttactaatatggccactgtttagtatcaaatggaattgcttgctcaatctcagagaatcatcttccaaagcccacagacaccatagcatctgaggacaaagtgttctgatggagaaagagaaaataatttatttttcacatccttccctatattggttaaagcttccctctgttgtgcagaaacttcctctacaccttgcatttgcttggacattaaacaggtctgtagtatctcaagcctcagcaagggtagtgatctatgggtgagacatgtggagggcaaaactgagtgaactgctgtcaggctgtggccctgtgaaggcgattataactcccgcaatgttggtaccacagcggttgctgggccagaacaagtggccaaggacccaggaaatgggtgaggccaagcaggtctaagataatgcaaatgccttggacagtttctcctttgagaaggggctgcagtataatgcagcttgtttgtgaccccttgtttattcattttactaatcctccagaaagaatcttattcttcagcctttagcactattaagcaatgtttaaaaactccttatgagtgacagttacttcttatttgatttaattgtccatatgtggaccttttaagttaacactctctgttacttcgtctgaataggtaaggtgtaatactacacatgcccactcaccacaacttggatttttcattagtactggaaccaacacgatgttgattcctcccattatgactagaggaaccaataagaataacttggaatcggtgaaaatagaggaactgagccagtttccagccacttgggttggaagagtgcccttgcttcttttcagttagaactgtgagaaatcagaaatttgagagccctcaattagctagaagttcaatggtagttttgggggatggattgggtagaagtttggactgtatttttaaaaattctttccacatttttacaagattgtccatttcaagacagatctattcacatattcaacattgtatcaaaaatttccttatagggtatttactaaactgtttttcttatatgaaagcgtctgccatattaatggtgtcctatgtgaatttcacattctataggggaatagagctcttcctgacagtggggactgtgaagagctggagaaatcctatagccttatgtgtgaccactatatgaaattggccagccatgatccctttccgatagatagattccaaattagaattttaaatgattttaaacatgactcagtttcttaagtctctctatgaaaagaaatgttattacagttttttatttctttttaaaatgaatttgtccataatagccaatctggacagccttgctctttgttaatgtcgcagtatatttgcaccagtgcctcctggcccagtcaaggggagtctattttcaaaacaaccagttcagagaaacagattattcaacttaaccacagtttttgttttcaacaattgcaacagatttacccagggaagattacagtaaaataaaattttaggtcagaacaactgctgtcaaggtttaagttcaactagacagacaatttagccctgcccaaaacagggtgactgaaaggatggctgagtgatgttcctgaaggaatgacatggtgtctgccttgttggaggattgtgttatcccacataggaaccagacatgagagaaagcaaaactatgtgtcttgatgagactcacctggtgagaggtactgagctagtcttcagatgttgttttctcactaagtcactgggcactctggccagcctctcttcagcatttggaacccatccattggtgtaggaaaaagaatcagcccccactgctagaactggatctaaagtgctgggtccagccacatccctaacatttggcctgtcctcaccaactgacacagggagatggaatgaatttttataaaccactcatcagaaaacatggaactttattttacttcttatttgagcaaggtggttattcaagatgatctattagatgattacagattttggatgtcagtagatttcatgttatttttaaaatttttgatatatttgtttttcaacagtttcatgtgttttcacatcatattcggctgtgcattgaaaaaatgaaaatcaaaccatgtacttttcactctgattattaagagtggttagaggttgatatttagccatctgtcctgtctgtgctttgggaaagggggaagaggctgatgaagttatggataaattctgggcgcgttgtgagggcattggctgatgaaagggtgggttccttcacagttggcctttgagcaaaacactactgtattctactgcacctgtgcacagaggaccttattgtccttatattgactgtttggcttaattatgtgactacgggcatgagaaatgagctccgaattcttatcccagttctttccttgacattcctcttccagtttgaggaaaacctctagacctctttatgtcatgcttcaaacctcagtaaagtagaacaccatctttactaattaattaatgattgcaaaaggcttggaaatttccaaaggctgaataattgccaagtgaagactattcagctttccactcgctttcatttatttttaattttttttagtcactgatggaaaacttaccctcatgtctgaaaacaattatactttattacattgagtgcttctggggagtttggcatttaacccattaaggaaaaagtttaaaagatgaaataaataaatctcccttatatttgagatgagctgctttagttttcctatatcaggatagtataaaaagaggaatatgatatagtaaaaaagaggagagacaggatggggaaaaggagaaaggaaagaaaaaatgaaaaggaaaaaatgaagaaaggaaagaggcagaatgagaacctgcaaggcttaggggatcatgattatgtttatgttcccataatgtgctaagcagtgaatttgcatgctacagtgggccatactgtatttcctataccatctgagcagagttccttgaaaaatagtgttataaataagtctttataaggtagaaatgttctcttctcactggaaatcctcttaaagatgcagtggaatctcttctctttgctgatttataaaagctaatgtcagctacatcttgccatgtagttcacagaactcgtgtcctgtgcattttatatatctatatctatacctatatctatatctatatctatatctatatctatatctatatctatatctatatatatcgctgtgagttgggagccacgttttctccagtatttagataaggtggctcagcttgaaagttccagtgctaggacctggaagctagtcacaactctcaagtctaaagtgaccaggcaactttagcctccaattatcataaaaactcatctccgtcagcctcagctattaaagggacaggtatttgctacataatgtgtagaagtgctggggctgtgcattccagggaagttggagaatcttgtcccaattagtgtagaggttatgttaaattctgaaaccatctactattaaaattttcttggaaaatatttcaggaagatgagaccttggaggtcaactaaccatctttcagtaaatctaaaagtttttcttttccagaattagaacagattgttgcttttcatttggatttcgagtttggggcatattttatgggtcagagaagagtgtagaggtaatgaactgttgtggtcagtgttgaaggactttaagatctgtaatttctgttaagattaaggaaacagagaatgttcatacactaccactttgaacattccagtagtatgagaatatttaaattaattttatttatttatttatttatttatttatttatttattttttgagagggagtcccattctgtcacccaggctggggtgcaatgacgtgatctcggctcactgcaacctccacctcccgggttcaagtgattctcctgcctcagcctgccaagtagctgggattacaggctcccgccaccacgcctggctaactttttatatttttagtagagacagggtttcaccatgttggccaggctggtctcaaactcctgacctcacgtaatctacccatctcgacctcccaaagtgctgggattacaggtgtgatcccaccatgcccagcctgttttaatttttgaaaagagaaagttatatacattgattgcactctaaagaattgttggcatttggagagagttatccgtatggtaatccctgtgttaattatgtctcaattctaggatcagagaaacaaaatggaagagatgattagggtgggcagaggaatgaatgcagatagatccctcaagtcagtagctaacactagaatacatgtgaagatgagaatggtagatattgcttgaggccagtgactgtaatattagtaattcctctttgtacagactttttagtttccaaagcactttgtggagctcacaaaatccatgatcattaagcccaagtagaggtctttgtctttctttttctgatgagggttcaaaagcccagtgatgagagccactcacttaacgtcatatgtcaaattcatcggacagccacagctccaagtcaggtcttctaaagattgttcccatgctttgaccgtggcaagtgactgaatgttggcatgctttggatggcaggagctcctcatcagcgccagtgtacatggctccactgtgacccatgttacctgcagagattaaagtgggcttaggcagtcatcatggcctttggataaaatcagcggttggaggggaagcacccattaaatccctgcctggcacccaggcctggtgccttagagctatacttccccatccccatcagtcacataaaatttgtcccgaggttctttctaccttcactaagtacttaatatggagttcagtcatccccatttctcacttgaaccattgaaatggcctcttacttagggtttcctctggcagtcatctctgtacccatacatcctacatgtaataccagattaatctttctatggtaccttatcattaattgccttttgcaaaaaccttaataagttcccaaccagttgcagaatacattgaaatcccaaactggatttctagttttatctctccccagtatcctggattccagctgatatgttacatttttagttaattctcacctctatggctttgctcaccaagttccttcttcccagtccttccccaaataaaatctacacatctaaaagtgacccattaagatccagctacagtgttaatttctcccataaggttttctcctcttcctaaaagctagttgtgtgttatttcaccctctcttttagatgttttcactcttttactgtactggagtcatttgtgttcctgtcttctatcaacctatatccaagcatatattagactaagttttaggagaatatcctatgtttctagaaacatatgtatgtagtaactatatgcttagttatttagcagaggtttattgaacattgtgttcactttgaagaattttggtagacactctgtagggccctattagtgtttaagacattgtacagctcaggtgcattttcctttaaggatgcatttaacctgctagatgtcatctcatttttaagaccagagaaaaagagagcagcatctgttgtttcttgactttttaataatagccattctgactggtgtgagagatggtatctcattgttgttttgatttgcattcctctaatgatcagtgatgttgaactttttttcatatgtttgttgaccgcataaatgtcttattttgggaggtggctgctcataccctttgtccactttttgatgaggttgtttgtttttctcttgtaaatttgtttaagttccttgtatattctcgatattagacctgtgtcagatgggtagattgcaaaaattttctcccattctgtaggttgcctattcactctgatgatagtttcttttgcaaaagctctttagtttagttacatcccatttgtcaattttggcttttgttgcaattgcttttggcgttttcatcatgaagccgttgcccatgcctgtgtcctgaatggtactgcctaggttttctcctagggtttttatgcttgcttttgggttttacatttaagtatttaatccatcttgagttaatttttgtataaggtgtaaggaagtagtccagttttagttttctgcatacagctagccagtttttctagcaccatttattgagtaggaaatcctttccccattgcttgtttttgtcaggtttgtcgaagatcagatggttgtagatgtgtggtgtaatttctgaggtctctgttctgtttcattggtctatatgtctgtttcagtaccagtaccatgttgttttggttactgtagccttgtagtatagtttgaagtcaggtagcatgatgcctccagctttgttctttttgcttgggattgccttgtctgtacaggctctttttcatttctatgggtttttttcatttccgtatacgttttagcatcagtttgttgttgtccacaaaataggctgctatgatttggagattaccttgaatctttagatcaatttgaaaagagccgatacgttaacaatactgggtttttcaatccatgaagatggcctatctcttaatttatgtatgtcttctctaatttctctcatctacatatcatagttttgcatatattttggtaaacttgtccttaagcacttcaaatattggatgctattgtaaatggtattttaaaatttgtttataatcatttgttattagcatatagaaatagcaatagatttttatatactccctttgtatcctataacttgttaaatgtaatagttgtactagcttctttaataagacttcttaggcaattctacctgatcattttatctgaaaattgttgatgcaattgtttatttcctttatggataagcctattcatcaacattttatgtttgaaagatttgcttgctgattgaaaaagaaacagcgtgatacaactttaaaggaaataagttggaaaaaataagaacctttcctctccacttccataggctagcctacgtaaaccatcagacatagaagcgattttcagaatcataagtcttaaccccttacatttacagatgagaaaactgaggcctgaagagttacagtgactttcagagttatgtggttagtaaatgacctcatgtgaatgcaaaatgtaactcttctattctgcagttcttctctacattggttaaggatagttcaagacagaggaggtcagaagtaagtgacctttaaaaggtgtaataataactattgtcaggatgatcttatttcctatctttagaaccccatcatcagttttgtaaggccactgaataatagaaaatggttccgattctggtgctccctattctgtctcacagctgctcctgtgaaaacactcgttcatgggctctgtgtaattttgactcagtccataatctctctatcctgattttaaaagttatcatcagaatggatgtgctggtatactaagaaatgtctgtgaatattatttatttattttacttatctaatcattttcatagatttggttgtttaaaaataccccaggtctcaaatccctttggaaagttcagcaaatcattttaacaggtaattctggcaatatgtaattctttgtgtttacagagtgagagaaattctatttatcagtgttttttctttgttttgttttacttcagttctaagcaaagcagttattttgcttattgacatattgatatattcctttgggaatctcatttctttcttggccagctacaaacactcatactgtccaatttcaacaagagactatggttattctcttcttcaccaaacaaagaaatttgaaccattattgataaataatttctggtgaatattaaagctttgaaatgttttgcacacacagtgttaggaagtgtcttagagtgaaagacactatttttactactatagtatcaaaagtgccattgtcccacatacaaagatttacttgttaccttagttctttgatttttctggagtacagcaaccccaacttttagaagtactcttaacaaatgatacagtgtttgatctgtttcatctttggacttcagagaatgatcttcaaataatacagtttggtttatttcagaaggttgcttccttaaaacaaaattttgaaaatatgagataataacatttaacttctttttcaatcacttataaaatttacgaaacactctcatataagaaaaactctgtaagttgttcagaggcaacttctttagtatcctaccaatactgaatacctaagggagggtaagaactgacgtcgcctcactgccagcccagtgttctttccactctgtgaaacttgcctccatttgtagctgtctgtgtttgtatatattagctctattttgtgtagagttgtccaaacataaaatattcctttggcgcagagtttagagactaaaacttctgagtagtatttccgggacataacatatatttaacattatttgaaacccaagattcagtcaacattgctattaagagttaaggagctgaaactgtgcataccctaagtctgaattcaaggtaagaggtcccttgttattcagtctttataagtgtttggtatatttatgcctcctcaaatatgacaccatctttttttaaattcacatttaaagatgattgtaaaacaagaaggataaggtgtaagtgtggtagttgttttatttatggatttatcagttagctgttacttattttttgtggttcataatgcaattttaacataagtctgaataagtttactatagatgatattagtaggttttaccagaggaaaccatgcttttttattttatttttttctttttctttgagacagagtgtcactcttgtcgcccaggctggagtgcagtggtgcaatctgggctcactgcaacctctgcctcccgggttcaagtgattctcctgcctcagcctcccaagtagctgggattacaggcatctgccaccaggcccagctaatttttgtatttttggtagagacggggttttaccatgttggctaggttggtctcaaactcctgacctcaggtgatccactcaccttggcctcccaaagtgttgggattacaggtgtgagccaccacgcctggacagaaaccatgctttataatcctgctacccaccccatccaaagcacacaaaatattagttaagtaagctactagaagacaactgaggctggtggtctctgcaggggcagaaaaatgggaactggagaggagttcaggaaggcagcccagagaatatgaagcaggacccagcacacaacagcctgtgggccacatgtcacttgccacctgattttgtaaataatgtttgcttgaaatacagccatactcgcttcattccatattatcaatggctgctctcacactataacagcagagctgagaagatgcaacagagaccgtatggcctacagatattaaaacattttctgtatatcattttacagaaaaacattgttgactgctggtcaaaaatatgggaagaacgtcatgaaatttagattcttattaaaagttcttgaacatccctgaactatttaatattatttcttgtccagcagatcctgaatcttaaattagaagttgtgacagtaagtggaaattttcagggaaggaagaacagaatatcaaaatcaaaaattaacatgctatgtgcagagtaggttctatatccctcctttttttcccaccctggtaaactcttatttaaacttcaagatctgtctctaatattaacttcttggagaagtttgaccattcttccagttcccacatattattagcttatctttcctctgattttttctcatagcattttttcattcatttactaaaatatgcactaaaatatgcacctcattcagtatttttatataataacattttaagataatttgcatacagtataattcgcccatttaaattaaatggcgattaaattaatttaatttaacacaattaaattatttttagtatattcacagtatattttactgtattcttaaatatagtatatgtgcaatcattatcacaatcaatttctttacaccaggaagaaatcctctaccaatgagcagtgacttttctttttccccaaaccctctaagtctaggtaaccatgaatttaatatctgtatctacagatttaacaattttggacatttggaataatactatatatagtcttttgttactggattcttagtataatattttcaatttccattcatgttgtagcatatgtgattgctgtattcctttttattgctgaataatattccattgtatgaatacatcacattatatttatattttcatcaattgatgaacatttgaggtttttctatcttttggctattataaataatgcttctatcaatatttgagtagacatatgttttcagttttcttgggtatacacctaaaagtgggattgctgagtcacatggtaatttaatgttcaacattttgaggaactgctgaaatgctttccaatggggctaccccattttccattcccaccagcagggtatgaggatctcattttctctgcaacctcccaccgcatttgattttattcatattatgtgtctatctctcaaatacaaatccatgttcttcaagagtggaaaccatgtctgtttcagttttgtttctgtatgcctaatatagtacattgcatgtatcaggcactcatgaataaatgaaagagtcaaccaacaagtgaaataacacctactgaattgacatggaaccacatagagttcctattatcaagagttgttgggttgatgggtgcagaaaaccaccatggcatgtgtatacctgtgttaagaaacctgcacattctgcacgtgtaccccagaacttaaattttttgaaaaaagcaattttattccaaaaaaaaaaaagagtcgtttatgtgggcttaaatagctgtgcttttataaatgttcttttttttaatttcagcttttattttagatacaggggatacgtgtgtgggattactacatgggtaattggacccaggtggtaagcatagtatccaataggtaatttttcagactgtgccctctcccttcctccccgtctggtagtctgtggtgtctgttattctcaagtttatgtccatgtgtgctcagtgtttagctcccactcataagtgagaatatgtggtatttggctttctgtccctgcatcaatttgcttaggattatggcctctagctccatctatgttgctgcaaaggacatgatttcatgattttttttgactgcacagtatttcatagtttatatgtaccacatttttttaaatctagtctaccatttccagctatgttcttcatctttctaccattcacatcctagtgcgtgtaaccgataaattagtattcatttagatggactccattttattttattttattttattttgagatggggtctcattctgtcgcccaggctggattgcagtggtgcagtcttggcttactataacctccgcctctgggttcaagtgattctcctgcctcagcctcctgagtagctgggattacaggcatgcaccaccacgcccagctactttttgtatgtttagtagagatggggtttcgcattgttagccaggctggtctcaaactcctgacctcaggtgatccacccactctggccacccgaagtgctgggattacaggctgggattacaccactattttttaatggcattttagcagttaaaaactgaatgctctaaaagtcagggatggcatgggcacaggtgaaagatgaaagttttgtctatttctatttctatgatgaaatcagttgggttaacaagagcattcttctaagcagctagagattctgttggtctcatccagccatcacccagatggcaatacaaccagtaaaaggcagataatggtatctgtttttgcagactttatgttcacaccagtgtcactcatcttaacctggactcttgtcatcagcttgatatttcctcactttcctctttctccccttttcaagttatagctgtgccttgacatgacttacccaatactctgtattctcttcgtgttcattaataggctcattttccagaactaacattggggcatttcaaggactttttacgtagcacatgagctgcttacaacgtaattctgtctagttgggacatatgtcatttagccagattgtttatggcattaccacagccaagcatatattagtttcatagtaatttctagggaaaaaaatgtggaggaaatatgtggtttttgttatacttgcaatgttactatattactgcttttttttaagttttgatttcaataaatacctagcatatattttcagatgccaaaggacatacaatgatgaacaaaaactcagctcgtcctcaaaatcgatatgtattattggtgatgctggactccacccactcatagatgtttctcattattgtgaaacattactttttggaaaaagagagctgggccaggcacagtggctcacacctgtaatcccagcactttgggagaccgaggcaggcagatcatgaggtcaggagttcgataccagcctgaccaacatggtgaaaccctgtctctactaaaaatacaaaaattagccaggcgtggtggcgcatgcctgtaattccagctactcaggaggctgaggcaggggaatcgctcgaacctgagaggtggaggctgcagtaagcccagatcacaccactgcactccagcctgggtgacagagagagactccatcttaaaaaaaaaaaaaaagagagagctaacatcttcactttttaaggaaatagacattgcccccatgattagatacgtatggatgactagatcatttaaaacaaaaattacataagggcttaaagagtggctcttaagtgtaaatgctaggaagcacccaattagttattatttcctgtatgtgttgccttcatggacattggttcatatagcctcaaaaagtctatgaagatacttttttttttttttttttgaaagagagcgtcactctatctcccaggctagggtgcagtggcacaatctcagctcacttcaacctccgcctcccaggttcaggtgattctcccgcctcagcctccagagtaggtgggattacaagcatgcgccaccataatcagctaatttttgtatttttaatagagacagggtttcactatgttggccaggcaggtctcaaactcctaacctcaagtggcccacccgccttggccccccaaagtcctgggattacaggcatgagccaccgtgcccggctgaagatactataaacatcttgattttttactgagtcagaaactgagaaagggaaaaaattatttgctgaagactgcatgcctcaagtttatacccattatactacactgcctgcttgcgaaagtatgttttaaaaaattgtcactgctgtgcagcaactcaaattgtcactgctgtgcagcaactcaactttaagtcttaaacctagttatcttttatcttgagcaggacatatatgttaagctgctgaggatgctccttaacatgaggccattgggcgggtgtgtgccagacaatcctcctagttgtttctctaatacagagcttcaggtcgtctcttcctttttcatcttctagcctgccctggccaagtacctatgaatcaaccggcaaggcgaggggtgtatttggtgggctatagagtggaattaagcagaatatcaaaaattttagccaataacattgaacctcaaagaggaaagtactgctgagttctgatagatgcaagacaagctaaagacctccttagctccattgttctgcatcagcacaatatgtcctagtgagaaggaaagacatagcaaaactaaaaatgacctgtttttcaagagcaatgtcttttcacccaaacttgtgaactgcttgccaaaagtcaggactaacattgttttgtacatttgcattaaaagaaattatatcaccgttgaagagctgatcagagaaagggtataggaaaaaggaaatgttaaaataagctgtaaaatccagcccatttatatctggagtttagaggcagtctaacaaaatgaatgttccatttactaatcacatttgccatttattcaaaacaaacacggcttgagagaggattaaataaacatccaaaaactgtcgttcttgaaacctttggatagaacattgagttgcattcctgcaggagaaatgccaagtgagtgagcctagtccaagtttgtttagaaagccatatttgggagaaccatggaagtgcgaacctgatcatgtgaaaagcccaggactgttcagccttctgtggcagttctgtgagttctagtaccagactattaatagggagtcaagtagaaatatccttccttcccctccctccctccttcccttcccttccttccttttccctttcccttcccctttccctttccctttcccttcccttcccttctccttctccttccttccttccttccttccttccttccttccttccttccttccttccttctctctctttctctcttctttggtgtgctgagaataatctgcagacagtgactctacagataagattgcaaatattttcccttccttcattccttccttctttcctctcttccttccttctttccttcttccttttttttcttttttaaccacatgatttctatttcctttagcaagatgttatcatgtgagggaagtcttaggtttctatatccctttattcttagtgttagcatttcttattaaagacagatgtctagttttctattttaagggttatctaatttcagtcataaaaatgtcctataaattaagacataactttgtcaatactcttctagaacataatagctaccccaaaatatttgttcaatgatgggaaattcattgatatttagaccttcagagatgaaataaatatgttgcctttgcttttcaaagatgccatcttgcccattcataagaaaactaagacccacagaatgactacccaaggcctcacagtataattaggactttaacaaaaatccataaaacctctggtattgggatatttaagataatacattgatatatactttatcactgtctttgataaaataacagtaaaaccattttaatgggacacatttttataaccattgtgaatttggtcctcaaaaaagaactcactgagatgatgagataatgcatattcatcctcttttacagatgatgaaacatttcggagaaggcaagtcagttttccaatttttcatactatatagatcattgaatctttgtcccttatatacagaatcaacaatatgaaatatgtggaacttgaaatcatagtttccaacttttctgcctatagaatgcccatttccagttgcttaacatttagattgataaacatgaaattcattaaacaggaaactgaataagagacctggactaatatttaggtattacttagtattccatccaagaagtgtctgcagacagtgactccatagatgataaggttgcacatatttcagaagccaaataaatgttgtgattaaatgattcaagtctgttaaccatttggtagttatgatgtaaatggctgttaaatggaaagcatttgtaaaaatgtatgtgcaaaaagaaaggatttctaacaaaccgaatgggccttacctattttagttaatactctcaataatgagcagtgagattaatttataagtatgtgtgtgtgtgtgttaagatatattcacattttatgaaacctgaagctttgaagcttatcactgtggaaataacttctgtatgcataaaagtattatattatttcggtaggactgctataacaaaatacagtcaggccttcatattcaagtaggctgcattcagaattcaaccaactgccaatggaaagtgtttgtaaaaaataacaagtaacaataaaatattagaaaatactacaaatttcaaaatacaatataacaagtatttacctagcatttacattgtattgggtattttaactaatctagagatgatttaaactatgtaagaggatatgtgtaggttacgtgtatagcatatcatatatataagggatttgagcatccatagagtttggcatctgcatggagtcctagaactgatcccctgcagatatgaagggacaactgtaccacaaactgagtgacataaactacagatttttttttcctcacaattctagaggctagaagtctgagatcaaggtactcacaaggttgctttcctctaagagctttctccttggataaaaatggccaccttctctctgtgtcctcacatggtctttcctctgcttctctgtgtcctagtccctctttttataaggacaactccagtcgtattggattaaggtccaccctagtgctctcattttaacttaatggcctctttaaaggccctttctccaaatacagtcacaatctgatatactaggggttaggacttcaacatattaatttgaagggagacatgactcagctcataacaattatgtaggcaaatgaacatttattttaaatgacagaggaaatgcaacatgttataaattaataaaagctatgaaatacctcaaaaatcacattaataaaagctatgaaatacctcaaaaatcacaaaaatcttgaaaaataacactcttatgaattaaattcctgattactttttcttacatttttagcagcatattcattgattaactaactgtacaacctaatttcataatattttctgcagagagaatacaaagataatttcatgctgagagtttattactaccagtcctgccttacaacaggtccttaagggaatgataagcatgaaagactgttacctacttctacaaggacacctttaagtacatagcctgctaacactataaagcaactatactatcaagtctacataagaaccaggtaacaacatgatggcaagatcaaatgcttatatatcagtattaatcttgaatttatgtgggctaaatgccccacttaaaggacaccgagtgtcaaattggatgaaggagcaaggcccaactctatgctgttttccagagtcccatctcacatgcagtgacacctttaggctcagaataaagggatggagaaagctctatcaagcaaatggaaaacaaaataaagcagaggttgctattctatttcagacaaaacagactgtaaaccaacaatgattcaaaaggacaaaaaaagggcattacataatgataaagggttcaattcaacaagaagacttaacagttctaagtatgtatgcacccaataagggagcacccagatttataaaacaggttattagagaactacaatagtgggagacttgaacactccactgacatttctagagagatcactaaagcagaaaaccaacaaagatatttgggacccaacacttgaccaaatggacctatgagacatctacagaatatttcacccaacaacaacagaataaacattcttctcatctgcacatgacacatactctaagattgactacacacccattcataaagcaattctcaaagaattcaaaataactgacatcataccaaccacattctcagaccacagtgcaataaaaatataaatcaatactaagatctctcaaaaccatgcaattacatggaaattaaacaacttgttcctgaatgacttttgagtaaagaatgaaattaaggcagaaataaaaaaaatcctttgaaactaatgaaaacagatacaacataccagagaacacagctaaagcagtattaagaaaaatgtttgtagagacaaacacctacatctgtaagttagaaaaatctcaacaacctaacatcacacctagaggaactagaaaaacaagaccaaactaattccaaagttgatagaagaaaataaatagttaaaatcagagctgaactgaacaaaattctgatatgaaaaccatacaaaagatcactaaaaccaaaagctgtttttttttgcaagaataaataagattgtcagactactagctagattaataaagaacaaacaaagagaaccaaataaacacactctgaaatgacaaagggtacattaccaccaaccccacagcaatacaaaaaaccctcagcgactcttatgaacagcactgcagacatacattagaaaacctagaagaaatgaataaattcctggaaacataaaacctcacaagattgaagcaggaagacattaaaatcctgaatagaccaataatgagttccaaaattgaatcagttataaaaaacctaccaaccagtaaaagttctggatagaccagatggattcccagctgaattctaccagatgtaataagacttgctggtaccaatcgtactaaatagcttccaaaaatcgaggaggagggactcctccctcaatcattctataacgccagcatcattctgataccaaaacctgacagagatagaacaaccaaaagtgaaaacttcaggccaatatccttgatgaacatagacacaaaaatcttcaacaaaatactagcaaattgaatccagcagcacatcaaagagctaattcaacccaatcaaataggctttagccataggttgcaaaattggttcaccatacacaaatcaatgaatgtgattcatcacataaaagaactaaagacaaaaaaccacatggtcatctcaacagatgcaaaaaagggttttggtaaaattcaacatcgcttcatgttaaaaaccctcaacaacttgaaattgaaggaacatacttcaaaataataagaaccatctatgtcaaaccctcagcctgcatcatactgaacaggaaaagctggaagcactccccttgagaactggaacaagacaaggatgcccacttccaccactcctattcaacatagtactggaaattctagagctccaaatagaaagagagaaagtcaaactatttctgtttgcagatgatgtcatggtatacctagaaaaccccatagactctgcctaaaagctccttgatctgataaacaacttcagcaaagttctagacagaaaatcagtgcacaaaaatcagttgcctttctatataccaataatgtccaaactgagacccaaatcaggaacacaatcccattcacagtagccacagaaagaataagatacctaggaatacagctaaccagggaggtgaaagatctctataatgagaattataaaacacagctgaaataaatcagagatgaaacaaatatatggaaaatcatttcatgttcatagataggaaaaaaatcaatattgttaaaatttggggcagtcatactggccgaagcaatttatagattcagtgatattcctgtcaaactaccaatattatctttcacagaattagaaaaaaaaaatattgtaaaattcatatggaaccacaaagagcccaaataggcaaaacaatgctaagcagaaaggacaaagccagagtcatcacagtacctgacttcaaattaaactgcaagactgcagtaactaaaacttcatggtactgggacaaaaacagacacataaaccaatgaaagaagctagagaaacctagtaatcatgctgcacacctacaaccattgatattcaacatttgtcaactcaagatggattaaaagacttaaacgtaagacctaaatctataaaaatcttagaagaaaacctaggaaattatattctagaaatactattctaggccttggcaaaaatttcatatgaggtctccgaaagcaattgcaacaaaaacaaaaattgacaagtgagacctaattaaagagcttctgcagcacagcaaaacaaactatcaacagagtaaacagacagcctatagaaagagagaaaatatttgcaaactatgcatctgacagaagtctgatattgagaatctatatggaactcaaacaaatcagcaagcaaaaagcatccccatttaaaaatgggcaaaggacatgaacagacatttctaaaagatgtgcaattaaccaacaagcatatgaaaaaatgctcaacatcagtaatcattagacaaatgcaaatcaaaaacacaatgagattccttctgacaccactcagaatggctattattaaaaagtcaaaattaatagatgttggcaaggttgtggtgaaaagggaatgcttgtgcactcctgttgggaatgtaaattagttcagtctcactgtggaaagcagttcagggatttctcaaagaatgtaaactagaactaccatttgacctagcaatcccattactgggtatatacctaaaggaatataaattgttctattaagttggtgcaaaagtaattgtggtttctgccattaaaagtaatggcagaaacctaatgaaaagacaaatgcacttgtatgttcattgcagcactattcaaaatagcaaagacctgggatcaacctaaatgcccatcaataatagactgggtaaagaaaatatggtatgtatgcaccatggaatactgtgcagccatgaaaagagcgagatcatgtcctttgcagggacatggatggagctggaggccattattcttagcaaactaacatgaacggaaaaccaaataccacatgttttcacttgtaagtgggagctaaacactgaatacacatggtcaccaagaggggaacaatagacactaggacatacttggtgtagaggctaggagaagggtgagggtcgaaaaactatctattgggtactgtgatcactacctgggtgatgaaatagtttgtacaccaaacccctgggacacacaacttactgatgtaacaaacctgcacatgtatcccctgaaacaaaaataaaagttgaaaaagaaagaaaataatgtttatacttagaaaaaaaattatctttcttctagcctgagtgataaacattttttattattatagtttttaaaagtttggaaaactgcctttaatctgcacaacttttattagtattgttgtttgaaatttaagataatcaaatttggggacactcctattaagtttcttttatttgtgagctattacaacacccttactcttactgcagattcatagctgatgagttctattttgtgcaattagcatcaaaaagaaaaatcaagtcagccgtgcatttataattgtgttcagtgcattactaagcacattcctaaagagaaagtatctccatttgcatcatcgaaaaccaagtagtactccacatgtatacttttacacatctgactattggttgaatttccagcagactcaatttctgtctctatgcattttactcctgtttgtctcctctactagtctaatttccatgctgggtgttataggacacattaatgacacgtgacttctggtcccacaaatctgtgtcacagagctaggacagtaatgggcccaggcacattgaagcattccaggaactcattcctatacaatgacgatgggtgatgacttaagcacacaccatagtgactgcagaccatgtaaatatatcccatgacactcagctaaatgtctccctgactcaacctttcttaaccaatctcaaaggtcacatgttgattctaacatttccctacatgagcgtacacagaagacagagtagaagaaccatagtgaacatacagcttggtcccctcccaagaccttagtaggggccagtgtacatgagggcccctgaagcttcatttccttcctcgtcaaagcatgtttatttaaaagtatttattttactctggatacttcctcagaaatagttattcctttccttttttccctccctctctccttacctctgtcttttcctcaaacatttatttagtgtatactatattctagacccatgttaagaataagatacatatgctgattctacagcactgcatagaaagtaatgggtaacctaagtggttacaaataaaatctactagctatcctggtgatttaaaggccaccttcagctgaatgttcaggaaaacctttatgaggaagtagcatttgatctaacctataggaccggtaggatagggcctgggtggggagactgggagatggaaaggcattccagtgtgctggtgctgcacatggtgggacttctatcacatgtattctctatctgtaacagttaaagttttttggttacttggcctgggtaatggcaaagcaaatgtactaaaagaaactctggttttgtggccacctcagttcctttggagaatgtcctctctcagctgaagctgagaacatccagtcacatttctgttctggaaccccttaagctgtttctgtgacaacatctgaaagaattaagctttatccaagtcaccagaaaagggcttacgttaactgttttcactaagactctacgtttcaatactaacacttacggacaagtggaaggtattcttcagttgtatttggtagttcttctgtagcgccccttttgtcttcctccatttctctcttgctagccctcaactctaccccacgttcgttttcattatcttttttctcatcccccatttcctgcttatttgtttattctggtggctcttctctctctcatagacgacatagaagcatggccttctttctgaactttccttgacccagagggagaaaagtctaacatactatcttatttatgcaatctgaggaaagttgttggccagccatcacccagtgtgacctagtgacagaaccagtagggatatctgagtgttcagtctttgaatgattcttccaagtcatatagatgtgttgattacttcaatcttgaacaagatatgttgtcactatcatactgggctatgagtacttgagaacagggaactgtgtagtaaaattcaccacatatgctggtagcacacaggcatcaaccagtctaaacagaacccacccgggtcacctcccacgtcactgctaagacacagttctttacacagaccatgtaaatgctgttgtgttgttttgtcaaagcttctatcactcttcttgctgtaatttgagaagcaaaagcattaataaccagttacttacataactggtattgtaaggcttactggtggcagacagcattcctgtgagcagtattagcacacctctcgatgagaatggctgtgaactacattctttggagtaacaataagaaagactatacaaaccctggtcctctgtctacagtgaatgaacacgctcatcttttcttcccacagtgatttttttccagataacatattctaatggcatgagtatattaaaataaagtcagatagggtgaggaggggcatgctaacaaaaataatctgtcactcttgccaaatggaggtaatacagtcacaatatttacaagtaaaatggcagggatgtaattgaaagtacatctatatatcatctatatatcattcatatcattcttcaagctgttatcacagttccatctttgactgatgcctcttcaatatgttgtataatgtactatagagttattcctttttactcttttgctcatggaaataatttgaaggcttttaaccttctgatctcatttttcactttgttccagacatggcttactctctctgccatggaactatcagataaaatgcataatttgattagaccaaaactgtactaccatcagtctgtcggtcaacacaagatatattttaaggggatctacacaaaagtctgcatgaaaatattccatataaagaatagttacataaaccttaataaaaagaaaatactgggaagcacttagtgtctcagattctggaatcaaagctctctttcttttcgtttcttttctcagcgattcaaatgaccactctgatattttctttgccaaattaactttagcattggaggggcgtttatatagtatctggcttaaagctattatttttctcatttgctctgcagacatttattgatcacttactgtgtgccaggccctgtgataggaatggaggtagagaagacacaatcccttgccctcaaaggtttcagtgacagaagaaatagatgaagagaatgaggcctgaagtcatttgctcatggtcctacaggcacagagcaggggtgcccaacccccgggccatggacctctaccagtccgtgacctgttggaaccaggctgcacagcaggtggtcagtggcgggcaagtgggcgaagcttcatctgtatttacagccactccccattactcacattactgcctgaacttcacctcctgtcagattgcagcggtattggattctcataggagcgtgaaccctattgtgaactgcacatgcgagggatatattttgcgtgctccttatgagaatctaatgcctgatgatctgtcactgtctcccatcatccccagatgggaccatctagttttgggaaaacaagctcagggctcccactgattccactgatggtgagttgtataattacttcattatatattacaatgtaatagtaatagaaatagcatgaacaataaatgtaaagtacttgaatcaacctgaaactatccccatgccccaatccatggaaaaattggagaccacagaactggtccctgatgccaaaaaggttggggaccactggcatcgaggatagaatagggaccagaaagagattgtgcagccgtccttctagatctggttcttgtcaaccactccatctccctaatgtgggacatggcagaagagttacaactagagtaaaataattcttgttgtgagttgcaaactttatgggctccatgtttaaattatattattaaaatatgtattttgtgtttgatattaatctcatagacatttaggagaacgattagatttctgatgcctctaggcattcagaagtctctaactcacatgctgcattgtctgaaaggttctattttgtgatagtgcttcttgggcatcagtggggacagcttagaaagcttgtcgttgcatctaaataaatactgagagtttggatatgtttctaagttcctttcctttgaactgtggggcataaatctcacgagacagcttgttctcaagaggttaccagtacgtttggttctagtctgtccacaaatattgtgagaacaggcttattcagattattttgacatgctcagacaaggcgttccgaaccatgtgagaaatgaacgtgtgtgtgcaagggaaatacacacaatgctactgagcctctaagaggctccattcctcgtgttttgaggagtggaaattgtctcaaaaaatcagcatctcagctctcattcctaatgtatcagaatctagaagttctggttttggaatctgatatagtgagaaatcagaagatgtcctggggtgtgggagaatgatatgttctttagtcgagtttaaatgagtttattccttaacttagcacttccccagtggcacaataagcactcagtaaatgtttattgaagtgaattccaattcctgatttgaatttagtgttggagaaattccagtcaccgggctgataaaaagtggtgtcagattactggaaaaaggactatgtggagaagctgcttgcaagtaataaactctttgtgttagagtcacctgttttacccaatgcctagcctagatcgttgaaaaggaaattgaaggatggtattcagattaagaaacagatccctggattatgtttaagaatttctgggaggagccaagatggccgaataggaacagctccggtctacagctcccagcctgagcgacgcagaaggcgggtgatttctgcatttccatctgaggtaccgggttcatctcactaggcagtgccagacagtgggcgcaggtcagtgggtgcgcgcaccgtgtgcgagccgaagcagggcgaggcattgcctcactcgggaagcgcaaggggtcagggagttccctttcctaaccaaagaaaggggtgacagacggcacctggaaaatcgggtcactcccacccgaatactgcgcttttccgacgggcttaaaaaacggtgcaccacgagattatatcccgcaccttgctcggagggtcctaccccatggagtctcgctgattcctagcacagcagtctgagatcaaactgcaaggctgcagcaagactgggggaggggcgcccaccattgcccagacttgcttaggtaaacaaagcagccaggaagctcgaactggggggagcccaccacagctcaaggaagcctgcctgcctctgtaggctccagctctgggggcccagggcacagacaaacaaaaagacagcagtaacctctgcagacttaaatgtccctgtctgacagctttgaagagagcagtggttctcccagcacgcagctggagatctgagaatgggcagactgcctcctcaagtgggtccctgacccctgacccccgagcagcctaactgggaggcacccccctgcaggggcacgctgacacctcacacggcagggtattccaacagacctgcagctgagggtcctgtctgttagaaggaaaactaacaaacagaaaggacatccacaccaaaaacccatctgtacatcaccatcatcaaagaccaaaagaccaacattagacagatcaacgagacagaaagtcaacaaggatacccaggaattgaactcagctctgcaccaagtggacctaatagacatctgcagaactctccacccgaaatcaacagaatatacatttttttcagcaccacaccacacctattccaaaattgaccacatacttggaagtaaagttctcttcagcaaacgtaaaagaacagaaattataacaaactatctctcagaccacagtgcaatcaaactagaactcaggattaagaatctcactcaaaaccactcaactacatggaaactgaccaacctgctcctgaatgactactgggtatataacgaaatgaaggcagaaataaagatgttctttgaaaccaatgagaacaaaggcacaacataccagagtctctgggacgcattcaaaacagtgtgtagagggaaatttatagcactaaatgcccacaagagaaagcaggaaagatccaaaattgacaccctaacatcacaattaaaagaactagaaaagcaagagcaaacacattcaaaagctagcagaaggcaagaaataactaaaatcagagcagaactgaaggaaatagatacataaaaaacccttcaaaaaattaatgaatccaggagctggttttttgaaaggatcaacaaaattgatagaccgctagcaagactaataaagaaaaaaagagagaagaatcaaatagatgcaataaaaaatgataaaggggatatcaccaccaatcccacagaaatacaaactaccatcagagaaacctacaaacacctctacgcaaataaactagaaaatctagaagaaatggataaattccttgatacgtacatgctcccaagactaaaccaggaagaagttgaatctctgaatagaccaataacaggatctgaaattgtggcaataatcaatagcttaccaaccaaaaagagtccaggaccagatggattcacagccgaattctaccaaaggtacaaggaggaactggtaccattccttctgaaactattccaatcaatagaaaaagagggaatcctccctaactcattttatgaggccagcatcatcctgataccaaagcctggcagagacacaaccaaaaaagagaattttagaccaatatccttgatgaacattgatgcaaaaatcctcaataaaatactggcaaaacgaatccagcagcacatcaaaaaacttatccaccatgatcaagtgggcttcatccctgggatgcaaggctggttcaatatatgcaaatcaataaatgtaatccagcatataaacagagccaaagacaaaaaccacatgattatctcaatagatgcagaaaaggcctttgacaaaattcaacagcccttcatgctaaaaactctcaataaattaggtattgatgggatgtatttcaaaataataagagctatctatgacaaacccacagccaatatcatactgaatgggcaaaaactggaagcattccctttgaaaactggcacaagacagggatgccctctctcaccactcctattcaacatagtgttggaagttctggccagggcagttaggcaggagaaggaaataaagggtattcaattaggaaaagaggaagtcaaattgtccctgtttgcagatgacatgattgtatatctagaaaaccccattgcctcagcccaaaatctccttcagctgataagcaacttcagcaaagtctcaggatacaaaatcaatgtacaaaaatcacaagcattcttatacaccaacaacagacaaacagagagccaaatcatgagtgaactcccattcacaattgcttcaaagagaataaaatacctaggaatccaacttacaagggatgtgaaggacctcttcaaggagaactacaaaccactgctcaaggaaataaaagaggatacaaacaaatggaagaacattccatgctcatggataagaagaatcaatattgtgaaaatggccatactgcccaaggtaatttatagattcaatgccatccccatcaagctaccaatgcctttcttcacagaattggaaaaaactactttaaagttcatatggaaccaaaaaagagcccgcatcaccaagtcaatcctaagccaaaagaacaaagctggaggcatcacgctacctgacttcaaactatactacaaggctacggtaaccaaaacagcatggtactggtaccaaaacagtgatatagatcaatggaacagaacagagtcctcagaaataacgccgcatatctacaaccatctgatctttgacaaacctgagaaaaacaaagcatgggggaaaggattccctatttaataaatggtgctgggaaaactggctagccatatgtagaaagctgaaactggatcccttccttacgccttatacaaaaatcaattcaagatggattaaagacttaaatgttagacctaaaaccataaaaaccctagaagaaaacctaggcattaccattcaggacataggcacgggcaaggacttcatgtctaaaacaccaaaagcaatggcaacaaaggacaaaattgacaaatgggatctaattaaactaaagagcttctgcacagcaaaagaaactaccatcagagtgaacaggcaacctacaaaatgggagaaaattttcgcaacctactcatctgacaaagggctaatatccagaatctacaatgaactcaaacaaatttacaagaaaaaaacaaacaaccccatcaaaaagtgggcgaaggacatgaacagacacttctcaaaagaagacatttatgcagccaaaaaaacacatgaaaaaatgctcatcattactggccatcagagaaatgcaaatcaaaactacaatgagataccatctcacaccagttggaatggcaatcattaaaaagtcaggaaactacaggtgctggagaggatgtggagaaataggaacacttttacactgttggtgggactgtaaactagttcaaccattgtggaagtcagtgtggcaatacctcagggatctagaactagaaataccatttgacccagccatcccattactgggtatatacccaaaggactacaaatcatgctgctataaagacacatgcacacgtatgtttattgcagcattattcacaatagcaaagacttggaaccaacccaaatgtccaacaatgatagactggattaagaaaatgtggcacatatacaccatggaatactatgcagccataaaaaatgatgagttcatgtcctttgtagggacatggatgaaattggaaatcatcattctcagtaagctatcgcaagaacaaaaaaccaaacaccacatattctcacttataggtgggaattgaacaatgagatcacatggacacaggaaggggaacatcacactctggggactgttgtggggtggggggaggggggagggatagcattgggagatatacctaatgctagatgacgagttagtgggtgcagcgcaccagcatggcacatgtatacgtatgtaagtaacctgcacaatgtgcacatgtaccctaaaacttaaagtataataataataataataataataaaagtttgggacgaaaaaaaaaaaagaaacagatccctcatggtatcccataaaagttaccttaatttatgaaaatccaacctgtgcaatatgggtatcttttttacaatagaagtgatttatatgggctactcttcccatagcaagagtctcattgccttaccatatagctcttttggaattttttttttttaaacttgaatatatcagaatgatagtaactggccactggagaaaaagctctgacctcaagccaaagagcaatctgtctacatgtctataccatggcagtgattattgataacacaactgattattgtaatcacaacttcccatacagaaattactatttgtattattctccaaaaaataaggccaaatgccataatgtgttttttcagaaacagtagaacatactcttagaatgatgtgagtgcacactcactctcattctagtttattctaaacgagaatctgagatgaatgttccaaatctctccaatcacaagggaggagggtacatttgcagtggatttttctcagaaggttaaatctaaagaagtaattaaggctccacatttctgatttgcaggaaactgcgttatgcatttcccttggatgaaaataagtaaagaggataaaggaagactctcaaattgcagtctgtgtgacctgtttttgaataaacataatcatattccacagtcaattatctccaaagtacagtgtgttctccagccagagcgagagagtgagaggaagaatgtcagttagaagtggttagagaagaggacacatgcatagaagtgtacatctttctattgtcctctgaaaatttttatacgatttgggaggggttagtggggaggattatacagtatttttatgtgatttcataaatgtcaaatttcagtcatcagtaagagaggcaagcacaggtaggaaaacaaaatgagatatgttatgttcagcacagtaataaggctcctaataccaaaggaaaaacaagtcagtagttacaactattgaatagaagtggtctaatcggagcagcaggatgcgtatcccattttattatggcttcattatgtgttttgcaaggctctttggcttgccattaaaataattttgtgcagcagcactgtgaggactcagaatccaggagcgtaactattattttcttttcttctttgttttctttttgaggtaaagttggcagcaaaggaaggtttcggatggaccaagtatagacacaacacttctgttaattcacatggggactaggcagcctcccacaatggctgtgacattcatcctgttctgatagaaactccctgctttctgtgtggcctgggatttgaatctggaggtctttgatccttagcctctcccgtggctggttaccggatggaacggacctgatctttcatttcccaaagaaggcctattaccatcagaagcaaaccgcatccttgcttttatagcagttgcgcttgataattattggtgatactgacatctgcccatgcttacttcatattcatgagcctgaagtggaattttttttttaagctaacatccccagttttggggaatagagtatttcctccaaagttaaaccctgaggtttatttcagaaaaccagtagtcaagtacccttcttctcactgagctaagaaatcctcataaattatttatttcccattttagacattggacagtgactcagtgtgccctggaaatattatcactgtattaattttctcatgtggctcagcataatgttagagaaatggatagttacaggtccagacactataaagatggagctaaatattcttctaaaaataggatgtttggttaacgtttagtagtcaacaactttcctgaagccacacacagtgccggactaagaaatggaataaatgtcctcatacagtatttggtgaagtctccctttaggagattaagcttttaatgttaaagattcagagtattttagctttatccctgagacttattatttgacgtgatgacatctttaactcaagaggtcaacaattgggataaaatgccatgctgtgggtgatggacgccataaaagtaacctgataatcggtcgggtgcggtggctcacacttgtaatcccagcattttgggaggccgaggcaggcagatcacctgaggtcgggagtttgagaccagcctgaccaacatagagaaaccctgtctctactaaaaatacaaaattagctgggtgtggtggcacatgcctgtaatcccagctactcgggaagctgaagcaggagaattgcttgaacccgggatgcagaggttgcggtaagctgagatcgcaccattgcactctagcctgggcaacaagagcaaaactccatctcagggaaaaaaaaaaaattaacctgataattgagttttagttataaaagtgccaaaatgctaaaagaatttacagtttctgaccactgaaatattttgctctagcctgggtacaagaagaagcgagtttgagactaggaatgaatgagaggaaacttttgattcttactacataggttccttttagaattttgaatgtttagagctagaaattgaatattcattattctagcccagacattttacagaggagaaagtcaaagtttcagagatgaaagttgtacccagggccacacagttaggttgctgcaaatattaagagaacttacttcacttaatttggtgcatttttattcttctatttatagacgagtaaaatgtgctgagaccagtgcattttaagctccaagactgtcacttcttcatttgtcttaggcttttagattcaattaaataagtaatgcacctaaagattcatcagctgggaatactgtctcaccactgaatgacttaagagagataatattgccttgctgaagacatattataaaaatctgagaatgagcatgtgtgaagctctctgatactcttacaagaagtgaagtataagtagttgtggattccttcaaatgaaacaaaatttttctggacgcctttttagatagagtatatgcaacccaggagtatagatgtgatgtctcctgtcctgtgcaggagtataaatgtgatgtctcctgtcctgtgctcaggcaggttaggattctggcagaccatgagacacccctgagccatcactttaaaatgccccgtatttcagtagcgtctatgtgctaggatttctgtttgggagtacaaaaagcaatgagattgtttttcttgagtaacctgaagtctactgggaagaacccagtggtaacccaaatagctatgacacaaggtagaaaatagtaccaaggtagatagagataaaacctttgatacttaaaggaagacagaaatactgctgactgggaattttagaggaattttcatgaacaaagatcagtaacatcatccactatccatgaaatattgaactataaggcagttttagtactgggaaagaaaaactacatcatacctaccagtaagaatctcatgatcatcatattttaataaaagatgaagaggtaagatcgcttattctgtgttccaaagaaattcctggaggagaagggatctgagctagactttcataaatagagatgatttggatagaagaacaatttagagcatcctggtttgaaagaacaaaaggatctaaggcagtagccctgggaatgtacttcacaagttcaggatcaatgagtatccagtttagctaaagaaaacaattctagtgaaagaagtaaacaaacgtttggtaggatgaaatggttccatcttatggagaagcttaaatattgatccaagaattttgaacaccctagtggacttcaggagaaccttgtgactctgagcaaagataaaaataaattgatatgggaaatgatgttcctttcagattagagaaactcctgaattaatctcaaatttggaggccgcttagtataacaaaaaagtatattttcaatattgctgatatgtaatctaagaatggttctctcttcctgtcactgaaattcatctattatttattccaagctttaaaaaaaaagtactaaaataaaattgtgtgattgagcattgcaaaagagtgggtttttataatgtggaagccaaaattttttatcagaaaagaaaagagaaaaaagaatctatgctgagaggagatggccaactactacatagatttattaactcaacaaaagggtgaccagttcttccaaacctggtatttgttggtcgtatctattacaaggtagctgtggcttggtgcagggtgcagacaagagagggaacaggaagaaagagattagtgtaaactgtgaaatcaggcaaagctagactcaaattttgtctctgttttctagtaactatgtgtgaccttgaattattgaagctctctaaacttccactttcttgtttgcaaaatggtacgatggcatctacatatagaattatagtaaagagtaaatgagaaatacatgtgaatacctagccgcttctggaaaatagtatgtactcagttactggttatttttattatcgttgtaattactatttccagtgatgtgatgcttattaccttccaaagcaagtacttttatatttgaataagtgaaagctctttcccattatttctaaacccttgtcctacttctcagttctagaactttttttttttttccttaatggaaggaaagaaataaggaagggttggagagagagagagaggaaaagcacctttgtttgtatgctttctttagatacgttgaagacaatactcacaaatctcttcagtcgtctctccatttggatggccatcctcagtgcttaagcacttcttcataaatatgattttcagaagcatctgaagcatctgtattcggggtcctgtcctcatccctgttaagaaatataaggctcaaaatcagatgttgttatgtgaggtgtggtctcgtgcatggagtacaaggtcacttttcattaggagacaaatgcgcagtaatacctacagtgtgggaacgtggatcccttctctttaatatcagttttgccagtgccctcctttgtaacccagagtagcttcagataaacctactgagcccttcttttcttgttcataggaaaatatttttaaagggatagtgcatttataagaaaatttttatatacttcttttaccctgagaggattgcaaagtttgtcatgccctgattgacaaatataagttcaaaaaaaaaaacagaaaataaattccttaaataatttatatcagacaaatggatctgaatctaagcaaaattttcaggaaaaaaaatgtttataatcattaggtaaaagtagaattctgaccttatctttatattttctttatattttaaagctttgcctacatattccaagacttggctttcagttttcctaaatctaaacagagaaataaatgaaatcatgtctaagatttcttccgattttgacattgttatatgtccttacctgtaaaatgaagaaaatattttttctttttatcagggttgttgttaggaagaaatgatattatggatattgtgtttcagcctgctagggacagatactttcatagcttcattcattcaccctagggtaaaagtatcagtgttttcttctttttccttcaggatttattccttagtcagggagtgaccaaggatggtcagccagaacctcagctggtcacctggagcataatatggtaaacagaaccatacccaaagttctgtttacggaggcagtcctggctaccagtgaatgatcaggaaccctataagctagcccctggaagaacaatgatgctgattttatctgtaaaataattctttgcatacaaagtactataaactcagttggttctccctgcatatttttgaatgattgtaggcagagtttttgttatctgttttactaatgatgcaactgaggcccgcaggagtcaggttgcctataaaggcaaggatgtgcatatagaattacccaaagcaaattggtattttgtggggcacaacctcaaaaccactgatatcttgctacatttaagtacaaaaagctcctatatgccacagaattagaacattaccagatcttaaatgttccttagaaatcacctcaactgatgccccacatttggcagaaagccaaaaagtttctcagctaggaacaaaacacaagttccctttctatcacatggtgctgaagcttagatgcataaaccgaacaaatcatcaggaagctataaaaggaacaaacaaatacagtctctggaatcattgcaacctcaatacacatctcattgccacttcctggacatttgtgtctagctaggttgcttcccctgcctgagccttactgtgaatatgtgccaagcagagtgttgctgttaattgagctagataacatgccagtgtctggcctagttcttggcccataataggtattcaactaatatttacttcttttcatccactcacccttcttcttaacagttggaacccctgttttgaactgttcacttctactctggatttccctgtgtaagctcacttgcagaagagggtggaggtgaacacactgcatttcccaccatccagctctgacctgggcccaccctgtgcaggactctgctgactttgggatgccagctgtggtcctcacacagggctcactgtatccgggggcctggcttgatccggtaaagagcgtctgctgcggtgcctgatggaaagtgcccgcttaattgggagatagggcttcatgaatggatctttcattagttgaaaaaaaaaaatatttgcctgcaaggactgtaaacagaagacttgattcacttgttccttttctcctgccctctcttgggttttgtttgacttagcgtgtttatacctcaggacacagctggtactaatgcctttccaaggttaagaaagctttccctgccattccctatggtcccctttgtgtactttcaagagacaataaaggaggtgtggatgtgagacagagagtgcattcacattagtcctggctattatggggacctcagaacaagcatcacctccaccctgtctgcatggatttaagagagagcatctgagcacctgagcttacctcaaacacgttctttgaagaagagtcactgccggtcatttctgtaatgtatcacagctgtcctgacctgatccttctctgctctatcgtggctactttagcatatttttctcaaaaagtgttcctctttcataattaaaggtgagggaagactggatgaaaaaagctgtgggatatggtcagcacataaggcctgtggtcaaagatgggtcttcagttacatcgtttggtcttactaagcctcaatgttctcatttgtaaatctggaataatcattagacctttttcactctgcttgttgtgaggttcaaacatgagactcaatgaaaaagtactttttggacaatagaacactacataaataggaaaattttaatggaaccttcctcatattccattaatatgttggtgctctgcattatagtagtactttagttgacttgagcacatgatgtagttgactttagattaaactttcactaagtattacttagaaaaaacgagccatcatgtgattctacagtctttatgggctacatagggatggtgaattcttttcaccactagcaaaggctcctaaaggatcatgccttactcccactccatagatgaagaccttaggcccctgggaatccattgagctcacagaggtttacataatgccaaatcaggatgggaagttagatcctgcttagtgctcataactggcttatgaggtttccatttcagacaatgaatactcatcaaggaggattggtggggaaccatgagctgttcatgtgtactgctgcactcacgtcgtatccagacacccagatatcatctctggcccactgcagtaagatctctgtcttctgtcctgtttgtctctccttcattcattccttcatttgctctatctagccttcatacttcttgaatcactttgagtatggtacccttattttaaataaatagtaccctcatttgggtatttgtttccagtgttcctgaggctggggaatttctccagagtttaatgatgactctggtgctcaagcaccaagaaaatttccacttgagatggatctggcactggaggtttattttttcccctttctattttattgttggccagtttgggccagcatgttgctaggttgtattggtttcttagctcttgtaaccaagctaagatgcacatgtcaaaaaatattttttcttcctctctaaaaaggtttttcctcttttctgtaatgcttcaggaagggaaaagagtgtttgcttgattctaattctggcatatgaagtgtttgctacaaaatgtttttatcactgtgttatcttgtcaaagtgctatcgtcattgtcattttcagtttaatagcaggaatgttccattttcacaaaggatattccatattttaagtaaactcaacaaaggaaatttcaaatgcaaaaaaatattgatagtgagaagctaattagtttttttatttctcaaagccctacatttaaaatagctttaagtttccagtatgtcatgctctgacagtagcatttacaggtaaaggatgatgcttaactaggattatggttacattgtaaacactcaagccaaagaaaaatatatccttggacaaaggggttaggatgatttgccagagtggcctccagtgtttggatgacagctacatcactgtgatttaatgcacctttagtttcaggagttgtatccagactagtcctcatctcagcctcaccaaaggggactggacttaaccacaatagaactcagagctcctgcagtgaaacccagtccctttccatgcgggaagtgataaccgcaggtgaaactctgagctagggaaataccatcttggtagtcctgaagtgatagcacttacattcttttgccaggcatccaaaatcctttattcttcaaatagttgtgaaggttttttttattattatataaagccttgcagtgagtcatagaagaaatgcattggggtctgagacagagagagagagatgaaacaactataattcctgagtcaactatgattcctgtcttcaagagtctcatgattaagaaatggagacaaagcagaaataactaattccaacttcctaagctaaatgtcataatgaacaaggaaccaaggaagcacatagaaggcttaggtaaattcttcctgagggaattcctctgttataggtaataattattaagcttccaccttgtcttgtttctatgtctctattattatttaatatttacagctaaagctatctatctatctatccatctgtctgtctagagttcctacctaatggtatgtttcagattaggatagatttctcacttgaaacagtctgtctgatgttttgcatccatccatccattcattctacaaactgttatgccctctatatggcaagcattttgctatatccttactacagaattcacttaggcactaatacctattttaattatggagacaaaaacagctaagaaaatgttatcactccatagatgagttaaagaaaaaaaacagggagaatttcttgaaggtgatgtcaatattatcataaactcaggcagtccatgctgaaaatgatttttttgtgagccagaatcccctgtactcatcatttattccctgatttactgcgttttattctgtatcagatgatgtgctagcataaagcggggacataacatcttctgatatcatgagacattgtttctaaacctcttttcttggtgattagacctatgcttgtgcccatcagagtcaagggttgtggacacttgctccgctgcttgttttttctgctatcttctgtccttgttggttgcattctaatggacctataccaagtgctgtcagaagatgagagactacaaatcagattccacaaggatgttcacaaataataagcatttggttgcaatttaaaattggttggcagagcaatagggcatttgattattaggattttacattatctgagtgacttggaaatagaaaagaagggacttgtattatatgtccagaaaaaaagtccagcaaactataatccataggcaaaatccagtgcactgctgtgtttgtaaataaagttttattggaattcagtcacgcccatttgcttatgtgttgtctatgtctgatttctgtctacttggtggcattgactagttttgagaaaccaaatgacccacaaactttgcaatatttaccgtctctttattgaaaaggcttgaccctctataaaaacgaattaatcctgaaggagaagaaaaaataaatagggaccctaatcatatttttaaatttatacagcatgcagttttgaaacactcagtcaatgatgtagaacaattaaaaagaaaaaataaaacctgggctaagatgatagacaaattccctttcaacttcaaccagtttgttctgaggatattgtgtgcttcaggaatttctgccatatgctgggatattcagacatatataacgcagtctgccttccaggaacccttagtctgttagtggagatggacatagaaagcagcaaatactcctttgtgtaactcatgctgtatatgagataagataatgaggcagagaagagttggagagtagagatggcctggcttttgggaatttggggaagatatcataaaacagtagaaacttaaactatgtttgaaagcatgaactcatgatagacgggcaagggtagaaacaatcgttttatttctagaagcttcaactctatcttgaaatagtttgttgtgtatattagtccgttttcacgctgctgataaagacatacctgagactggacaatttacaaaataaagaagtttcaatggacttatggttccacatggctggggaggtctcacagtcatggcagaaggtgaaaagcacatctcacatggcaacagacaagagaagagagcttgtgcaggaaaactcccattttcaaaaccatgggatctcacgagacttatttactatcatgagaacagcacgggaaaggcctgcccccatgattcagttacctcccaccaagtccttcccacaacacatgggaattaaagatgagatttggatggggacacagccaaaccttatcagtgtgtttataatggcaccacagtttctaaagtattatccattatctttttggtctttataacagaggttggttgtaatcattatctccattttattagtatttcttaaaaggcttcatcaaagcagttaaatgactttttcagggtttcactgcttataagtggtaaaagttacctgaccctacctctgactctaaagccacaggactgtccccttaaatcaaactttctggcctaagtctacaggtattccccagaatttctaattgacatgaaatgcaagagaaaagagtctttgaattttcctgcactggagcaacctgccttattccagacattgccaagaaattgtttttgccactgacattattgcgcatgctgccagtggaagtaatagtgatctggacttcatatgctttcaccgaacatgcatatggctcttcttattagactgtcatagggctcccttactttcaactttccttggaggtttctctattttctgtcctcttttcctttccttgtttctgataccagcctatagaccctctgtcaccagttgggtttcttcatcacatggttttctccttctcaggtggagttttggccagagggaggagaatctgttcaattaaacagattctgtacaacagattctgtataatgcaaaacagaaccgattctgtaaaatgcaaaaaaaacccttttctcttgcatttcagatcaattctaaattctggggaatatctgtagacttaggccagaaagtttgacttgaggggacagccctgtggctttagagtcagaagtagggtcaggtaagttttaccatttataagcagtgaaaccttgaacaagtcatttaactgccttgatgaagcctttaagaaataataattaaacatcccctggtatttgagaaaagaggtatcccaagtcccaccgtttaccaggtcctattactcacaatgctggtaaccataggtctccatcccttatgctcactcctcttaccacgccctgtctaggagctacttctacatttatgtgctcagtcttctatccagaaccctacccccaaatgtctaagctcctcacacctcagttctctgtcttgggccatggaacctctaacactggtttggaagtgtgtgtctttttcctcaggcagctggagcagagactgattccactgccaattcttgcctcaagaagagttgtcttgagacaataggttgaagctttcactacatgttcttttagcaaaaaattataaagcatagaggttgagatgggctctggaatcagactacaaagattctgatcttaatgcttcagttataagctctggatgttgagcacctctcctaatctccccaagcatcatctactgaaagggggcatcacaggacttccctcattgagctgttgtaaggattaaatgagcacatgttaagtttctggctgtgtaagtttttgttattacttttcttttgtacttgaacttgtcataccatgtttctattttgggttcagaaaatatggttaacataattataggtgtaatagaaattttggattagcctgtgaacataacacacaattatagcactgttttttttaatgagagaatgaattcctgagttctaaacagatgagttacaaagaaactcttggactgaagtcatccatatataatagatggtccagtttggagtagaagactgactgtgaaagataattgaaagtctgcaaaaatattttttactaaatgcactgtctttttgagcttgcattcataggcacatctaacgcacctgccccaatgtaaccaatcaacatcacatacagccctcagttactaagtttatgaggtaaatttattttccttcttggtttttgtttctttgcattttgatctttttatgtctttgtttattaaataagaaattagaatctctgatcagtagattggctaggatctgcttatgagtcttagatgcaaaactgacaaatctttaattggttgtgccatcgtatctgtcctcaggcttgttagctaaagctcagttagtgatttgccaccactgccattgcttggtggtagaatagggtaaaggattatcatgccagcatcccttgtccgctgtgaccttagtcttagtgaacaaattttcttgtgtgctttctaaaatgcccatgacccttatttcatacttaggaaatagaagtcacaaagatttcctgaggacctcatcattatgtggagctaggaaaagtactgtggtttatagctctgtggtttacacaaagggaaatccaattgatttgcacaaatacacaaaacaaaatatatttaagtgccatgaagagaaacgatgttctttaggaattaagaggaggttcagaaggaaaatggtgttgattgaatctggccaactgagcttggacaatcagtgacctcagggaaaggagtgttaggaaagagacattcctgacagaggaaataacataagtagacagggagatagaacattctggaaattgaatctgtgttaaaatgccttaaaaatggtgcatcatacgaatttagcgacatttcacttcaagattcttacataccttagggtgaaaatcaacaaagaccttaaaatgcagacaattaactctttttctctgtgttgtgtgtgtgtgtgtgtgtatgcgtacacacatatactccacatatctccacaaatcaatgacaatatcaaatggagcaattttccacaattttctccaagaaactgcatgcttaagcactgcactcagcaaaatgttgtaagtccatcaatatttctcagtcttgctgagtttctgcatgacccccaatagcttacccagtctcttcctctataagtaatgatcgcagattctacatctgcaagtacaagaatcctttcacaaataaattccagaggactccaacctgcagtgtctttagtgagtcagaaattaggaagatagcttcaatttggttatacccagcaggaaggaaacaatcctaatcatactaataccaatggaatattgtagtccaggagtttgatggagtttgaccagcatcctttagaaaggaaaactgcataaattaaataatttatatggaacaaacatatgtgtaatatgcatgtaaaataaaatggcaccagttattaatcaggtgaatgcatatatatcatagagaagtcaactatgaccagaagatacaaaatgaactgttctttaggctcatgttttgttttgcaatacagggcaggatattctctcttcctttagccttaactgatctgcttccatgttctagtcacttgaacattgatatgcatgtaaaataggcccctgttcttccattaactagaaaataaaaaagtgcccagaagggaagtttccatttctagcagcacgtagaaaagtgccagagtttgatcaggaagtggtatcagggtcaagatgagggaaaggacatcagaaaaaaaagtagaattatcctgttcacttcaaggaagacacacagcataaggcgggttttagaaaaggattaagagaaaattggcagacagaattagggagattgcttaatcaatatcacaatataacgatgctgggtagaagatgcatggaagaagcatggattatctcaatgacgattttattttgaagatagtgtgattatcacccctggggatgctggaacattacactggggatttagtcaccaactgaagcagatctctgggttgaatagatcaccatgaaggttgtttccaaccttaagttttcttaaatttcagaagttcaatgagttcttctccaaggatcaaggaggatatctactagaaatctactatagaatagagagaattggtctatacacaagtttatttaaattaaataatcctgataccattttgaacttttcagtcaaaacctaccatatgcacctcttaccagtgacttcagtgcttccttatacaaggtgcaagcggttctaatctcacattaaaaaaacactttgggccagttgcggtggctcacaactgtaatcccagcactttgggaggccaaggtgggtggattacctgaggtcaggagtttgagaccagcctgaccaacacggtgaaaccccgtctctactaataatacaaaaaaaatagccaggcatggtggtgcatgcctgtaatcccagctactcaggaggctgagacaggagaattgcttgaacccaggaggtggaggttgcagtgagccgaggtcacgccattccactccagcctgggcaacaatagcgaaactcagtctccaaaaggaaaaaaaaaaaaaaaacactttgattttagaaagaaggtctgtgcccaggcgctcccaggtgctgccaggcctcagaggaagggttctgaagacaaacctgactgcctccttccacatgctatgtctgcaaatattggctgccttcaagctcacagcctgtgacagcaagttggtttcatttcttaaagttgatcttcaaagccgtgaagcaatcgcaaactgtttgagatcccaaatcaaagaacagattgtgtagactcaaaaaaagcaaacaaacaattacatttaaaaacaaagtgttggaaaaaaccagcaacaacctttctgctcacctgccaaggccttgtggctaagcttctgtttttgccaaattgtagcaaatcacatcagacagtgtccttcttgtactactgacaggtgacccatttcctggtggttaaatctggagggatttgggagttcttgctcttaacatgactttcccactgactggatttgtgattgtaagcacatcacactcatttcctccatttgaaatgcaggttctctgaagccttctggcttgaaggaataatagtgagtaatacctaacattggtattgcacagcatgccactgagggctgcccaatagctctgtgaaagagatgaggaaacaggattagagaagggaccagctcacagtcacaggactagtaaattatgaagtgagaattcaagctttccaatatcccttgttcttcctactacatgataccacttctagctaaccactcattcagtagctcttgaaaaggatattctgttacctcctttgaagataatatttgatccctactttctcacagggctttccaaatagagtccacattggcccatttccatggaacattttgctggtctttaggtattttattaattgctgaattgtttaggggttttaagttgtctaaggagactatatctgaattcaattatttttttcctctttcccctcgagcatgcacattctttgtaatactgtagtgatgtataagttttcaagagctgtcaaggtgtatatatatatatatatatatatttccaaaagcagatagtatagtacatttactacagttgtttcactttgatatggataaaaaatgtataaaaaaggcaaagaattctgtgagtgtcattacaactttaatttcaaaatttttgcccttatgttatttgctatacttggctttcctcgacattataaatcattgatcacaggctggtataaatttagcattaccagtggattctgcgtatttgatatgctctttttattttggttttgtcagtttgctactcgtgagtttatctttgaacagcttcccatggctatgggattaggtctgtactccagagcctgatatctatgggcctttttttcttagcctttctagtctttttaccccatatttcttcatgatatccatagtttgtccaacctaaacaaagagctagtccccaagcacactaacccgttacattcatccctctgcttttaatacaattgtttctctatagagaatacctttaaaaatatatataagttggctaagctcaaaaacaccacttctatgataatactcttacagattcttccatttgtaaatatgcatgctcatagtactcttacagcgttggtcctctcttataacattgttagagtagatactgtaaactgaaaagtgacacataaaaatacataatggtgcagctcaggtatgtgtcatcttaatattcctattaaccttagaactttgtgactgtgttgggattacttgacatatttgtttatcaatcaacacagtgacagtgacgacgaatgagtaaccagtgttttgtttttgaaacatttgaagaagtgttccatatttctgaagttattagtttagtttagtttagtttagtttagtttagtttagtttagtttagtttagtttagttttaacgacagagtcttgctctgttgcccaggctggagtgcaacagcgtgatctcagctcactgcaacctctgcctcccgggttcaagcaattctccctgcctcagcctcccaagtagctgggattacaggcacctgccaccacacccagctaattttttgtatttttagtagagatagagtttcggcatattggccaggctggtctcaaactcctgacctcaggtggtctgcctgccttggcctcctaactgaagttatttttttaaattaaactaatacatgcaactggcttaacaaactaataggactaatgagtctaaaacaaacgacataccctccgtgcttctcctctctccactctctcaatcctacttcacgaaagacactcttggctgcttcttcctggcatttgcacagcttcatgtctaaaacagaaatgcatttctatctttggaggcataaatcttagacattatctgtggattaataacacaaaagacacggatatgccatccatataaatgtttgactgtttagagcttcctactctgggaaggattgacccatctccctccaaaattgagaaaagggactttcactggacattatcttcaagtccttgcagtgttccagaaggtgtgacaatctggtcctttggctggctgcattactgacctgctgacctgctgttttaggttgattatatttgcctttgagccaaaagagttacttgatgatactccagagccccatttccacacaacacttaggtttaaaagctgcaaaaatggatttaatgaaataatgatggagtgatttgaagatttttcatgtctttcaggaaacacaaggtgctcttagtgaccacagagctagcagcctcccctgcatctcaactttatgtttccaaatatagtctagatgcttagtaagtgttaaaaaataatagtgcatcttgatgcattctttatggtgtaaaataacctgttaggtatcagggataatttttcttcagcattagatggctgtttatgtatgatatatttctctgtgtccctgggacctaatgatcgttgaatacaggtgaatagaatgttatacagtagatggaacatgattatcaaagtcaggagacctagactcagttgctttctagcaaggcagtcattaattacatgttacgtcttttatcagaacctcagtttggatctataaaataggattactcatttccaccttggaactgtttttatgtaaccatcaagtaagccggtaaatatagttatctgtgtagttaactagctgctaacaaaggaatccagggtggcctttaatatatgttcggaatatatttattcaacaaatgtttcttcaattgttttccaagttagatttataaaaaatgagagcctggcaggcaagcaggcaagttggtagcttgggatgggatccactacagcacagaagtgcagccagagacttgctcctaactccccacggattgctacaaatccttgctccaactcgcagcttggcaagggatcttgctatcagccttctctcatggaacccattgtgcatatgaatatttgattagcttattccattttcattttatactattagttctccttgtggggttagatcctatgcacacacacacacacacacacacacacacaccatttaagaataggaaactattttgcaatctatatgccctctgcttgtaattgttactgttcccaatccatttcctcctcattctttgtctctcatccaaatggttttcactttatgtgtaacaggagtgagcttattctgaactacattggttaggtcctttaaagcgtaagcacgagagaataaaatgaatggaatggcacagagcacagctcacatatttgttttttagttttaaattctcatttgctttttagttttacacatatttattacccgtatttctcatagatttgctttttggttttacattctctccttacttttgccttggttctcctgatgtgtgaaaatgctcctaaggccaccaatcacaggattgtgactccttccccaactttgtttacctacaataattgcaacagcatgatattgttcaatgttggcatatgcaaacagaaaacctaagatctggggagccaattctttgcagaaggtgcttcaacctatctaaaagcaaaaacattcaataatgtgtacatgctttaaggtgtgtgtaatatttgtgtgttcattatgttattctcatagtcacaaaactcctttcaggtaaatatttgttcccattgtatgcatgtagaaatcaatgtttagaggggttgttaaatagctagttaaaatcagaaccaagaatcaaattcattatttctgtcttaaacttctctttcaactattttaggctgcagtagtaagcatcatatgacttcttgtcatctctagtgtgaaatggttttccaaagatctgtgtgtgtgtgtgtgtgtgtgtgtgttttaaataggcattttacttttaaaaggaaggttcacagtcaaactgagcagaaaatacaagcaagttcccatatacccccatccccacaaatcccacaaatgcatattctttcccactatcaacatctctgacgagagtggcacattagttacaatcgataaacctacattgtcacataattgtcacccaaagtccatagtttacattagcattgactacttggtgttgtacatgttgtgggctttgatgagtgtgtagcatttatttcccgtcatagaatcatgcggaatactttcactgcccctaagaattattcttgctctgcctattattactttctcccccaaccccggtaacccctgaaatttttactggcttcatagttttgccttatcagaaatgtcttatagttgggaccctacaatatgcagcctttccatattgccattttactgaataatatacattcaaggttcatccatgtcttttcatggcttggtaactcatttctttctaatgctggataatattttattatatagatgtccacagtttatttatccattcacctcctaaaggacatcttagttgtttccaagttttggcaattatgaataaagtcgctataaacatccacgtgctggtttctttgtagacatatattttcagctcatttgggtaaataccaaggaatgtgattgccggatcgtatggtaagagtatgtttagttctgtaaaaaactgccaaactgccttccaaagtatctgtaccattttgcggtcccacctgcaatgaatgcgtgttcctgttgctacaacattgtggccagaattttattgtcagtatcagtgttgtcagacttttggattttgcctgtggtagcaggcttatttgcttatttgccatctgtatatcttgtttggtgaggtgtctgttcaggtcttttgcccatttttaatggttgtttttcttactaagttttgagagttctttggatattttcaataataatagtcctttcttaaacgtgttgtttgcaaatactttctcccactctgtggcttgtcttctcataaacgcttgacaaagatgcatttttgacatgcaccctgcctcatctatagcatgtcttcaaataggcttaagcgactaacttgagggaagctgatttatcttggagaactcctaactcatttttctttcattcatttaataggcagcagacttggggatataaaaggaatattctgatgtttagttagtgcttaattattttgcattcttaagtcaagcttttgactgttattgcagtgcacttgcacaaacatgaacatttcaacatctgctgttagtgtgaccagaaagagagagaagagaaaggaaaagaagggagaaatgttgactcaatcctgtccttatgtgaaacaataaaaatattttaaaactttctctcagttatgcgacatagtgcttttctattttttcctaaactggaagctccctaaggggaaaggatgcatctcatagaatctcaaggtgctcagcaggtaatatgcatttgagcaatgtttcttgaattaaacttgctagccttatttatcctgaagtgatataacatcgttgggctgcttcaaactgcctttatcctgatgggttcaactggcacaaacagttattaagatttgggagagtcagaggtcccatagataccatggactttgctgcatctcagttcttccattgcatgcctttggaaatctttcctgctggtgaggttctgtgagggactgtggcctgatagaatttgtttcatttctgtttgtttttattctttagaaaggcagagtagaaaaaacagtttaatgagataacaaatagaggaaaatactttggacttactgtttaaatttaaaggttgactttatggtagctattaatagttccaacatcttgttgaatacccaaagcttaattatgtaaagagcttcttatttcctctctcctgccccttttcttctccatccccttgcaaagcaggcacaaaaattaaagctatttagagatatgtgaatcagcatattgcctatatctaatttatctttgtgcaatgcacacattcgtgaatttctcaaagccatgtgactctccagaaatctttaaatatgtaaataatattataacgtcccttagtgaatagcagatgcaatgcattattccaggtgtctgagtaatgcgaagaaaagatcaaattccctgttgtactacctgtgtcacatgttacattaataaacacagtcagcttgcaagaatagtatgttatctgaatttaatgaacttctgaactgaatggaatgcatctaattgacaaactgtcatcaaagagaacagaagacactacaaagtccaaagggaaagaagaaacaagtggggagaaaaacaaacaaacaaacatgatgaactgtgggggctgggattaaaatcattggaaggcatctctgtgtgaatgtgagcctgtgcagtaacctgcacgtgtgttgatgcctggtggtctttccatgtgagacatcttggatctgattaaagggccttgtggtgtctggcatttacagctttgtatttcccttaattgcatatacagactcaagaaagggatgggggagtgtcacataaaagataatccacagcaaagatctcaagctgttaggtaaatgaaatgtttccacaggagggtttatttttgccttcaaaatctcctggtacctgataaattaaagataaaactctttcaaacaagtttttacttttcttttctccacctcccatgctgtcatattgagtgtcacgtacatcgctacttaaaactccaacgggtagagtggctattaaattcggtctgtatatacatgatatatattatgcatattttcagaacatatgctgtgttaccatcttctgacccaaagagaaaagctgcagtaaggattttttcaggactgtaattgggcaaatgaccttgtaacgcagtggtctccgacctttttggcaccaatgaccacttttctggaagacagtttttccacgaacccagggttggtggggtagggatggcttcagtatgaaactcttccacctcagattatcggcattagagtctcataaggggcatgcaaactaggtcccttacatgcgcagttcacaataaggttcgcacccctatgagaatctaatgccaccaccactgatctgacaggaggcggagctccggctgtaatgctggctcgcctgccactcacctgctaggaacaggccaaggaccactatcagtccatagcctggggactggggacacctgttacagaatttatactgttaaatgtcacttgatatgcacactaaacctattacaaaccacatattgtcacttgtcataattggacagagctgcagtgaggttttggttttaagtgccaactcacctctaagctttttcagatccttgagctaaaagtgtcctctttctgaaatcctattaccatttattgtatatctttaatgaaagttttagtcttttccttcatattaatgttattcacccatttggcttagcacccctcttagagataaagctctgtgaagatgtgtttcttactggttcatttcggcatgccgctaaatgtgtaaaacctagaagatatcccatagccttgtttgaataaataaagttacacatggtgtttcaagttcacctatttctttgactaccaaaagacttctggttttaataaaacaactgtgaagttcaagtcctgtgtattctaacactttgatttactcaatggcctgatagaaactgtttttaaaaattatatttacccttagcattttcctgagtattgtctttagctattggtggggaagatggatatatgtgtatgtgtgtgtgtgtgtctgtgtgtgtgtgtgtgtgtggagagagagagaagagatacatggacccattgccacaatcttttaattatgtgaaacaaaaaatatttaaataacgttgaggttatccatatcttctgtattatattctgtgttactgatttttttggatcaaatagtgatttttcatgagctaggtataaaaatattaccagggactaaaattaggggaaactgggagtaacttagagtgtagccagttgtttttctactggtgctaccggcattgaaagcaagagagttcctccctgtgtggggatggcctgtacatggcaggacctgagtgtgccaggtctccagcctttacactttggtagcatcttccccacacacccagtgtagtacgccctctagagggatccatttcttcagtgaccacgtctttggagagccactgtctagatttttagtgcacaaaaatggagtgtgattaagggttttctgaggatggtgtattgttttatgttttctgttgctccactcaaattcaaattttgctgttagacttatcattataatgaaattgaatgttggtaaatatttttgtaaagtatatgccccttttctgtgttgaatgggctacaggcattcaataccccgtaatacccaaaatatcattaatttccagaaaatataaaattgtcacaaaatctaaaaactggaatattaggaaaaaggaaagaatggtttccataaatcactttgtttaacatagtttctatgtgtttgtctgagtagttgttttattagaaaattgtaatttcctctctaaacagagcaaacatattccctcttcttcttcttttttttttttttttttgagatggagttttgctcttgttgcccaggctggagtgcagtggtacaatctcggctcactgcaacctccaccttccagttttaagcgattctcctgcctcagcctcccgaggagctgggattacaggcacctgtcaccacaccaggctaatttttgtattttttttagtagagttggggtttcaccatgctggccaggctggtctcaaactcctgacctcgtgatctgcctgcctcggcctcccaaagtgctgggattacaggcatgagccacctcgcccggccagctaacatactcttttgttcctaaatacagttttaaaagcacatgtcttgagactaacttgtcctttcctttgtaacatcagtcagttttgttaacaaagtaagtgaggaactataaagtttgcattttaggaaaattttgcatttagtatataattttatcttagcctgtgctttatctggcaggatctgatccatcctataattctacaattagtgttttagtcagaaatgcagtcatttacatttatccctttgacattttgccattcttattcatttatccagtcattcaatttcagaatactaactttgccagatactaatatcaaggactggccaattcattcatgagtagatgaataacataagtgtcctgactcaaggagcttgtaaactaagaattgtaatgttataaactatttatatttctctagtattttacaaattaacaagcaaaattgtgtgattctatttgtagtcaagtgacctcagaagctattcagtcttcaccatttcctaacttatgacttgatctcattctagccagtgacgctctatagtattatatttattatgtcatccttaacggtgtggaagttgaaggaccagaaagattcacacagacttgtctttgttcacaggagtagacccatgcctctagatttaaaaggttcatcaaggcagtataacttagtagaaagaataagaaactgtaagtctggggtgggatctggcctcagtaattctctggctgtgtaaacttaggtaagatgcttaattttaaacacagtatatccttctttgggaaatagaatataccttacggatttctttataacaattatttttcaacaggaaagaaggaaagagaaatgcttgcatggagccatcatttattcaacagtcactcatcaaatacttgttgaatgcttactcggtgccaatcacttgtccacacactggaagtcaggagtaaatacaatcataaaaattcctgccctctgggtgcttacatttctggttgtgttatgctgcagggagaaagaggagattttcaaaggtaatagtacctaataccatctgaaatcctaaaatttctgccttactgtcttccacctaccatccccattggggaaaccttaccttagaggaggccactatatagtggatatataatagtgtttgtattttatatcttttatcactgttttctgcacacagtaaaacagtgataaaagttatcactttcttaagattttgaggttgctgtacattctcatttgtgaacaaaaactttgctctgattacgtaggattcatttaaaatccatggaatcttttgacactgaagttagaagttcattttatcaacaagtgaaatagtctcaggcacaaggtggaaggatgtgagtcctaaaatcttcggtaggagttggctgggcgcaatggctcacgcctgtaatcccagcactttgggaggctgaggcgggcagatcaccaggtcaggagatagagaccatcctggctaacacggtgaaacctcatctccactaaaaatacaaaaaattagccgggcgtggtggtgggcgcctgtagtcccagctacttgggaggctgaggcaggagaatggcgtgaaccccagaggtggagcttgcagtgagccgagatcacaccactgcactccagcctgggtgacagagcgatactctgtctcaaaaaaaaaaaacatctttggtagcagttttacatagattcccttttgacagctcccaccccagcaactctgtaccatagttattggtaagcacatcttccagatgtgggaactgtggcttagaaatgctatgaagccagttagtagaagagctgaaattagaacttggtattctcaacctcaccatctagtgtgctaatcttttttgtttttgtttttcttcctgggacagataccatttgtgacctgttgagtgagactgatttagtccactgtgttaacaggaaagttgttatagtttttttttttcttccgtattgtttttaatggcaatgtaaaacatgtgaatctgaaaagagaggttctgagaaatttgtgcagctcctttttccaaataaaagatagatttctcttgatgaagccttgatggttggaaattaagacaagaactgaaagcaaaacagcctactcaaggttagacagtgactcgagtcattccatgcacttaaacaatatttaggatgaccctatgtaaactcacattatcacttaaaagccagtataaaaatactacccatctgctgtgctagtcctgctgttgcttgccacatttctctgacaagctgttacctcagtatatagagagagtatacattttggaatccggagtttaagtttgaaaaaaaaaaatggtatctggtacatatggactagattctgttcttccaaatgtagatttgtaacctcatttattcttaaagatgatgtgttaagttagctttttttcttgactctgaagattgaagctcttataattttatgcctggacatgaacaatgtacaataggaaatcatttagtttacactcgccatatgatatgcaaagtgggtgttgggaggtgtttatatcaaacaccataactaagttctaaaccgctctctggaagctatgtaacttttcaggtattaaaggtttggaagatttgtaggtgcagtatgtataattgcttccatacaagtaattttttagtgccaaaaaactctaattccataatttccagtgccattataacagccgagatgtaatcttccttcttaataggtatttgagcagaagaggcaagattgaaagttagatcctcaggcttctctgatgcatcaatctgcggataaagcctttagctaggaattacaatctggagcagacgtgcaagatcactgagtcatttgctgtttttccgtgggacaattacttattctttttctgcagatttcctaggaaatactccaaagtaaaaaatatcaggagcagcagtatgtgatcttccttgctgcttattgttcatactctttatcgcttctcagctttttggctaagatcaagtgtattgtttatactgtctccacgattttcctggaaatcctttttggtgaatataaccttgtgcattacttgaaaatgggcattttaatcattttttcattccactaatatttattgaatgatcattatttgtaagatcttaggagacctgtcaaagacaagcacgggctcatcaaaatcttaaacttgtgtatagagtactaaagaaggagcatgtgaacatatgattttcagaaaattgagaagggaagtgagtggggagccctttgagactggacagaaacaagaggaccatgacactgaagaggacatttttaatttcatgttcaccctgagattggtaatcaagagtcttatttactcagagcaagccgcataaatcaaaaccacaatgagataacatctcacaccagttagatcattaaaaagtcagggccgggcatgatggctcacacctgtaatcccagcactttgggaggtcgaggcgggcggatcacgaagtcaggagatcgagaccatcctgactaacatggtgaaaccccgtctctactaaaaatacaaaaaattagctgggcgtggtggcgggcacctgtagtccgagctactcgggaggctgaagcaggagaatggtgtgaacctgggaggcggagcttgcagtgagccgagatcgcaccactgcactccagcctgggtgacagagcaagactccatctcaaaaaaataaaaaataaaagtcaggaaacaacaggtgatgcaggtgatggagatgatgtggagaaatagaaacaattttatactgttggtgggagttcaaccattgtggaagacagtgtggcaattcctcaaggatctagaactagaaataccatttggcccagccatcccattactgggtatacccaaaggattataaatcatgctactataaagacacatgcagacgtatgtttactgcagcactcttcacaatagcaaagacttggaaccaacccaaatgtccatcaatgatagactggattaagaaaatgtggcaaatatacaccgtggaatactaagcagccataaaaaaggatgagttcatgtcctttgtagcgacatggatgaagctggaaaccatcattctgagcaaactatcactaggacagaaaaccaaacaccacatgttctcactcataggtgggaattgaacaatgagaacacttggacacagggtgaggaacttcacacaccagggcctgttgggggttggggagaggagggagggatagcattaggagaaatacctaatgtagctgacgagttaatgggtgcagcacaccaacatggcacatgtatacatatgtaacaaacctgcatgttgtgcatatgtatcctagaacgtaaagtataataataaaaaaataaattaattagttaattaaaatttaaaaagtcacactattaaagttagaagacatgccctgaatcttccagtcaaaattccttgtttacagatgggagaaagagtgaggaagggttttgccaatggtcacatagatgtcaaatatcatttactgagaaaatcagcataagaacccaggtctctctctttttttttttttgtttttttatcactcaagccaatagtttttccacccttttagttctgttatttgtcttctccactgttattcaaggctatctcaggccagaagcagaggtttgaactcttttcagatgagagcatttttgagactgggacctcatgttgaactaaactcacctccacgttggcacgcacgttacttcctcttccactgtataattttgccgttggattaaactcatgtggttggtgctaaggctttgaccacaggcacatttgaagattatacttatttctggatacaacctcctttgcctccaaactgaaaggttggaaggatgacgggaacaaactcaagtcaagggattccaaatggtcacatcttatgaccacaggctttatatttggagcgctaccatgattaatgtgtcctcgttgccatcctaagacttccatcattttcttccattgtctttctgacttcagctccgttgctacttctgggcagttataggtttctaacccaatagggcaatttcagtttcccccgcgttttctacataagttgtcctttctccacatatttgtttatgcagtttaagtcttgccagattgttctctctacgttctaaaatctttccaattttgaaagtcttagatcaagtactacgcagctgaaaatggctctgcctcttttatggcatttaatatctaccttggattatagttattataacgaccatagatactaaaactttgaaaagaataacaatttgaattcctttgtcctatccccataggacctagcattgcctctttcaattaataaatgtgtaaggaataaattattttggcatattatcccttgtcttttaaaagtttcacaggagtccctttgcaatcaagttaaaggctataaaaatttaacatctagttgtgttggcagagttgtcagcatttacttcagtttatcaaacttcaatatttatttaaattgaaaccaatcagccatttttttctatgcaaatcacaaatctcatttattaatgccttcccctccccctttcccttactacatcaataggaagattacatcttgacatgataaaaggagacaagctttcgttaatgttaagaatctgctccatggccccctttgcccagaaagtcatgaattctgataatcaaggggcagttgcctatgttatttttttttaagtttctagttaattatttgctcttccttatttgcattttgagatgtaacagtagagcagtttacccattctctcctgaaaactatgagtctgtttcagacaaattactatactaggcacccaccctcagtggaggtgcaggagactctaggcccggaatgggtgaaataccagaagttgcatttgaatataatattgactaattagtcagccagaaatgagagctctaaacatgctctttttgtgtcatttactgcatttgtggagcatctaattataaagaaaataagtattcttcattggttgctagtaaagctgccactgaagggcaaaaagacatatagcaatcattgtttaaatagaagcgcttgaaaattttccattaattttcgtgtttgcattttgaatgctttcttgctcacacttgaggtatcaaactgaacaagtctgaactgactgcgtaagaatttaaggaagaactgggaggggtagaaatgaggaagctatttgcattcctggaagacaaaactcacgtttataatctttcttgatactaaggcagtttgtttcccaaatgctatttatggtgagctttttgtcttcaaatgtttgttataagactcttttttttttttaatcatccagtgcagaagttcatgaaagaaagtgaaagtgcacccatacccccattcattttccagagcttaccctgtttggtacattatcttgttggctcatgttttgcttggttttgtttatgcaactttttcttattaatttgttgttgtcgttggatggagttagggagggttaaaggactggagtaaaaatgctatttatctttaccccttcttcacttacagtgtgtgtacgttgatggagggggtggtggggatagagggtgattttacctgctccatttttgtttctatttgctgctaccagcttgcttcttaaccctgggcagaggctgccctgcaggcaggagcagaataagctgtctgtgcccttcctcttcctatacctttgaagattggtgcctttcactgttttccaatcgcttgttctttccataagctcgttcccttctctccactgctttgacaacaccttttagagttgctcctggagctgctgccaagacaatagtatgttttctcttttaaaggtctaaaccctgggaggagaggaactggaggaattgagtcaatataatatacgaatcactttatattttactatctataatttagtttttgacttccatttctaaggaaaaaattgttttcttttattgttttttttttttctgtttccattcagcactcgtgtactgagaatccccaagctatattaagtcccatttgggccattaatgtgtgtgcaacatggtctgtctgttccagtagagaaaaaggcatataaataactttcttatcactggttatatgctttgaaggagtacaaattaaacaacctgtggaagttcaagtaaaagaaagcttatttccagtcacgagaagttaaatgtgagctgggcagattcataatagagaagtaccgtttttttgtttgtttgtttgtttttaactctgagggccctgtgagcttggtcaatttacatcatctcatgaatgacatagggccctatatgtggaaacaaataaacaacaacaacaacaaaccactgtagagtcatatcaaagaaaaatgaaggtggtattcatccacatcaatattaagataaattattaaatatttataaaactctttgacagtgtacagcctctataattaatcaatgtagcactttctcaatacttccccattttaattagtaccaacatcaatcataattaggctcatgctttggtctctctgagacttttaaaacatcatgggtagggggcatttttcaggattcaggtatcagctaagagttcatttagccagtagatcgtgaccattcttcctctccctgaagctatgattctggatactgtggctcttcctgctcctccagacatagagaaaatggacaagtttctccttccccattttgagtgcatgaagtgaaaacttagcttgtccagccaaactggaggaaggagaggcgggacttattggagtaactgaaaagagaaaaattggaatatgagcagtaccaatactcagtctcttaaggaagggtagagtccctttctttctctctctgtaatttttttcttttttgttttttttttttcaaagaagattgcataagattctgtctctctaggagatgactgatgaaatataccccctgggtcatttgcatcttactcctttgtagtgtagggaagaacattccaaacccattataagcacttactgttgttgggcatgtcataacaaacacaatacctttctggaatatactgctgagcccttggctttttgctgaatttgcctaaaagcccttctgcctattgagtggccacattctgaactagttatacttggttaagttttcacacagtacactctgggatactagggttgcaacaatttaaaaaagaacatagatggaagctttatatctcaaaagctcctacctttgacttccctgacaatttttccttctcctgctcttcaactctatgtttcccaactttgtttttgtaaacacgaaaagtaaattttttaccattttgtgcctaattcctcttctttctctcttctctttttactcatcacaggaatgtcttagctttccttccttctccaatctgccttgggtatagagtcacgcctttaaatcttttagcataccacaatgtaacttacataaggaaatgtttaatttgggaacctcagttggttttgttaacactgctgcaccgaagctctagctgaattcacataatctcatgattttagtaaaggtaacaaaggaaaactattatgtaagtacctacttttcaacaaacattgggctgggtttcttctttacattttctcatttaatcttcataataaccctgctagataaggtttaccatctcattttgcaatgtggaatctggagcccagagatattaaataccttgtacgagagtaggtgtgcaaagctaaactttgaacctaggcatctctgacttcaaagtctatgctttttccacctcatagaaagaccatccagaagatcaagtgttggaaccttccgaggctgtgacatatttattacttcaaagtttattatcacaggacatgcatgctgctttagcaactagaagtgtgtgaatgaatattactattgtgttgcataagtccttggcaatattactttttaggtgccattctaatcctgccctgtttggaataattgtgattacgagggcataggagtaattcagaaattttttgaagaaatttctccacacagcattagccttagttatgagtataatacaaaagaagaggaccagcactgctggaaggtaaatgaaaagatggaggaattgaacgattacataacagctgttcagacttgtggtactgattagagtcatttgtagagatgaagcagtgtgtctagccagtgtggggtagggtatactgggaaggtctcacagacagagtgaagtgggttacggcaagccctgaggtatggcaaaatctggacagctagcctggatcttcatttttcattagttggcttccttaactgctcaacaagtagaccaaacaaacaaaccacgcatacacacaaagcaaagaagtaaataaagaatggtggggctaagactgtgaatagctcctagcaaattagagaaatagcttcaagtatatgccttctggatgatgtatgtttgtatatgaaggacaacacatcaaggggtgttggtagtaatctgtgctaagcttagaagccagtatatcattgttctagttctatttctactgtcgagtggctttatagccttagacaagtcatgtaaccgttcaggccccaaatgtccttctggaattacagggattgaactggatgaataaaaagttctatttcaactccaacatttaataattctaaagttcttagtgagctctgattgctcatttgcattacataggcatatattaaccattttaatatgtatcagaaaaggtatgttctttttcctcagaaatgttgaagcctgactttgttatagaaagcacccaggaatcatgtcttcagagttcctaatttttagtgttttcttgtactgccccgactgctgcaatcctctctcttacattggaattctgttttaagttttggtgattggaatcctctttttgatttaagagaaagaatcctaggggtgaaagattactatactggaaatgaaagattactagtctctaaatgagaattggctttggtctgtaatagataaaaagatttttaagggaaaaatattagaaaagtgaaaacgtttttaaaaaaaataggtagcagtcaccaccgtattctggtggaatcgaattcttgaagattagatttgtgtattcatggaataatctagacaaaatcctgccttgcacatagtggggagatacactaaaatactgaaacagctacattgtattcaggtgaagctacatagatgtaaataaagggcagccagcgggtacaagctgtcaattaagtgttttcaatagtctactccgtgtcgccacatcttaggtaatttagataggtagaagacaggtcattagcactgaagttgagaacacatttgaactccagaatgggattaatgcatctccaaaaaacgtgtattttctaaccctgtgcaaaaattatatttgaaaagattaaaacaaacaacagttttcttcgttctttgttatatgtctttgtacttgaaaaaggtaaaattctgcattacgttttaaacaaattgtgccagggtaaagggtaaaatctccatcaacatctaaaggtctttcttgttcagaaaatgaaggcccctctcctgcattaaagaccaatgtggccttatagatccttatacagagggaacaaaatgacattagacagactctaaggtgccctcaattattcccacgtggtggtattcatgcctttgtgtaattgcctcccaatgagtgtgggagggacctatgatttctagccaatagaaacagcaaaggtcacatgtagtctttgatgacttgtgtgtgattgtgttatataagactgtaacatttgttctatgaggggactttcacccttgtaggctttaaagaaacaggctgccatgttgtcagctgccacctggagaggtccatgtggtaaagagtgagggcacctagtagctgacaagaaactgaagccatcagtttagcagcctgcaaggaaccgactgttgacgacaatcatgcaaacttgaaagcagatccttccccagtcaatcctcagttgagactgccaccccagcctaactttgcttgtagacaatgagaccctgaggcagaggacccatctaaaccatacctgcacttgtgacccacagaaactgtgggataataaatgtatgttgttttactctgccaagtctttattgttttatagatagctaatacaattatgttacttttagaatctaacattttcttcacctttcgttttctacataatagttactaagtgaatgtgacttgttatccccatcctcaaaatcattaagggtcttttatttaatatttgatttatctgtggctttgtgaaattcataaatctgctcctcagtttctggtatctcttcaggagagatgccctcttactctactgtatatggaagttgaataagattgaaactgatagagaaatacttgttgaatcaagttgaattacatgaaatgggcttctttaaaagctgttattaaatcttcctgtggctgtcctagagatgatataacagaacttctgctgggaaatgggagagggggagggaagcgttccatgagctgctctgtcatttgcatgccagtgaaattaagtttgaatttacattaagaggagttttgaaatttaggatctatcttaccaaatcacaattcagcctaacaaatgttatggaagtacaacaggagcccggactgtccattgtcatctaaatgatggatgtgtttaaggtgtttacatcagtgctgtttctcccacctaccctaggtctgggtggttgcctgggattgtttactcaaagacagtagcttgacaatttggaaatgacagaggacgctgatacttgaaatcaaactgtagccctggaatagcccaaacatggtcccagggtggtcttgcttctgacttatgtggaaacggccaaatcttcaactacattctgtagcttttctttattcacccagccaactggaagatgagtacctatcttggaaatttcccagaagcagcaattcatactttccttataactcttaacacattgctttatagtttctgttccaatgccagcaaagcccctctttgaagactcagtttccgtcatgctgctctcttacaacacgctttcctcaattctgaatgaatgagcagatgaggatgctgaaatgttagcataacaaaccaaagtcttcttctgttgcgggacattacatttaatgtagctttatacagctcagatttatttctataggttaagcattttgttaaactattcctaaaacacttctgaatgggtcaccagaaagaatatggagcaatcaattctactgtaacctagccaggcaaatattgactatttcctgataccagcatatgttgtatatttctgccttactctagtgagcagaaaatctgtgaaggtttttaggaattgcctaaagacacgcagttctcaaatggcaggaaggagagtaaatcctagtctttctgattccaaactttatattttttccattaaatgaatacagcatacttacatacatacataagtaatacatacattcatacatgtattcagctgtgaacattttttgggcaccctcaatggcccattcgctgtgttggatgtgatgagggatatgtagatgaataagacctagatcttgcccttatagggaaaaataagatttaaataggttaaatcctagtcttgtgggaagatagaaaagatgcacaaaacgaaagccagactcaaatgagtaaagttagattataagtctgcagatgtaggtaggtaacctgagctttccaagaactgtctcctcacttgaagaatggcagttaataatctctgctttatagactggttgagtggattgaatgagaacacatgggaagatgctggcatttaataggcaacccataatagaaatgttaacatgtgctctggggtatcttcagaggtattgggagaggagtccctgcctaaggaagaagcagtgctgggcagaggaaggaatgtggacttggattggaactcagtggatctggtctccagtcacccaacaagccatgtgactgtggaccaactactaactgcataggcaccttggattccacaattgtaaaatggacatcactggaaagccttcctcatgaagtgattagaacagatgcagataatagcacaggtgtggttgaaaattgtgaacattcatggaaaagttcacttgttttttttttatttgtttttgttttactgtcaagaatataataggagccactcaatttatgactctgtcctttcacttattattaaaattatggtattccttttgccactcctgtggacaacatagccaagcaaatgagcattttagtctttctcgtcgtcctgtcttagtttgccaaaactttgaatactctgtgtgtgtgtgtgtgtgtgtgtgtgtgtgtgtgtgtgcgcgcgcgcgcatgtttagttgctgttgaaaatatttgaccactatgaggaactggtaaatttgcctgtgctcaggaatacattacatggatgctctggttagtcactttgtactttacatctgacttttcctccatcagagacaaaattaataataaacaatttttaagattttggataaaaaccttattaaaatgcatggcatatttttcttttttcttatggggctattctaagcatttgaaaccttttgatgactcagggtcatcaccatgaccatctattgttatgctctgctgaaactcagtaattttttcctcctatccccccaggctgtcagcggccatctctgctgtcactgtgctgcctttcacagtctttcccactaccttctaaagttcattggttttaatctcctctggtatgaggaagaaacagcaaaattgtcattagaatcattggtgaataggagtcaacaaacattcactagtggcccaaaggagcactcatcagaggaaaaaatgttgttttattttgaaaaattgctattttataaacccagagctgctactcccccttcttttcttctccgttctctttcttcatctttttctttcctttccaaccttcatgaaaactggaaatatggactatgacttcatatgctcttacttaccctctgctgggattttgttctgaaattgtaacaattagaggagtgtttctaaattggatcgcttcagattgtctcagttctctgtgactttaagaacaagctgatttgaagccacatactgttggcagctttcatccatttatttggactatcaagcaagaatgctcacaatctttcatatgaaagaagacatctttatttccagttcacactcttcataataagaagggtatttgaaataaagccaaaaagcataacttacttctctaacttcatatttcagatgcctgcaatagtgggagaacatttttttactaccccaccttaccctcaaatcagtagcagaaaataacagtgatgcattcagacagcaaaaagagaaaataataattttattaagtttacaggaaaggtctcagctttcttaaaagcctatctttaggaagtaagtaactggagctgcacacccaacagaggaagatgactttacttatcatttacttagaaattatctttgaaaggatcattgtgctgttgttagcaaaaaggagcttctgtaaatgtcacctcaaactttgaaatctgggaaagtctcattatgaaacgcaagttttatctttcatactcagcgctggagcactgagtatccttgcattcatgaagactttctggtacagagtaaacggagctgggagcataagtgagaatgcagctccagctgacagacccccagctctatcttcccaggtgcatttcctttttttttttttttttttgtgagacagagtctcgccctgtcaccaggctggagtgcagtggcatgatctctgcttactgcaatcaccgcctcctgggttcaagtgattctcctgcctcagcctctcgagtagctgggactacaggtgcacaccaccatgcccagctacttttgtatttttagtagggatggggtttcaccatgttggccaggatggtctcgatctcttgacctcgtgatccacccaccttggcctcccagagtgttgggattacaggcgtgagccaccgcacccggccgcatttcccttttgtacactaggagctaccgagtaccagaagtctttgttaggatgcacagttctttgctcactctgcctgggacagtggctcaacatctccagtcccctttgagttacctccagaaggttcaggaagagcctttccctccaaaatgttcatagcatttgatctaccttctctaagataagcagcttttgtcacattgtacctagggtaaagatttgtaatgccttaactctatgccatctgtatgcttcctgcggacaggatatgcttctaatttatcagattcccttaagaaactacaccatgatgcacttctcaaagtatgctcttaactaatacttatgggaggaaaaaaggaaggagaaggaaaaggagggaggaaggaaatcgtgtaattgcagaaagtttatgtctgggacccttgtgtaataatgttaaataatactttgacttttacgccatttttctatatacaaaattctttcacatctattttcaccactatcctgatattgtttgcatgatgtgtagtatgtatgtttttaatgtgtgtgcatattgtttgtctctcacacatacagcagccccaacactgacaaatccaaattctatgagtacagggagtttgttgtgttcactgctgtatccccagcaccttgaacagcacctttcaaggaggaagaacctaattcatgtttgttagaagaatgaatgacaatattgtcttatttgatcttcaccataatcccgtgaagtgaataccgtattcatactgtatcctcgtttttttgcagatggcaaaactgaggccttgagacctgctcaggtttgcatagctagtttttggccatggcaagatttgaattcaggtttttctatttccttattctctcctttttgtcttctgggaatttgctatattaatagcaaagcaagaaatgtcacacaaagaaaaattgtttccaattttaaattcatgatgcatatgcaagaaattactgacttttcaatccaatggtaacacagattgtgtgatttttaggaggaagagcctttcttttccatctcttgcgtttattagcatatgtgtcagtgcacacacatctacaccgtgcagctctcaccttgtacttttccagtctgaattcgttttgtaggctgtccctgccctgactatcccaggtgcctatcagggctgtgtcttggtcaggctaaggccaagcaacaggcaccagcatttgttatggttaccttggcaagtgaatggggtttgagggaagctggagagcaggcatttcaggagtagaactaggccagtctgtttttgtaaaaagttgatattcaccctaattgtagctcatgttggcaagcggagtaaacacccatgcaaattactaagttgtactgaatgtccaaggatgtcaataatcatcttgaaatccaaataaatatattttttactgaaacggaagccaggcaccacatgcagtttctctctgtcactggagacagatttggcacatatgcatgagacagagaagggcaactcttcaggccctaatgcacacaggaaactagggatgtgtatatcatacttggcagcaaaatagaggtggggcagccatcactttctgttctcaagcacctctcttttttcctatattttaaaacaggatgaccacaaagaagaataaggtatacagtagcataggatcctaaattaaagcatgagggaaagctagcattagtttttcatctaaagtccatttgggtaggaatgagtcagtgcaaaactgtacaaaggtgatcttaagtcacatgttatgttaccgactctgtggcaatggctgtgagtagtccaggaactctccaaggcctatttttaaattcacttagaccaagcataatgaggtaaagggatgtctatacacattctcaagtttagttctctgaccgtgagtcagactgtgggccatggacctgggcgtctcagtggtagcaggactcattttttccccttttctttctcataaatgacttaggagacacattggagaaccctatgtgctccttttactggaattatcttttaaggaagtactgatttcacctcctgtacatggtttgctgagatggcctattggggtttcccaccagtccacaactggaagtttctatttgcacattttgactgctagttctatatttagtcaaaagcctgccttttgcctggtttcttagggaaatagtctgtaggagttgctgtgtccatttgccttgttcacttgggtatttatttgactgtataccctgattatttcctaaattaacaaaaaggcacagggccccaaatgaaggaagaccccttgtaatttgttaaaaaataagtttatgaaaatgtgtcgtcaggaaatcagagttgtgttgcggggtggggagcatgatatacatttgtgtttgtatgtttctaattgtctacagatttatggcctactgtaacaaagccattgtaagtgtacagtgggagggtcaagaaaccttattctatggattcaaacacattatgcatacaatttacacgtaggcacaaaagtatcccttcaaagaccctccaataagctatggtatagttgaggaaacactagacttgaagtcgggaaaccggagtgttgtcattttaatctcaggctatatctttacatgaacaagagaactttgtgttatttttcatattcgaactctttgtgctgaagattctgcagtcaaactgcaagacacatacgcattggctgatcagaaatgacataaccattcttactgcactgagttgatattcagtcaataaacagtctaatctcggttaaatgtttgcatatttttagacttttaaaaatttgaaatcagcctctcaagttccattagacagttttatcacggacacatcaagttccatgtacaacaggctgagaaccattaagctacaaaatttctaaaattttctccaggttctcagttgctaaattctctcttgaacatttttggggataaaaaactggcagagaaaaagaagaaagtacacctttttacattatgaaacacctatgttcaccttatccatggagttatgccagtgacctaatgcctattaagttcttccatgttccaaaggtctttctgtacttgaaaactcataggtgagtcaggtccttcactgatagcttatagctaaaaaccacttgggagaggggctgtccaggtcttatgtcaaaactttgtcccatacgctgttagtgttagaaatggagccgtcagcaaatagaatctgttgtttcatttaattacttttcaatatgccattaccagaaatttttatgtaaatacatattttattccctgaggcttgtcaatctgagaccaaaattatacaacactgaaaaaaaaaaaaacaaaattttctttttactagttctctccctgtgttactgtgtcatctctcatgcatggtataggatgatgatggtgctcaaacttagccaaagactcttttgttggtattcaattggcagaattaatgaaacaaatattttaagatccctgaatatgtgctaaaagcatataactacactactggctagtcagtaattggtgcctcagaagagttaggtatttattcatttaccaaatacttatatgtcaagcactgttccatgtgttttcttaacccatgtcattgttaaaacaaccctttgaaatgtgggtactgtgattatttccattttgcattgaggaagctgaggcacagagaaagtaaggaacctgcccaaggtcatactatcaattgtagtggtgcaagacagtgggctctgaagtatgttctctctatgacgacactgtgctctgagggagtgagagaaggaggacattgtttggggcccagtgaattaatgaacaagatatctgactaggatctgaagactagcagaattgaccctacagagaatgtttgaccctacagagaatggctggctgttggtgttcacagccgtgagcatagtgtggtccacagcctcggtgtggaaaatggtctctgtggttgaattgagagaagagcaaatgaactggtctggaatagggtgtacacgtaagtagaagataagattgaaaacaaatttagtgccaaaatctgagggaccttgagccccatgccaaagagtctgtataccttatctaatttgtttaatggggccactaggcaattacgggtccgggacccgcatggcaagaatgccttccatccacagcagcccttgatgtgaggtcagaaagctaactgctaaacttgcagtcctgagggaacaccctcaaatggataaacccagctaagcaagctggaccatttccttgggaattattcacctctcaatcaaagaaggaaacttcccaaattcaatccatttgccttaacgtggtgtcccattaccacgaatactgagttgtatacattcttccctagctcccttgaacaagcttctctactacttttcttaaaaaaaaaattacccatttatgacttatttattatttatccccttcctataagggaatgtccactctttgagatcctcattcttcctccatcatgatgatgtgatgatgtaatgatgtagtcaaggcgcttccctggcctaatgtgtatgagggcaggctttgaagtttgacagtcttaaagctagagtggtgtcatgcattgctcacctctctaatcccagatttcctcctctgtataatgggataaatacctttcctatgaacattttcagatttttaaatattaataattcatatgaaatactcagcccagagctctgtacaaaatatattactcaataaatgtagccattgatattattaataatattattaaatattgagaatgaattctaccaaagtgcatggcacttccagtggctgattctgttttatgtagccacaggcctttaccaaaggcaatggcaataaagagagggcacagcaagatctatactcctttaaactaaggtaacccacttcagttagtccccacagcttctcttgcaactcttaccctattagctgtttctggggagaaatttaatgggcatagatactgggtggatagaccataccccagtgatactccagagagtgaaaaagagaagttaacacagggcgtgacttcctatgtttaacttgcagttcttatcttacgttgcccatcagaattatctgtggcatattctaaccatattcttcctaggcctcacccctagagatactgaattaattgttcttgtgggtagagtcactgttatgctttaagcttcccaagtgattctgatgggcagccaagactaagaatctatgatttagatagaagatgggaagccgagggaggccatgggaaagctctgatggtgagtatgggaagaatcaacataaaacaagcactcaacaagtgtgcatctagttgaagccttgcttctcctgcatttgttatctcagtgtgctatttaaaagcagcacaaaaaacaaggagtgaagaccttgatatcaaggatgtgaaagctacttctaatcttcaaacagatattaggcaggggctttaagacttcaacttgagagaaaagctaaggcacctggtatgtgtgtgctcaagtgaaatatttgtgctgactgagggcttcaatgtcaggctgtctgaaaggacacaatatcaacagctttgctgtgcttgtgtatgagtctttaaatgaatatatctggttatagcttatctcttttctccatgctccctcatttccaatttccaggtaatggagatcatctagttcggtttcagctgctttattttgcagatgagcaaacccagtgatgcctgtgatctagatggaggcagatttcctctctcccccaccctggtataccatagtctgttctaatgctgggatcaaggatgaaagtgctaatttgggagtgtcccccactttcttactagctgatatggtttggctttgtccctacccaaacctcatcttgaattgtgatccccacatgtcaagggagggaggtgattggatcgtgggggcccttcccccatgctgttctcttcatagtgagggagttcttatgagatctgagatttttaaggcagttttccttgctcttgctcgcttctccctctgctgccaccttgtgaagaaggtgcctgcttccccttctgccatgattttaagtttcctgaggcctcctctgccatgcggaactgtgagtcagttaaacctctttagaaattacccattctcagggaagttttttatagcagtgtgaaaatggagtaattcaatgaccctttcttactgactcattggtctgatttcttgaccaaagctctgaatattcccatgtcatcctgtctaaccagctgtcttatactctttttttttttttttttgagatgaagtctcgctctgtcgcccaggctggggtgcagtggcacgatctcggctcactgcaacctccacctcccgggttcatgccattctcctgcctcagcctcccgagtagctgggactacaggcgcccatcaccatgcctggctaatttttttgtatttttagtagagacggggtttcaccacgttatcttattcttaacagtgtctgaggtatttttttgaaacacaattcttaccttaactgccccaggcaccacggcagaagaaccatgaccttgctgagaggcactgcatgccaaatgagacttagtttttccaaagtacttgggagaagaaaaacaataatctatatgatgggcttttggcctaaacccatatcctttagatgacggaatttggcacagctcatattctggtttaaagaaaaatgttttgttatgatgtcatttgcctaattaatagcaaaagaggattgaattttccctatgcaatgtcatctagcctttgagattttagagttaatgactcaaatcaattgtcctgtcttctgtgaaaccttcctgatgccttcagttggataaatctacccttggtgttcataaggcattatattgatgcctctgatgttatgcagatatatcccttcttggctttgtttgcccattcaatgaacatttgttgaacaccacctatatgccaagatagttggaagatggaagtgtggtacacagaggatgtggaagggaatcacagaagatgagactatgaaggcaggcccttcaaggactttctaagtagtactcaggagtttgacaaagaggagctagaagaggtttgtgaagtcagatgagtaatataattaggtttgtattttatgaagggcaacatctaaatatggcttgtctattcagcaagcacttattaagtgccttttgcatggtagacaacatgcttgatgctgaagatacaagaaaaaatttaaaatggtccttgccctcaaggagctcacagtctattgagttacctttctgactttcccactagattgtgagctcctggagggcaggcactttcgttcatctgaaaaagagcttaaatttcagtgttaatcctagattacaatcccgcctctattattttaactttgttcacatctgttaactgctctgaaaatcagagctaatactgcctacctcatcagggaaagattaaacgagaaaagaatgagatgtgattgacacagcaggagctctgtgtatgctatttcctcctctatctctgtgcctggtacatggtaaacattcaggacacttctgctgcctgcttggctggagagcctgtctatgcagcctcagtgttgggaggatttgagcctggggtcggcctggcacccagctatggtagttagcaaatctatcctcagctcagtcagtgatcaaatcactggctctaggctgtaaactaacagggccagaattgggttctggactctgaagcccaggcatgcatattgcaaaagtcagaatcgaagtcataggaaaatgatgaaatttcctttctggccagaatgctattatttcaccaagggcaacaaatcttcttggcaggaaaagttgacttgcttgtgctttgtgtaatcaattgtatttgcaagtgatggagtccttctcacagtggcttagaggaggtgttaaccactattctactctctacttccatgagatcaacttttttagattccacacttgagtgagatcatgcaatatttatctttctgtgcctggcttatttcactcaacataatgtcctccaggtttgtttgacatttcattgttttcggagaattttcacagttcattatctcacttcacagttcctaatagtctctctgaggtccatatggtaagaattagtaccctttactatatttgttgaatcacaagtgagcggaggaatgggtatagttgagacccacagaagtgaagtgacttgcccaaatccatatagcttattatgctacctgtttgttagaggtttcctgttgtatcagaaactagtgagataaatattagtaatttttgtcccattgacacatgatggtatatcaggaattctgagctcattttttttttttggctcaataagtgaccttagaaaatccagaatgggatttttaagttgaatatccttctctgacctgtgaaatcactgcatctgtttccctgactttatcacaaggtaacccaagatattgccaatatttacatgtgacaaactctgaaagatgtgcataatgctcccaaaggtcatcatcttcatacctaccttataaagtgcaaatggaattgacctagtctagaataagcaggcgagatgcagagagattatgtgacatagctaggtcatgtgactagtatgcagcaggcttggggcataaatcctagtcctctggctcccgagtccagtgttcattacgctatgtgacatgtcagtattgctgtttgctcggggttaggcttttcctttggaggttagagcttgataactctaaatcgataaacttcttagtatgccacagtaatgctagcagaaagtatttgttgaagcaaaaaatatgttgtttcaaggggtctgctccctgaaagataagtttttttctttatttgtggttttacatctaatttttctaatgtttcaaaaaacattctgtgttcctttaatctacaagttggaatggatacggtgccctaattttcgtgttccctttgagcacaagcaataacacattttaaaggatgataaatagctgtgtaaaatgtagatgggttctataaatacttaccaaaatccctgtagtcagaccctggtagaaggagagaatagtcaaagtgttctctctttccacattcttcttcttcttttaggggtagtttggtagttaagaacacagttgctagacccagacagactcagacttgagtcttgccctacctgtactacctgttagattttagggaactccttaattttcatgggcctctatttgtagaaggatgctaacaatattatgtgtagtttttagaacattcatctagtataatccctatacattttaagtaggtaattatgggttatctctcatgactgtttttatcttcatctgagaccctttctttcttcctttaagatacttctatccatatttttccctagagagaaacagtattagctactcctgcctgtcagtttaagctactgtgtcatgactattttgcatttctaagtttatccttacctttatcatcaaagtgctgactaatgcagtatctgccaccttgtgcctgctcagtaaatacaatttgggttaaactttattcatttttagttatgagtgcaatataatgacatagctaaaagttcgaaagtagagaagggataacaaataggtactgataatgccactcttgtaatactacatgtagctgactggtgaaggccatggactatagagtcatactggaatccaggcttcagtgccttgagtgctctacttagaaatctgtgctttaatttccttagcactgaatgagggcaataaaagtaaccacctaatcaagatgcagggtggatgaaatacatctgaagcatttggagtaaggcctggcccaaaggttagctgtaataataaaaaggtggatggtgacgatgtacatgatgatggtttgtgtgtccctttattcatattgccattcacaaattacttgagtagtcctacttctcctgtttggtttatttgttgcaagaaacatgtgcattagaagattgaagatgattgcgcccacttgaggaaaccggacccagagaggtgaaatgatttcctaaatagcacccagaaagtttatgatagagaggaacatagaactctagcagccaggctgctctattcttattttctctatacttttcttgttggaaaaggacactgttgactcctagttaccatctaacattgtggtccaagctacagagacagtagagcacattaagttctttcagtctggcttttatgctggctttgtgtgatagtgcctcatatccactgaaacgtaagtacttaaggagtggatgggaagtattcctggaaactcacagctaagcttttatgtaaagacagcacataaaaaaaaaaccacttttcataactttatggaacctgcaaaaaaatcttggcttccttcatgatgcttgcccctagagtgtcagcatagcccttgcagagaaaccccaggatacctgtatttctccaccctggccttcctctgagcattgagttgttagcatcaaaaaatcaccacagccacgttgatcctcattttcttcagcctctatagagcctgctatgccagggtcctgggtaatctgcagacagctgctgtcatgcagcctcatatatgggttgactttaccagcaaagaattccctcaccttcgagacatcactgacatcttcatgcacagcacagacaatgaaacaaacaaaaaagaacaaagagggacataaaggttggaggtcatttacatttgcatttacttgaaaggaaacatgctaacttgttgacttgactcacttgatgtactttttcgagatttcacctggaatcttgttcttgctagatctctggatatgcaaatcccatctttgtccaagacctaattcaaatgccaccttttcttgagaatgtcccttcatctcctgagctacaaccatctcccctttctctgtgctctgatagcacatcattaaaacattttacttcggattgatggacatttttgtgtgtctaatattttctactatatcttctagagggcaagacctacttctcaatatctttagcatggcacttactaggcactcagcaagtgccctttgaataaatgtattatttgcaatcatctcttcaggtatatgtagtttttgtgttagaagcttgctaggttgcatcttgcaagagaaacaatgtgatccttcacatgtacttgttcttctccgaatgactttctatgcaagaagcactggaggctgagttcatacgttcagcattgtcagcagaattgagtcctgaatgacctgggtcagtcactacattagatgatttgattagaaaaaagaataaagccagttataacttgttttctgcctattacccaggatatttagaatgatggagatgcagaagcatttagagtttttgatgatactcatggtggtatcatgaaaataacaccttgtgtgtttatggcacataattacatgaaactcattttattctcattagagtgtcaccttgaatcctgttctttttggtcttaatgtttagtgattagaacttgggaagcaatttctagaaccagaatggtcgggtacaaatcctagctccttctcatatcagctctgagaacttgggcaggtaatttaacttcatgatgtctcaatttcctaatctgtacagtggggcagccagagtacttatttcattgtattatttgagaagtgggaggacatagtgcatagtgattctataaatattactattgcaaccaccaggctttgcataaggccctaagtcaagaaaactttcaccgtttaacagagatgtttctctctgaaaggcatgttatttgagaaatagttgttgagatgaaaggggggaggcaagatagaggccagcttgatgagggctttgaactcagccctatcaacaagaagaccatagggctgcatagactgaggagaaacactctttgtttgtcgaggaaaaggaaacttgcaaagggatggcaccagcgcagcccgacagaattctctgtgggccacatctgttcatgccagctgttgtcagtgtgtgtcgcctcgccgagaataacagcaatgattttcactttatagcaacttccatcttgggatctcagaatgctgcataaatgtagattagggctcccaaaatttttgccaagaatgagcatactttacagagcatcaagaatgcgtcactcttctgagtgaatctttattggtgcaaagagaattaaacgaatattgaattagaccttccttcctgatgtgagctttcttcttgattttactccttattttctagatgaccttgaataactcagtttccctccttgacactcagttttcttcttataaatgaagggattcatgtactactaaatggtctccagtgtcttttctgtttctgaaattcacagaaggcagggaatctaaagttgcctcccacattttagaaaggcctaagttgttgtagaattgaatattttcttagcattttattcatgatatggtaagaacccggcagaaaatttttcagtttggtcactggaaaatgacactgtcctttagcttctaatgtgaaagaatatagtattatttacctgtttttccctttgcccacctttaggtacagtactatttattattttattttactattttaagatttaacattaattctctagcttatatctcagattgataagagcagttctacttcttttgatgagtcaagtgaatgaatgaagacattaaaaatgaccatgtcggccgggcatggtggctcatgcctgtaatcccagcactttgggaggcagaggcaggtggatcacctgaggttgggagttggagaccatcctgaccaacatggagaaaccccatctctactaaaaatacaaaattatccgggcatggtggcacatgcctgtaatcccagctactcaggaggctgaggcaggagaatcacttgaacccgggagtcagaggttgcggtgagccgagatgttgccattgcacactgagcaacaagagtgaaactccatctcaaaaaaaaaaaaataaataaaaactaaaaaacaaccatgtctctcaaagccttgtactcagaccacctgcatcagaattagttgggggtacttgtaatatttttggtttccatctttgtgcgcagagagactatatcattaaaaaatgtttgtccttaagaaaggttcttttgatagttcaagactttgtaatgtatgtgaaattccactacaaataagtggatgggttgttaaatctcactggcaaaaggcagatgagttgagagactgaggcacttttgttgcggttaagcatccctttctggaattgatgactggattcaaatcccaggttctccacttattatcacggtaatctttgtactccagctttctcatttgtaaattcagaatagaagccacctaatatggttgcactggtgatgaaataagttactcaatataaaacattttgaacacctactaagcactcagaataccttatttatactcttgtaaattatacataaattaatacataaattaaatactaatgtatttctacctttcagagtttgtgggaatggataaaagattccttcaatatgactactattattttaatcatggtcagtgattgattagaaatattaaatgttgctggtctttagattcactgtcagagcatgatctttcttcccctcggctgcagtgctgacgaataacactgagtcattcatattctctcatccaccttcctgccacatttgaaagacatccatagctcatatttgacagactgtgtgtgagcatttaatacaaataatcgtgcgccactgtcaaatattagcacatgccatgtgtcttcttatgtattactcacagtggctctcagatgaaggcatctacccagctcctctgcctactttcccaactccatttacaggtgaagacgctaaaggggggaacaaaaaacttgtgaaatgttatacaaaactggaggtataatttggcatttgaaccagcttgttctgcctctgaagcccacgctttctccattataccacaatcaatatttctgaaagtaaaaaaggccacattggtctccagcttctggtctaattagcaccatactttaatcagtgagtttgactgtcttgattaacctttacgatagaccatgtaagtttcatatttctaaatgaatatatagagatggctgtaaattagtggaaaaacactaagctggaatcaaaagactcctgcctaactcttggttctgccacttaatatgggtatgattttggctaatcacttaacaaaccactaacttggtttctacagaaagaagaaatgatttcatgcattggacaatattaaataatctagtgtgtgtgtgttgcacccaagtatcttttgactgtaaaagcacatagaaaggtgaaggaattttaatcccatggttgatagagtagaatgccacctcagttcctctgaattctgtccctcattcaagtcctaattcaagctctttaagcacacagtactctctctctctctctctctgtctctcttaatctgtatcatccattgatacacttgaataatatttatacatcatagtatatctttaaggatgatattagtttcttaattggtgtaggctggaccatctcatttaacttatggctcatgcctgtaatcccagcactttgggatgccgaggcgggcagatcacttgaggtcaggagttagagaccagcctgggcaacacggtgaaaccctgtctctactcaaaatacaaaaattagacagagaaattgcttgaacctgggaggcataggatgcaatgagctgagattatgccactgctctccagcctgggcaacagagagagaatccgtctaaaacaacaacaacaactcacaaagtaaattctatttaccccattttatttttgaaataactaataggtagtaaaattcagcatcctgcactggatcatacaattggtaagctgtggatgtgggatttgaacccaagtaagcagaccctagaacctatatatctaaggcatactgattactatcaacgttcaattttttgctttgttcttttatttctccttcatataccttgatttcctgactggattataaattctatgaactggttgcatctcactcattttgatgactgctttaatgcctaattaattactattatttgtggataatttaatatagatttcataggaggctatagtttgctacactgctcgtgtactctagaaacaaggacccttgacttttttctcttctttggctataagcttatcttcttaccatgttgagatactttgatttgattttcactggtcaagcaaaaaaacatgttcttgttattttcacttaggcactttgtctgcctccctgctgaggcccaaaaattcagtgtgatcggtgtgtctgtcagaaggtaggattgcttgcctagggtggcattgttattgaacaaaacacatgccctttctttgcatcctaagtgtcttggattgctgagccagaaccgctctgactcaaatgaaaaccaccttgtgttaggtgaaagatggggagttaaccatttgtttgctggtttgcatttcccacgaaaaactcaaaaacagaaatttacctcgccatggaaagtgatgtgccaagcgtcatatttgcatattaaaaccgaaaactgatttgcatgttatttcagtgtcttgtgtcacgttcaggcatctgtcaagcccactagacagaaacagcttgtacagtaggaaagtgtttttatgcatatcagactgaaaatctaggtgccttatttttatcagcaacttgtccacactttgggctctccaatctctcctaggttcatacctgaaaatactaaagaaaagtctggaaccccatgttttataaagtatgtttcctgttattttctaagagctatccatttttataatattctgtttagataattttaaaattataaagagaaaaactcaaattactcataatatcacaatcctgacataagtcttgttaacatttggatatattcacttctagtagctgtttgataatacttacataggctaacatatactggcccttttgcatatatatttttatacatttgtaattatcagatgtactattttcatatcttcttattttttggcactataatggcaagaattatgacaatccaagtatctaaaataacagattaataaaatcttattttgagcagacaggaaattagaaccagtcagggctggagccgtggcaaccgaaactctgtgccatctttttgatagtgctttattaaaactgtagcttgtaattgaggatagtttttctatgggacaatgcatagaaagctgtgcatggtgataaaacctttttttcccgacattagagcaactagcccattgcattcttccaggcaaccaaatgaagatgaaacgtgtgcctggagtcactgccaggcatgtggggcacagcaaaggccaaaatatggttttagtttgaaaacccaaccttgaataatggttcattctattcatcaaacttttaggtcatgggtcttgcctaggtgaagccatccaatggaaataatgtcttggaattctcttgcctttattatgtcaaatctctaatatataacatccataaagcctaattaatgggaaaaactgagtgtatgttttagccataacattgtggaaataggttcttttagtttcacacaaatagagatcttctcaccccaccgagaaaactcgctttctcctttacggagggcccgcatggaggtttagagggaaggaaccctgaaatgagaactgtgaataaggttggcaggagatctttgacctagattctcctcgactctgaggatttggcgcttctgctctgcgactcgcttttcttacttcttgcctacccggcaggataacatcagtggttgtaccttgtctgccgaagcctaagggaggctgctctgctctaaatagccaagcatgagctttactttactatttgtcttttggtcctaaaggcgagactgtacaagaattaatagttggagaggcagcaaggcatacgttcaccaaatgtcatgaatttcaagatttgtagctaaaaagtactcagagtaattacatcccttgctaaagcaacaattaatgtgaaattcgggtacactacactgaagtcctttatcagcagatggaaaagtggagagttactggagagatctcattctgcaaacattctgcttccaagaagaaaatcatctttgttagtggtttctaagttgtccctcttgataattataactgacatctatttgatatttaatatgttacaaagcttcttcatatgaatcagatattattattctccagtttatatatgagaaaatcaacaatagaaaaagaaatcactggagaacttaagtagtatcttagacatcaggcctaagagccagatgctccaagcccaggcactattatagctgccttgacacgtggagacggagagaggtgggtgtggagagacctcactttcccccagctcagcctagataaaacccttgtgtgcagagaccagggccccctgactggatgcccaggccttttcccagctgcagtaactcttccaacaactcctcctgtctgtaattcagaatcatccatccttggctatgactccaaatttggtttaagaaaaggcattttatgggcatcgatgcatggcatgagaaagggaatatgaggaagtagagattttaagaaaatcaagatttcgaaagttgaagatcaactgggatgagtttcaaagcaagaatcaaacttttaaagtcaaaatttctgggtcttcctctttgtgtccttaaaattcattcttcaataaaatggaacataagaatagaagaaccaagagcatgcttttctaatcccaaggagctgtgaggagtgttcatttagaagatttcaattcagatagtcaggtatccaccttccacttctttccttctctgtggccatcgcttttaacctgaaacagaagaggtatccagcaaatcatctgcccctggccagaaggggttctccttccatttaagcagtgagatgttgagagtagagtataattcagtgagagtcaaaaagtagaagcagccacaggaaattgcaaactgcagacttgacacagctaaatagaaggggggaaaagaacgaaaatatcagaaatatattttttctggcaggctttcagctctaaaacggggctaattctaccttttgaaaagaagataatttcaatgtttcttttttttcaagaacacataattgaagttattttccctctgagggaaggaacctcttgtacatcactacaaatggacaagaaaaatgagcagctctggtacccagagtgatagagtattcattatcatgtaatctttttgaatatcttggctgccttttcccggtgttttatccgcctgagcggtgcttttctggtaaggttcagatttgcagtaaatttgagttatctaacaccatgtaacaaagaaatcaacagcaggtaagcactcaagaaagaaaaatgatcacgccaaggtcagccccagaggaactcagggggctgacattgcgacagatagtgggtatccattttgtaaattggatccttagcacacaggttaaagtaggtaaattgtagtaacaaagatgcaagatggtgtggtgttttcctgggagccatttgcaccttagtgcgggctgtttcccatgcttcctttttcctttagaaaggatgatggatatttttcttctccactcagaaaaggggcagtgggatgataaggtgattaacctttgtgtgttcttgatttcatgccccaagtgtagtgaaagttcagtaggctgcagaaaccctgtgacctgcccattgcttactcagattcagaatgctgaatgaagttctggatgtttcaggggatgctgacaactggcttaagtcctctcataaatggaaatctctgtcataatgaggtttccacttactcagtgtgtctatttttatagactacaaaggatctgtaaatatgaatatctgtgatttcactctaaagattggtaatgatatgtgtcttgcatactatgggcacaaatgggcacaaaaaaatgatagagtagaaccaaaggaagctttgaaaataacatgttacacataaagaaactgaggctcagaaaatggaaatgatttgagcaaaatcactggacaacttaaaggcagaactaagattaaagatattctgaatagtcaggtcttctgtatttatgggtttctatgtaaatgtataatcaaataccatgaagtgttatatgaatatgacagatactgttatgtatgttattcttaatctagtggagtttccttcttcatcaagggtcctattcatgtgtacattttgtttcagaagcaagtcttcattactgcatagtcccacccataatgtttaccagggatttagacccagatttggctgtaaatttggcttcatattaagtattttcttgaatgacaatcacctgggcccctagcaagaaaagaggaatggcaaagaagaaccagttttagataattttcagctgaaaaaaaaaaaatctttattttaagaagggaaaatacagaaacatagaaagaatataaagcattcaatttcccatgactttcaacgattaacctttgagcatattgtattgccgtaaggcaggtcagcctggccagcgagtgacttatctccatgtggtagttcagggcccagtctccatccttcctgtgcctcacaaggccacatctaactgcaaggagcatgggaaatgtagtctagcagtgtgcccagcaagaggaggaaatggattttggtgagcagttagcaggctctgccatgcttagtaaacatcagtcctttttaaagcatattagccactaaattgctcagaatgccacgatatctggctgcgttttttttttttgaaagtgtcagtggtcttggtgttagaagatgtttgccaatacacttacttcagaagcatgactttcataaaaactcagctcccatttttaaatctcataatgacttcccattacttaaaacaggcttggcattgaccatatcttacttctcttttctcatcctagttctgtttttttcccttttttttttttttttttttttttgagacagagtctcgctctgtcgcccaggctggaatgcaatgatgtgatctgggctcactgcaacctctgcctcctgggttcaagcaattcttctgcctcagcctccagagtagctgggactacagacaccaggcacccgccaccatgcccggctaattttttgtatttttagtagaggtgggatttcaccatgttagctaggatggtctcgatttcctgacctcgtgatccgcctccctcagcctcccaaagtgctgggattataggcgtaagccaccacgcccagcctttcctcttaacagttttttagatatacatgttcctcctgaaatgcctttaactttcttccttctttcttttcttcttcttcttcttttttttttttttccggctgttgtacgcaatttattcttcaagatcaaactacaggtcatctttttttggcagccttcttccgtctcagaacactgaattcatacctgtgttttagagcttagactttattgtaattgcctattttcatgtctctttcttcccaaactgtgagttgttagagacaggatctctgaataatttgtctttatacttaaagttcttggcacttggtaatcccgtaggagatttatgttaagacaattttgacggagtcctctaaaatctgtcgctcagtaactcacctgtggatcatataacgttaacttgcctttagtaagagattcgggtatttcagaaacaaacatattagtgattaagattgatacttacaagaatgtctttttttaagagaaaggtttgcttcacaatgtctttgttttgctatttggcagcaaacctccactctgataaaagaaatctttgcttagataatagactcagactaaaatccaaacagccgcacagtaagagaactagaaagtcttggagacaatgatatcaaaaccccgagaggcattgcagtgaagaagtatgcccaactcagcacaccccagtttcaacgttctgctgtttttaagcagcggtacctctacaaggttgctcacttatcttcttaagtctctattttctcatccagaaataggattacatgtcatacagggctgttgtgtaggcatttgagatttcacatctgtgaaagtaggcaccttgaaaagggtcttgcaaacatgaggaattaatatgctacagtgaatatgttgctgatacaactcacacttctacttctgaagaaacgagaaacaaaaataacacaaactattccctttcagcacctcccaccacaaatattcaatcgtgttttattacccatacaatatgctagaagttgcttattaacaaataagttggacacagttgttcatttttcttaggaggtattgagccctaaacactatcgagagagaggtattagagtaggtctctgattatgacagtaagaatagtactggattactgcttctaggctcgaacactgaaagttttaagctgtcttctttggtgtaagagacaactcttaacggaggaaccctgtgtttctccatggtgtattccacaggtgttaagtattctgcactgggttagtgacagccgtggagtggaggtggaggctgttctctagccaaataaacttcagaaatactgaaagaaatggtctctcagaatctttcatcataagaaaaaaacaggaatccataattagcattagataaaagagtagaatctaacagaaaatagcctttccaagtgttatttcagaaacagcatagcaagcaaatagagtattcagagaacaaaaagaatgataacgtttttctcaaaatctgtgaaatattgacaaggtaagtactttgaaattagatttatacttgaaatgtaagtgctaggggtagaatctaaatttctggcttagatttataaaggacaggatcggccttcttgctgccttgtctatattgaaagggaaactgatattaggttgagacaatgataaattgtgtctgttctctgagggtccatcctaagactgaagacaggaattatcaagttttctctaacagtcgtttggcttaattaaaacaacttgcaccattattattagaggtaatattttatacttttctagcactctctgtgggaagcatcgtttgcttggggaaaaaatgcatggcacttggagacaggtgacaccatattttgggctcaaggtctccctgtattgcaagcctggagaaaaggtgtaggtcacttcccaacctcattttcaattccactacctgaactgtaataatccactccctcagaggcagtttgagagattcaaagagatcctctttgttacaattgtctgaaagtagttaaactctatttatcatgaaatgtgggttatctcactttaattcttacagagactgtgaggtaccactggcaagtccattgatagaagagaacctgaagttatgaaaggttgacaagctcacctaaggatgccaagtgaaggtcatagtcaaatctctgtctctaaccttaatgatactgccgtataatgtattcctttatctctggccaccagtatattagataaactcaccatctcatttcagtcttgctgctctcccattcaccctctacttcagcgggaactttctaaatatgattagaacactcttctaaaaacacttaccgtggtttctaatgcctggatgttcctaattgagaacatgcaaatatattccccgtggtctgtgaacttcttgaaattgtaagtaaattttgtgtacactgcagatacctgttttgttgttgttgttgttgttgttgttttgtcaaaagacagtttaacacattagattttgagacttgtccacgttcttacccaaggcctggagcccctagctcaccgagaagccctaaacatctcagcatggcatggaagcagtaattaactgacccttcctatttttccacctgtccagaccgaaatactgaaccacttgtagtttttcccactcacaccaaactacgtctcaactttgaaactgtgctcctctcagggtccttcacttggcctgggttggaagctccaggatagcgggtcatgtctagcatatctttatcacttgaagtcatcatgtttaaaaagatttatattcatggattacaaaagtagaactacttgctgtacaataaagaaacaaatgtagaaagtgaaagtcccctaagattccacctgctagaaagaatctcctttaacatttccgtacctggtctttatatagacctgtaaataaactgtagttactttatcctattctgcagttggatttgttctttatgaaacatgtcttgttcatctttgcaggcttgttccatagatttacaatgtacgtatctgtcattgtctatttaggtgattcttttgctggttagtttaccttgttagtccttgttcctcctctcaaatatggctcctgtgaccaaccttcgtcatttaattttattcacttgtatgagtacttctgtacaattttcctggaagcaagtcacatgtatgcaatttaaagtttaacaatactggcaaccattcatccaatattcatgtttatgcaaatacctatcaatatactatgctatatatatatataattttttttaattttttctttttttgtgtggggggaaaatagaatctccctctgtcaccaaggttggaatgcagtggcacgatcttggctcaaactgtaccaccgggttcaagcgattttcatgccccagcctcctgagtagctgggattacaggcgtgcattatcacacctggctaatttttgtgtttttagtagatacggggtttcacagttttggctaggctggtctcgaacttctggcctcaagtgatctgccagccttgatttcccaagatgctgggattactgatgtaagccactgtgcccgacctgtgctttttataattaatcatttgtgcatgtttcttacccccactagactgcaaaactctcaaaaacaaaggttgtgtgtaatatatcttcatgtccctcctgggttcttacagaaggtacacaaaataaaccctgtaagaatgagtggataaaacaataaacaaaagaataactgaataattcagtagcttctctaatcctcatatgacaggtaatgtttacagttcagaggaggtcctaagtttaacctttaatgtttgctaataaataagtcagtcaaggatgagctcttgtcctgactttatcaaaactagccctccctgatttttggggggctctcagtttccctgtctcacaaagaggagattagcataatggttcttcagatcctggcaagcaactcaattttttttgtctgtaacctgagcatatgccatagtttactcatcactgtctcatctctaatccaaattgttcaacaatgcaataaagtctcaggctaaggttagtgaccagcataaaatatttttggccttttcagccttctgcgtgtctgtacttcaaatgtctgtatattttgggaaaccaaaaaaaatggaaattattttagagaaaaggccaaataggtaccaatcaaccttcttgactatgtttagaagacatttaacgctttagacatcacacaaatgattaatacccatcttggagttgtagtaaatgttgggaatgatagcatgtgttcagagatttgtactttacaggattttcacgtccaagagctcacttggtgtagtgaagataataggagaatgaatatgtagctttcagttttgttgaacttactcttgtaaacattctgaaaagagaaccttttggccaactattttaacaatgcataaatatcaaggcaagagcattcccaacccacatctctgcccattactcatggcagacatcatcatcagttctaaatttaaataatagcatttctgtttttatcacacttttattaagaatgttggggtgagatattagaaatggtcaaatttataggcaatggaaaatgtgataaattcccttttaatcacatagcacaaagctactttaaatctagtatatggcctttattccttttttacatactttttattcttcattgatgatctcaagtactctctcaattgatatttgattctcttgcattgctataattctggctcgcccgcctatttattttttaattttttttttactgcagtatgttttggggtacatgtgagttttggttacatggatgggttctatagtggtgaattctgagattttagtgcacccatcacccaagcagtgtacactgtacccataagggtggaatgaagggggaatagacaaaggccccagtggccctgcatgtcccatatgggtacaggggatgagggataaaagactatacattttatatggagtctttgatccctgcccccctgcccaacctggccgcgccaaagccccaaagtccatcattttgctctgtatgtcttcacatcctcgtagctttgctctcacccacccatttcaacaccaacccagtgtcaatgctactgacttatcatcactatttgaaatctggctgtttgcagtgctggaaaaatgaaattactcaacttccttaactggaacaaaagaactagaaccaaaatgttcgctttctggactcctgtactcgataagatttatctcatttcctatctcaaagtttatatgtggtcccgaagtacacaacttccacaagctctttatgctgcttgacttttttcacctgagtgtgagaaacttctacctgtatgttttctcccttttagctgaataaggcctagcctgctctgctccctctcttcaggaagtccgtcgcgggctatgcgagaggtcccaccttatacccttattttgctcttcctgcagctgtttttctttaattattaatgtgcctgtatctctcacttcactgtaaggttcataagaaagaaagactcaatttatttttctcataaatgtataacagcaaatagtgattacttagcaattgttgaacaaaatagattcttcctattgtaaacatggatttctaaagcctgatagatgactcatctagataaggcaaatgagtaaagagatgtgtccaaggttagccactgaataagtgataaaactaattctaaaacccaggtctcctgacagccacgtccagtgctttttcctctccagtgcaatcgctgcttgtttaggctgactgccttggttgatggtctaggtggcaattaaaggactgtgtgctttctgcctttcagggtggccattcagggcaactggggccttcgtcagttgccccttcattccgcccagaggatgagcttgagcacctgaccaaaaagatgctgtatgacatggaaaatccacctgctgacgaatactttggtgagtggggcctagagctgacttctgaagtaactatcttgctctgatttccttccttagtaattggaactattatcagctccactggtaaagtatttgagtccagatgcatgagagttgatatacatccccgcacaactaagtaattgtaggatttgcatttgcaagactgccatagatgtgatgtctacttagcttatactaaaatttcagtggtccttagagtttccttagatacaaattttattgttgagacttattttttaccagtctaggcaacatggggagaccctgtctccattaaaaatacaaaaattagctgagtgtggtggcatgtgcctgcagtcccagctactcagaaggctgaggctggagaatcacctgagcctgggaggtcgaggctgcagtgagctgtggctcagtgagctgtggttgtgccactgcactccagcctggacaacagagtgagaccctgtttttttgttttttgtttttgtttttgttttttgttttaaaaaagaagacattttttgacaacttattagcttcccattaggcagaaataggatttctgtgtatgttcccatttctcactggtctaaagattcaagtaaaaaatgtggaattggatattgtctgatatccaatttccagattgtactcttaatttttttttctatctcagttgaagaaatgatgttttctttgtagttttaattttcccctcttcaaacttgttaataactaggaatggttaatccttccaatccatgaatataatgcaaatttatgaattatatgccgattgtgaggttctgtggacgcataacctgtcctcagtgaggttaaaattgttcagaaagaggtaagacaagcatacaaataattactagtctaggtagaaagtgataaaagacatgagaaggcttaggtcaattgttgcaaattttatttttattttattttattttatttatttttgagacagagccttgctctgtcacccaggctagagtatactggcgtgatcttggctcactgcaacctccacctccggattttgagcaattctcctgcctcagcctcccgagtagctgggattacaggtgcccaccgccacacctggctagtttttgtatttttagtagagacgaggtttcgccatgttggccaggctggtcttgaactcctgacctcaggtgatccacccgcctcagcctcccaaagtgctgggattacaggtgtgagccactgcgcccggccagaagttttaaaagctccatttattaggagcatccggaatactttggtaaagaattggtggcacttgaatctgagccctttaaaccagtgcctttcacattttctgtggtagaagaccattttcctcccaatctgttggagaccagtatttttgttgagtcagttaaaattaattactagggaaataaaagacacaaaataaaatggaagatgaaattttatcattattagagttaactgttaacgaattactcttttaaatttttatactagtttctaaatattaatcctttgttcctgtatttatctcatccagggtgataagcatttcttagacacccatccatggaccactttttgagtggcactgctttaaggacaaatagagaaacgacatttggggaacagtattagtaaaggcacaaagatggggaaattgcacaggatttttgcttcttcaaatattttctattttcatgtcttttttgctcctatatgggaatatgtaatgacaggtcaactgaccacaccagtccaaaaacacacagtagatgaagtaggaggtattaggatatgaaaaccctggcttttatttgtgttggggtggcagtttagcttagctaaaagagcaaaaagagtgggaatgaaacatctggttgtggtctcttctctgtccctcgctggccaagcaatactggcatgtcacccatctgcctgagccccatttcccacctcactatatcaacggttggggcaaatgttctctagcatttctttcaacagtaataagttcaatgtacaaacatccttaatctaaagtataacaataaagctaaacataaattgatggagattaacaacaatgcatggagaacagtaaaacaaaacatagaaaatccacgaaggtttctagttacatcaaaatacacaaaaagtttattaatgctcttgtcattgccatgtgaggagggtttataatggggtctaaaatacattttttaaaagtgaaaaataaggtctctgtatttaggtcctattaaaaaggaaaagctgacttaccaagtatatatgcttcaaatatcatagcaacaaaatatattgccacaaaaaaaaaactgaacatagatgctaattgcatgaatgaatatatattgaacactctgggaaacagatataaattattacctttcccttcaagaactgtccaagctctactacttagtagcttagaaaacttgaacaagtattattccctctaaaccttcatttttgttttgttttatctgtaatatgggaataataactagcttatactgttgttttaagaaatggatgaaatatttatacaaagcacttagccaagttcttggcatgtagaatatgctcaatacaatactcaaggttctcccatgctcttggggcttatagtttatttaagacataagatatgctcgttaaaaatccattaataatgctcaatttaagtttaagttcctagcaacaatagaacgtatgtcactggtaagtaatcattgccaaatggggatgaataaccatttgagaatttggaaaaatggctaacttttattgagtgcttatgatatggcagcactatattttatttacattataggaattaactcatttcactcttataggaaaacataaccctgtgaaatagatactattatcattttcagattttgaaattaaggcacagaaatattaatttgcctaatgtcaacagctaatacattgcagaactgaattagaatgcagatctgtacatttacacaccacactgtaaaagatggggaaagctagccaggctacatatttagaagagtgtttatggtggagattagctttggacagatgggaaataagagatgagcattctcttctaggtacacagaattaacaaaatataagttgaggccaggattatttaaagaaaatttacgttatgtagaaaacaaaaaaaaaagtgcctatggtaatattcaggctgctctgctaggtggtggtgggggtagatgtgggtcttacctttgaagttcttatagtctaataggatatgtgtacagagttatggtgttataagcacaaggcagaaagtgacaagtgacttaatcaatgttcaccaagtgttctttgagaattcagaaaaaggaaagagaaaatcaagagagagaaatggaaaagtatttatggaatacttagcctttgagtaagtctttaaaattgtgctaattgagatttggaagtaggaagatagtagagaagtgaagtcatttctcatgaggggagtttttgacataacagggaataaaaccactggagtgaagtgtccacgtgagaagtagcaaatattgggaaataaggttcaagtagtaggttaggaccaatctagggaaggctgtcaatgtccggctaaaggctaagaacgttattgtctataatgagcccttgcacattgagatcacatgccatgagaactgctctgtggatagtggttaaaaacatgcactccagagccaggatgcacttcttaccagcaagatgaaatcaagaggcaaaggactagtgaaaagaactgtcctttattgttccgtgctttaaacatttctcaagcaccttctctgtgcctgctactgtgctgggtgttcaggacacccaaatgcagaggctctgccctcatggggctcacgggttcctaggaaggacaagagagtcacagatgtcaaggattttagtgcagatattagcactgtgttgggtgtgactgagctgctatgtgagagtccataagtctgcctgaggatgagcggaaagaatacatagcagtgtgtttgcatcagcagggcctgacccaagagcgataaagtcttctcttcctttctgtcagagttttacctttggcctattctggactgcaaatagcattgccaagcacttcccttaaataacttctcttttttgcaggactatcctctcagccctgccaaaaccccatcacctactctttctttactactttgcctatttaatgctggaatttttatttaaactgtagctgatttactgaaggtaattaagtgctttcatgctgtagatctcctgctagactacaggctgtacttgggagtgagagtgaacaaaatgtaaataaatgatgtcaacagagtaggttcctttgtggtcatgttgctttgcttccaagacactcttttttttttcataagtagaatgattcatgaatatgttattatagttcttgtttctttgcggagcccctcatcactcttaacagttttatttatattgaattataattatcgtatgcttaaaagtactgggagaggtaccagaagatcacctcacagatgacttaagtacaaaggagaaaaggaacttttataatggagaggtctcctggaagccgtcttaaaccaagtaatgaaatttaacatcctcaataatgggacagactggcatgtgccaactgaatgtaggaagtctgcagcatcgtctaggcagtggtcttgctaaaatatttcagctctatccaaccatgaggaagtaaaaaatgcagatgatgggacatgcttcaagacacctgtcctgaattctgcaacactgtcaatgttataaaacactattctagattaaaggaaattgaagagacatgccattcaaatgcaaggcatgtgtcttgattgaattctggatgaaaaaaaaaaaagctgtaaaggattggtagcaaacttagagaaatttgaatatcaatgatatattagataatacatcaatgttaatttcatgatgatattaatggtgttgtgattatgtaggaaaatcttatttttatgagctatttgttgcagtataaggtgaggtatgattgtgtctacagttttattttgaaatattgatagagtgacagaaatagagagagagagacagaaagagagagagggatgattgacagatatatgtagacaaacagagatagagataaatgtggggaggcagaatcacctcaggttaaaacagctagagatgctataactgcaacaactataaggactcccctcctctctaaaagtgtactgaagcctgtcacaaatgaattaccttaagaatcccttcttgggtgggtagagagattgacatttctgcaccttctcaactttcctgttttaatgactacagtgggtctttgaaatttcccgttatcgttttctttttttcttattttttaccagacatacacatcttctattgctggtgagatgaggacaattgtggtagtgatgacaaaagctgatatttacctagagctccatatgtttaaaaaaccaagtcgcagccacaacatgactggcagacctggcgatgatgtcttcatttcattttttggatggggaaatagagattcagagaggctcagtgagttgttcaagctcacatagctaataattttggaatttggcctcactcttctgatctcatgtctatcataatacattaccattacagaaaggtatataaatgctgttcctgctgaatgttagtaactggctgtttctctcccatgtcataacttttccttatgaagttatgatcttcaagtgagagatggagggactgcttctgcccaagattacatgtttgtaatctggacttcgatgtcactgatatgtttcaactatcttaaacatcctgaattaactgctgtgacatggctgaggtacatacattaggaagaccgtctaccgaatacctacctatcagccattttgcagtctgtagttcttctcttgaccatgggagaaggcaaatcactaatagccaccgttcttattttttcaagtcaggtttttttataaaatataacaaacagggacccttaactgtctcagctgggtttttttttaatgatttcttctggaaaggtgatagttttagtgtttccatgccttcttttgtccatgttcattataacttgtgactgtcgcattacagtattaggtaaatgccacagatgttgaaccatgataaagcagttggatgagtctatatctctaaagggaagatacagtctctatactgtgggcatttgccatctacttggacttaagttttggctataacagatttccttaccatggacctgtgtctttccattaacactggtgtcattgagagggcctctaaacactaccctgtagaggaaagggaggaaacatagtagaaagttgggggtaggagaaaattcttacccagttcaataaaccagacagtgagtgtttagcccagctcatctacaggaagccttggttcaagtgcttgcattttagagcaaattttttcctagacaactagaaaaatatgttgatactaaaggaggctctcagttctagtgatagatacttaaaaagaacaaggggtggctcatgcctgtaatcccagcactttgggaggctgaggtgggcagatcacgaggtcaagagatcaagaccatcctggccaacatggtgaaaccccatctctactaaaaatacaaaaatcagctgggcatggtggcacgcacctgtagtcccagttactcaggaggctgaggcaggagaatcacttgaacccaggaggcggaggttacagtgagccaagatcgtgccactgcactccagcctggtgacagagggagactccgtctcaaaaaaaaaaaaaaaaaaaaaaaaaaaaaaggaacatggggcgatgaagtagctgtaaattattataatttagagtcaattcagagcttataatagaaaatggaaaacttttaaattgagtattaaaatgaataggagagaaaggtattattctcagaaaattgggacatctacagggctagttgccagttttaaagtttgttttttcaaacagttttaggcagctaaaggaaagcaaagttgagtttttctccagataaccttgagatatctctttgaaattgtccaagacttttctgtgttggttgatacagccacagccttaagtaatacacccagagcctctaagttttatgctttcattcattttgtaagagaaagcgtgtttgtatatgaagcttttcatacatgcatgtctgtgactatggcataattttttccaaataataatattctggctgaggagccctcaaggctgaaggcaacactgttggaagacagtatctctggaaatggatgttgtaatacatctaaggatggactggaaatatctgacagtagatttttaagcatagagctgtaattatcttgacattgtttatatgatattgtcttattccttctttaaaaaaaagcagaagtatgtgagccttaaaattattgagtgagctatttgaagaatccttcagagcagtgccaggtaaattatcttctcagaacttagcatttatctaaggaaactttttgttcatctctgagtattgttagtaggagtttttgagaatttttgcagaaaaccaggagtttgttccagtggaactaggccttcatttttcaaaggacagctagacaaaagtgaaggcatgaggcagcagggacctagcacatgctaagccttgagagaagaaaggcgttaacatgaacaaagtgctatgatcggtcactttattggttatgccagctcattgtatttggtgccttggtatcaactcaattaagatgaaaatggagggccagtgaatgttcatgaatagaaacagaacaaaaaaaacaatgaggaggatggtccattttctttctgcactagtgggaccagttgataagtgagcttgtccagaggacttgactaagatgcttaggaaattagaaaccatgatttgaggtgcagttgaaggtatggagagaggaaaacctagagccctcattgctgttgaaagactatcatgtggaaaaggaatttgacttaatatttgtgattcaaaaattagcaacaaaggcaagtgaggggagtctggccagttcccattcagcgtaatgaaatcactttcttaagagacagaagaaagtctttgtaaaattctaggtcagaatctaataatcccttgttggtgaaaatggtgataggtactcaagcaactgatggatgattagattatacttcataagtgctgtccaattctaacattttgtgacttaggcacaaacaagacgctaaacttgtttggaagttagcgtcttgcatccaacttctaggtctacccctagattatcattattattattacatgatttcaactaacatttatataatgctttttaaagcacttttctacatgttatatcacttgagcaagacagcagtcctacaaaatagacagtgtgtttatttccatttgggatatgaagaaatgaaagatttcagtgattaagggactccccactccccagggctctccactaccctcacaagtcataaagcaggtaagtagcagaattgccctggggcacaggcctacagactttaaattcttttcacttttcaccccattgtgctgttaacaccatgttgctgaattggtcatgggccataagatagatgagttaacatacttcatgttttagctttttaatctgtataaggaacgatgtgattactttgtaaagtgcttagaggatctcaactgagaggtgtaaagtaatttgtatttcatagtttgtgttattatgtgacaagaaaatggtttccaaagtgcttctatcaattacaaactgggaaatgactccaggtaggcagctacctttagtggatcttgttttcacagataaatgacctaattaatgaaaaaccccaaaaccacaatggaagaaaaattagacaataagtggcttagagagaaggttgtattgatttggggggaaaaatgggttttttggttttgtttctctctaactttttgtttagggtatctttgagttgtgggaatagaatgttctctagttaatgaggcatattagatatattttcttttgtggtagtgacttctggtaatgtttgttcagagtagtatatgtttacagcactaaataaataataattctgagcattttatgtgttctatcttagcatacattaattttttattaatttggctagtgtgtttgtttgtttgtctgttttgtgtcagagtttcactcttattgaccaggctggagtgcaatggtgcgatctcggtgcaccacaaactccacctccaaggttcaagcgattctcctgcctcagcctcccaggtagctgggattacaggcatatgccagcatgccaggctaattatttttgtatttttagtagagacgaggtttctccatgttggtcaggctgatctcgaactcccgacctcaggtgatcctcctgcctcggcctcccaaaagtgctgggattacaggcgtgagccactgcacccggcctggctaatgtgtttttaagcattgatttggaatcccagacttagagtaaagaagaatgtgatcttagaaattatctaggaaaatccttcattttctagaaaactgtatcccaaatgacttatccaaagccatgcaactaggtgtgttttgaattctatggtcaaaattttctttctgagtaatggacagtctccgatggcatgaagaggaatggcagggctgtttacaaaggtgcagacataggtcgggcctgctacttttgtgatctcagaccgtagatccaccttattcaaacataagaacacattgtccttaaaaagaataaaataaataacttttaaggaattttgtgtatgtatttttcaaatacaaaagaaccaaagttttcttattcaaaagaaacaaaagagattcccagtatcttttatctcagtgtctttatccaatttacttgtaatatttcctatctgttttcttcactaaatgtaagtctgcgtgagggcaacaatttatgtttagttcagtattgtgttcctatcattcctggaataatgcctggcacatcggagatatttaataggtgttaatgaattaatgaactaataaatgaaaactgtgagcagactttcacacttctgtgacaggacatggtatatagtaaactatagggaggaaatacttcattcatttaagatatatttatttagcaccttataaaatcataaaacgttagagctggagggaatcttaagagactaggaaaacctcttcatttttagagatcatgaaaatgagtgagatttttagggtcccaaatttgttagtgacagagccacagagtataactcagattttctcattcctttttttaattcacttaagggcacaggaaaacatataaactagagtaagacatggctgctacatttattgaacttaaatttaaattgttttaacacctttggacttgatctcttttgcatgtatcttctgtgaaatttaaaggttcaactggtcaatgaagagagtacttggttaagattttattttttaagtactgggtcacatttcctccacctgtaggtttcatctatagtctttggttcccaggaccatttcgtaccaccacaattttcttctgttctaatctaattggattggatggatagggcatcacattgaaagaaacattcttttcttacgtttacttgagttgtccatagcaacctgtcctgaaagattgtccgtttaaagtaagcctcttcaagactgtgaaccaccacccaagattggtgtttcataccgtcttgatacaaacagcagacatccagtcattcagctgcgttaggatcactatctctttatcagaagaaagaagagaaaagtagaagagagatttctacttcataattgaatgttctttgcttattaactgtggaagcaaacttgaaattctgggagagaaagcactgatggggcacacattgtctgtggtgcaaagaaagtctcagtttggtactggtacctgaacctgcaagtgctaattatgcatcttctggtattaacacacaaacacaattaactgtgaactcagctccttttccctttcaaaccaccatcattcccccaacctgcactttccccaccactttctctaaaacacacagataagcatctccttacagactttgaagtgacattaggattgtcagaaggcataattaattgactgtcagcaaagctattgtttgaacatctctggagttgtacttggtaggcatcttgtttttttgttgttttgttttgtctgagacgtagtcttgctccgtcgcccaggttggaatgcagtggcgtgatcttggctcactgcaacctccacctcccaggttcaagctgtgctcctgcctcagcctcccaagtagatgggactacaggcacgtgccaccacgcccagctaatttttgtatttttagtagctatggggttttaccatattgatcaggctgatcttgaactcctaaccttgtgatctgccagccttggcctcccaaagtgttgagattacaggcgtgagccactgcacctggccctgttgtatttttaattgaccgattctttcctctacaaatatttattgagtgcctactactcaccaattattgtagtgtatactatgggagataatggaaatgatataatggccaaggagagaaagcatttgtcaaatcctctagggccaagggctttgatagagaacagatttcacaactggcagtggaaaatgtattcttttccatcccggttcagaggattttgccactgtacttgtgccatataaaatgctgaaatagttcatgagaagaggtacaggcatacatcttcctggtgtgtgaagatgagtggcaatgcactgtctctggttagagttcccaccaaaaattgtaaaatacttaaaaagaaaaagcaaaaaatatccgaggcaattaaaaaaaaaaaaaaaaagggaaatcacagaagcaggtccaagttaatgaccttatcccaattctgttcctaagtctgactctgatgttagtcatgttgtatttaattcttccagatttcctatagtactgtacagctctgatctcagtcctcacttggttctaaggtttgaccatcaaactttgagcttgcatgagccttgaacttggctctactcctatctggcagtgagcatcatttgttaaaattcaacaagagcaaacagaaacagtgtacactagtgacttgctgaaagagcctaagaagatacagtaggcaggagtaatggaaatgagtttttaacctccactgactcaccctttctttcctagtcacccttagggtcatggcaaagttacagaggcatttagaaatcatcttgcttgaaagcttccctttcttcagtcattagtgagcatcttcataattttttttaccatatatgtaaactatccatagtattatttgcctaatatttttatttaaatcaattaactttttatccgactttgtcttccttcatgtcaataacatctataatttgattctgtgggttgaagtactaagttgcttctttcctgtaaaagatattaaactgaatactatatttaaattttaaaaatacggctggaattacagatcacatctgtaatcccaacactttgggaggccgaggctggagaattgcttgagtccaaaagtttgagaccaacccaggcaacagagtgagacccccatctctacaaaaaatgaaaaaaatattactaggtatagtgatgcacatctgtggttccagctactcatgaggctgagataggaggatcacttaagcactggaggtcaacggtgcagtgagccgtgattgcaccaccgcactccagcctgagtgacagagtaacagtctgtctcaacaaaacaaaacaaaacaaaaaacaaagttcatttcatgcaccagctaatgtttgaaatattgagaaatgtggatatcattcaacaagaagaaaaattgataggataccatggtgaaagaaatggtgtcctcaagcttacccattaagtgtataaagcataattttttcttttttcttttgcatgcggagtcatcatgttcttgtgaaggatcgtgttgtgttgttagatattgttccaggcatccagcactgagaggcattgccggcctgatactgtcccactgactcactgtgacatcttaggccggtttctcttccataggtctcatctctcatatcacgagattagaacacatgaactattgtgatccttttgaccttaattcctttgcctcaaacacttttcatatattgtcctctctacactgttaaaatgtaggtgagtaagaaaagcagctgccccatataaaatttcagtgctgcttgcctcagagttctggagaattgtaaacaaacccaagaattatatttcctagatcactttatgctctgcttgttactgttacccatttcctgaggtttatgagagggtcactgccttgaaagtagctttcaatgccaggtaataaaagtggaataggatgttgaatatgatgaagaataccatgcactaagtgttgggtacactagcagcgtcactgtgtttcagcattttcagtaatggtgttcagtcatggtaattggcataccggctcagtaatggtgtttactaatggtaactggcatatgtgagtgatattagtgtgggtaaccatcaacggagcaatagtctaatgtagatgatacagcagtaataaaaatgaataattcatcttttgtcagatagcttagtaaagtgagcactagatttggagtcaggaaatccaagtgtaagtcatcttttctgtgtgacgttagtgacatgtgacatttgtgctctccttagagtattttgttatacagtcttgagaactcttcttttagcagctttaaaatgagtgttattttgccagaagaactaacatatccatggacaagtcagaagttaaaaccaaattatttcagttttcttgtttagattagctcttctatagaacctcagagtcttcctgaatttcaggtatttcacttattaaaaagataattatccctatctattttatgtgcatattgtgggaatcaaattaaataagtcggtatgaaaaagttttctaaaccgtagcagaagaccaaaaatttaagaggtgttagtatctccacctagtgcagcatctggtttgatttgtgtcatttatgattagtgtgtaataatcattcctctaaattgttaacgtcagtgtttatctctatttgaattaacactttgtattttcttatgatgttctgttgtaattggaatatcgctggagaatacaaaaagtgttttttagtcattgtgtgtgagaaagcaacacaccaagatataccacaatgttctcgtttgctgagcaaactactcttgctttttaatgtggaatgtagaagaactaattgaaaagagacaaaatgaattttgactcaaattgaacaggatgaatcataacccactttctcatctgagatgtgaggaagaaaatgtaaaggaaaccaaccaccacacagctttactgtcagtgtcagcataatcaatatagagtgtttttcaacagaataaagaatacatttctgcaaggctgagagttgcaggtagtcggaaacctagttatttttgctttgtctatagtctgctaaaattgtctcgttctgccttggttaaagcattctaatcaagagagtttggggcccctcagtaattgcttctcaaaccattcagaaatgtacctgtgatctctattgaacagaggccaatcagagactggaccctctattgaacgtctggtcccagtgtcattttgtcagatggtcaagagcagggagacggcagacatacagaaacctggacaggactgaattgctgcttccctgaaaataacttacttgggtttattgatgtgaatgattaaacaaaaacactttgtcctattggattctagaatttcgatgcataatccacttagcttgtgaatgtagcttaaaaaaaaaaagattttacacaaataaagaggcactatagcatatcccaggaaaaaaactctaattcctaagtcaaaatttatttctaatttttgttactattgtatttgattcataactcttatgatctttattttcctcatgtgtgtttatatattttctattttactgtaaaattactaagatgggagagcacatctttcttatcttactcttcctctcttccccaaaaagaaaaatgagaagaggagatagagctggatgatttttttaaatatctttgtgccactccaccaagagttttgcttgcaatagaggttctctagtctgatttgatcctaaaccattctcactaatgattctgcttaaaataagactagtacatattgagcactgactatttagtatgagttctacatgcattacttatatctggactataactctaggcagtagatactgttttttacaatgagaaagctgaagccaagatgagttaaataattttcccggaatctagtaattagagttgcaatttgaacacagaacccagctcttaacccctgcatataccatgcctgtgactatagatttcagaaaatgagctagccaaagcctggaaaaagattagactcacaggatctgtgctcattccatgacttttctggtaaatcctattctgttttttcctctactttccttgggggatgtttttagtatgatttgattttctctgattgaaagctctcactactaataagggagcaattagaaatacaggtacaccatctctttgtttgctctgtaccagatgtctgctgagacagtgtctttgccctcctacatgggtagtagtgcccagttgggctgcttagtccagataacaaaaggcgatttctgaccgtaattttttttgttgttaataacacttgaaatatgcatctttattcctccattccttcttggacttgaaacttggttattatgattgtagcaatatttatgtccagaaactctcttctccccacaatttgcctcaatccagtactgctttctttcacacacgtaaatagttttaacttttaacgatccatgcctatggcatcttctagtctagtgatgtgtagaaaagccaggcccagtctcattgcccaggtggaaataagagagagcaaggaaaaggggactgattttgaaaataaagtcaccctgttgacatgtcatcagtcaaaagagttcagtgcaatagctagcaattggctcactcagtcggaagttgatgctattttaggccgtcagcggcagtgtcaatgtatctgtgaattttgccattttatttcattaagatggttcaggaagtcagacactgattaactgattcttcgacttagttcccactcctaattttggatgtgtggtgtctttaggaagctgctgtgtcaccttgattctaaagaaaagtttcgttgtgcctctagagcaatccggaacagtttacccttgtgtctggttatgctggaacctgctgtgttctacctctctggtcacaggtggtatggggatacttttgcttctggttctcctctggcagatcaagcaaatacaatccaagtgcgtgcagcccgttcccattcaaaatgtatccgtcataataacagcattctcgctgacgcattagactcaaggtggacttaatttggagatcacctatgaagacatctgtggaaggaatggcctcagcattgcagtcactttcgaagtcaagaggtattctagacagaccacacagcatgtataggtaagactaggaaaattctaagttttgtgttgttgctaggggcttgtaatcttattttatttgtaaacatgctctaaataagaaggataaggatctctagataggaaatatatgttgttctttgtttctccatttattcaataattattgaaggcctatgatatgccagacaattgttccaagcatttccattaaacattagtccacaaaatatagacagaagtgcttacaaatagctcaattccaatatgatacattgctggagtttggtgatatgggaggaaagaagttagaatggcttactatgaatggaaaagtggagaaagattttctgacatagatcatgttaagactgaatattaatggaatttttcaggtaagccatgaattcaagggcatttcagacaaacaattcaatagggacaaaggtatagagaccaacaccaaaaaaagtgcaatatgactgccaaagaatattggaaggagaaatgagactaaatgaatgattagtggccagatcaagagggcctcttatttcttactaaagaatctagagtctgtcctgaaagtgtggaaactccatgaagggtttcaacaagggaaccacaagatattgattaaagatcactctgggtactattgtggggagaggtgttcaatgggacaagatttgggggatgaagatcagtctgggtgtcatttgtacttgtctaaggggaataagggctggaaccaagatagtcatcttgtgacaatttagagaagggtttcaaaggggcgtaagagggatgggctgagacttattcctgggcctctatcttgggtgggtaatgacatcactaagtgatgtgagaaaaagagaaggagttcagtaatggtgatgccatcagtccacagagatcctctctttatcaatacttattgagcacttgctgtgtgtacacactgttctaagcattggtgctacagcagatgaaaagcttcttttatggggcttacattccagtgagaagaaaatgatgacacataaataaaatacatagcaggtcagatagcagtatatcctattgagaaaattatgcaggagaaagggatagtgagtgatacagtggtattggagtggaagtattatggtgaatagtgtgaccgctataattgtgaggtctctattatgggtgaaatctggtctgcctaattttgtttcttttccattttttgtttgtttgatgaattattatttctcgtaaacaaggcaaataaacagcaatagcaacataaacatttacaagcacatagatgtaggcataatagtttgtgttgccaacataacacatgccaggaaaaacaaaagaaaacagcagctaaaaaaagtaaatatcaaaaaagggagctttctcagacacaaattcttatcattcaaaatgctgtgtagtttgaattagaaagtcacagaatgggaccttagatttaatccaaatctcttagtttaggcagaaaaaccttcagccgagcaaggaagtcagttattcaaggacacacaggtaggtctacaatttaggtgctctaacttcatgtctaaggatcttacccttatcaccatcccagaaaagcccaaagtagcttgggtctgaatttccactttgccacagtaaccttgagcaagttttgcttctctttgcaacagtttgctcatttgcaaggtagggatgattataaaagtgtctgtgatagggggttttggaggattaaataagttaataatacatgcaaattacttacagatgtgggctgacacacagttaatgttcagcagtactgagagtattgaaacgttatgatacaggctacttaggttttgtgtatttgaacataaacttcagaccaatttctggtgatgaccacgggtaagatattctgtgttttagttaagatgatttccagttaagatgttgaaatattaaatacttttcttgggtcactgaataattataaaatatattaaaataactttgatatttatttcattcatagaagttctagacaatccagtctagagaagagttatgtaaaattctacaccagaaatagaaccctaaccttgaaagacagggacacttattcatatatgtatgtctaacacaaatgggcctcataattgttgacagccacttattgagcattgaccatgtgccaagcagcatgctgaacacttcacatagctggtcttacttaatgctcacaacaggtaagcattcatatccggatttttcagatgagaaaattgagtcttaggcagttcagtaccttgtccaaggttatacggatatcaagagcctagatcttcataagccaagtctctgttctttttgctcagcaaatacctatttttaatgaggatgcttttctcaactagctactatattctgcaaccagtctgcattttacactgctatcctttctgtgtcattcctaatactcattcatagaattataagatcatagattgttaaggctggaggaaacctgaggagtttcttggttctcagcataaagactcagaatcacctgggggagctttatcacattcaaaactacacacccacacacatctaccttgtatttacaatgaaactctgatctactgacataaccctagatccactgagaaaatattattactcggagaaaatttagctgatggagtgtgccataccccacgtgtgatgagataacaaaaaaagttgacaattactgatctagtccaatcttacatcacaaacatgaaaacagaatgaagagtgacaatcactttctaaagatttttaaaatgtcacttataactatctgcaaaagaacctgcgtcttttgacttataatgttaagtgattttcttgtttattccttaaaactgcctttgtagaatgcactatgttatttgatggttctggagtaatacaaaagaagagagtgattaatttgcctgggatcctacaacaaaccagttgaccaagagataataagcttattatattatgcagatctatacctattcacttcgtttagttaagaaacagctcatcaatatggaatacacattttcatagtagatttgtgggttgcatagcttttttgtgtctgttttcaatttctgttcctttgataactgaacaaataacagagatggtgaaacccagcaagcaaattatcttccagattttatgtgatctcccttctctagtgagttggtatgtctactaatgacacagtagattataaggttatttggtttaagtaaatatttatgcagagcctatgatatgtccatctctgtcttaggtggggtgaattagaattactataagtgctttctgaaaaaaaaaaaaatgtaccatgaacaaatttagaggtctctgcccccaagaagtccatagaccattataggttagagaataaaaaatatatgataatcccttttcccatgtgataaatgttataaaggagctctgtacctatgattatgagagggaatgtttgagagctctaggaaaaacctccctagggagattaagaggtgatatctgatgtcttcatgaaggaataaaatgtttccaagtagagaaagagaagaaagatgttagatacagaagaaacagcatgtacaaaggtatagaggtaggaaaacatggtattctgggaacaggaagatgttacttcctaacagaacttctctgtggctgaagccacattgagttgagggacaagtagtgggacaaggaaggatagagagtctggagttcagtgataaaagatcttgtgtgatagtcataggaaggatgttttggatgtttacctgtgcaaaatgggaaattgttgactattgtcaaacaatgggtaacatcagattagtgatttatgtaaaactgaagggataaccatttctactgctgtataccacttggataaccttataaagccacttaatagggaataatggggctggaaatttaatgggaatagatttaaagtgcttgtgggataagaaacatgatattgctctcttttgttctctttcagttcaaaacaggaagtgcctaggtatgcagaaatgcaaatcaagccagctatatttttggtgtgttttgtgtgtgtttagattttcacacatcagcaatactgtaagaacactatgtggccaggcacagtggctcacgcttataatcccagccctttgggaggccaaggtgggaggattgcttgagccctgggagttcaagaccagcctgggcaacatagtaagaccctgtctgtacaaaaagtgaaaaaaaaaaaaaatggatgggcatgatggcatatgctgtggttccagctaatctggacgtggaggtgggaggaggatcacttaagttcaggaatttttggtggctgcagtgagctgtgaccatgccactgcactccagcttgggcaacagagccagaccctgtctccaaaaaaagaatactattatgtgaataatccaccagattcaactaaaaaatggccatgatgttttaaaagtacatatatacacacatatagatttaaagattactttcaactttctaagaaattagtagatctttagaaaatcattgtgcgtatgtgcatatgtgcattgtttgtgctggtcccaccttcaaggagaaaatatttcaagatcctgatgcttacttaagaggttgtatgtgtttaccatggaaaggaccttggaaatcatctcctaattctgacttcattatttatttattttgatgaagcaaatggtgcccagattgaaacaggagtgtaagccacagccaccaagtgccagtgcccaggctaacacttttctccattaactctggaaaccttatttcctttttgtaccacgtatttacagtgtttggtagttatgaattgagtgaattatcccaaggttggagatatcttggtactcacttgtaagtggagaaacactaataggaaaatattctgggaatctggtaaggaagtatgagtgaatttatcatatttaacctttgttcaaatacattaagccctttcttccctttgtcattctcaaactggatcgacatgataggaggagaaattttatcaactaaaaggggttgtgtcaataagtgtttatgatacctctaaacttaggccttaaaacaacacaatctgtgatctgacagttctgtaggttagatgttcaacatgagtctcatctggctaaaaccatcatgttagcaaagctgcatttgtctctgaaggttctttctaggggagaatcccccttgctttttctgacttctaaaaactgaccacattccttgacttgtggccctctttttccatcctcaaagcctgtaacatagcacctctgaccatttttttcatagtcattctgtgtctggccccagctgggaaaagttctccaattggtaaggacctacttgattagatatgacccacctgaataacctcacatactcttcctatctcaaaactcttaacttaatcctatctgcaaagtccgttttgtcatatacagtagcatgttcataggtttcaagcatttggacatggtcctctttgggaggcattacgctgcctgtgacagtgctcttctgatacattttcagtgatcttctagacataacaatcctggtcctgggaacatgcatggcggggacctaaataagtctattttttaagaggccctaccctttgcatagattctaatcttggggtaaaggaaagtttgagatttcactccacctttttttttggtgctggtatttccactgtgggaaagatcattcggatttaacaaccacatgaagctcctggattatctggggcatgtttgctgattcccaaggaagcttgatctttttgatggagcacttgagctggtaagttattagaagctgagctataattttccttggcattggtcatttttgtctaatcttttatttttttttgttttttttgttttgttttgttttgttttgagatggagtctcactgtgtcccccaggctggagtgcagtggtgcgatctcggctcactgcaacctccgcctcctgggttcaagcaattctcctccctaagccttcagagtagctgggactacaggcgtgcaccaccatgcccgggtaactttttgtattttcagtagagacagggtttcaccatgctggccaggctgatctcgaactcctgaccttgtgatccacccacctcagcctccaaaagtgctaggattacaggcatgagccaccgcgcctggcctgtctaatcttttatttaatgcatctaggctcctcctttcttccttcatggtttcctttttcctacttccctatctcgttttctttccttcttttcatttacagagaaatggtgttagaaatgaatgagaggagtgagcaaagaaagatgagggaaaaatagatgtgttaaggagtatacgcataaagaaaagaggccaggaggaaaagctgttcaccccgactcccatcctaatcttgcgtagtctttcgtttcctgagaatagttaggtcagaagttacagtagaaactttcatggaatacacaaaagggaattaagtaaggaaacttgtgaccgatgctatgggaaaggacatgtttgtcaaagcaataggttcttcctgagttagagaacaattatggttcccccatggaaatgtttatctgacgcaatgagaaccaggtcagacacaattcagaaatgaaatgaataaaattattctaagatctagatgggaggagacataagggattgtgttttgatagtcttaagggtgcacttacatttacatccccaaattccctcttccatgaaccactgtgcactgtacattgccacattaatgctaactgtgccaattagattaactaatattggtcaaaaaagaatatcctggccgggcgcagtggctcacgcctgtaatcccagcgctttgggaggccgaggcgggtcacggtgaaaccccgtctctactaaaaatacaacaattagctgggcgtggtggtgggcacctgtaatcccagctacttgggaggctgagacaggagaatcgcttgaacccgtgaggcggaggttgcagtgagccaagatcacaccactgtgttccagccctagcgacagagtgagactcttatcaaaaaaaaaaaaaaaaaaaagaatatcctaatgaagagaaaaatgacagaaatttctaagataactgtttcatatttcttcattaaattaaaatgaaaatacatcttcttagagtattggggtataaattaaactgaataataccagtgaaaatgctctttcaactataaagtattagagttgagaaagttctttttgtttgactattcattctgtcatctcaccttagtggtaatttcttctgcttggacaatagagcaaagttgggccagtaccactttggcaatgggcatcaaagtcgaagaatcccatgtgcaggtcgaactcagtgaaaaagggctggaactggctgctcctgcccgcttcctgccatagtcaggcccacatttgaactttattatttcgggggtaattaccttgtgtagtcgtaaattttaatccaagtctcatatgtgactgtggatgggtacagtctaaagggaacatttctttatttctctgctgcagagtgactacgtctacagtcaaaagttctcaacctatcttaggaatcttactttacttcaccaaaaacgtgtgtgtgtgtgtgtgtgtgtgtgtacatttatataccatacatgtacacgctagtatgctttagttaaaatacaaagcctctgtagaaaacagaagaattctgcaatacccctgaaaaataatttattttctacatgctatctcataaatctgtactaaaatcaattttgaaaaattaagccccccttctctaacatggtactctctctctttatttgaattgtttcatgcacttcaacaattatttctagtttcatttcttttcatgaggactttattccaagataattcaatttttgttgctactgtgcaatctttttgcttgttgttgttgatgtgtggttattgctagtttaaaggaaactcttgactttgcttgctcatatccaaacactttaccaaattcagttgttaacaaacttatattaacaacgttttcaggttcttcagtgattattaggctactgaagtgtttttgtggttgttttgttttgttttacttctattggaattcatgtggctgtttatattttgctagaaaattatgcattttgtcaagattgtctactgttgttactatgatataggcgtatttctcacttatactttttaaaatatctgtcttgtccatattcatagcttccttttgctttgactgtttttcctttttcctccttagtggaactttcctaagaagtgtgtatatgtgtgtgtgtggagtttgttttctaactcattacttttaacgtttgccttattattttatatatccttctttaagtttatttagttattcattgttgtagtatcttactctgaatgttcatttatatttctctgtctcttctgtttactaataaaaagcatttaaattgatgaaatgcctctccttgactttatctgcatcccatttggatatcttttaaaatttatcataaaggtgttataattcagtcattcttccacataagaattattcagaaacttatttctaaattatttttatcaaaaaatgttattctattttttaatttgaaagaatttaagtcttgaaatttattagtgacatgtaaattcctgactgagcattatgaaacttgtttagttcattgctgaatttggtattttgtcagctgggaacactaaatacccccacttaacttgctatttgtgaagctcagagtagcattggggttcctgtacactttggcaattgccccatggctaatttggccaacttccaattcctcagggagcaacaaagagttgtctcattgccacctgctattaactaaatgcttaggattcagtgtcctaggggtgactgggagacatgggaatggattattgtaacagcctgtggaacctccttccctggggaattttgagaacagcaaagaaccatctgtctgggctggttttaggagcagccctgcctgaaggcaggtgcacggattagatgacctgtgaagattgtcatccatcccaatgacttcaatggaaaggatgcatttgctgaatttgaaaagagtccaggaggaacactgataggtttggggagcatatggtcaagagcctgagggtattgagcccttcttgaaattggagacactcggtgtcaccccatgccctgaattccagaatgccataatctacacgtgaacccagcagtcattcacccttgaaaattatgtgcagatgtggttcacattggagtattcacgtcgttgttgatcataagcagaattcctttttaacacatagctcaactgatctatacccagaacatactgttgaccctgattcttctggttaagccggatctgcctgtataatacatcatttactgacccactgacattgagttttcttagcttgtttctcagtggttgttctgtgtttgtttcaggcaattaaatatgttgatgcatgtttcagaagagctctcctaattatatcaacaatagctttattatagttagaaaagacaaaatgctaaatgaattagccgggttaagtcacatttattgtgatttaattcttactgtatgtagtgtaatataaataaaataaaaattttattttattattattattattttttgagacgaagtcttgctctcatcccccaggctggagtgcaatggtgcgatctcagctcactgcaacctctgcctcctgggttcaagcaattctcctgcctcagcctcccgagtagctgggattacaggagcctgccaccgtgcccggctaatttttttgtatttttattagagatggggtttcaccatgttggctaggctggtcttgaactcctgacctcaggtgatccacccacctcagcctcccaaagtgctgggattacaggcatgagccactgtgcctggcctgtaataacatattttaaagttacagagaaagggcaatgtccccaaaatattttcatgatgatatgtcagacatatggagtttcaaactaacactgtggtaattgttgtgtgtctaaacaagtgacaacggggctgggcagcaaaactagacatgggagaagccaactgatccattgagctgtcccagcaagagttagtgggattatgatttatgaaagacctgtgtggacaaggtagtttggaggaactgaatggagggagtgaattaattagaagaatgagacaggactagccacaaacttctcctagaagtttaaactattttaaaaataagagttgtggctcatcaaaaaagtagtgttttcaaaaaacacagccccttcacttaaatgatacgcacagtccagatagactgcaaaacttaatgtttagaagctaacaactttttaaaaactttattgatctgatctgtactgagaacagattttctctgtgctttataataaaacataaagatcaatcacaaaataatttatcaataaattttaaaacaaaaattttaaagtgtatgtaaatatcatataaaattaagaaaaaatatgtaagaataatatttgcaatgactatgataagcaaagggttaacaactgtatgaaaattttcatgcaaatacaaatatcccaacagagaaagacaaggaatgtaaataattcttaagtagataaatacaaatggatatttaacttaaaaaaaattttattcacattagtatgaaaagaaaatttaaataattgaaatctagtttttcacttatgaaattagcaaagatttaggaaaagaaactactgtcatttgctgctggtaagaccgtaaattggcccaaaacttttagaaagttattttacaatatttctcaagaactttaaatgtctcatatctgtcaatccagacagatagatggatggatggatggatggataaatatcagatggatggatggatggatggatggatttatcagtaatagatacatagatggatagatagatagatacatagacatctatagagatatatgtttctatataaatatatatctatattatcctaaagaaatatatatttgaacaaaatctatttatgaaaatgttcactaatgcaaaacttataatggcaaatagaaagggaatctgctgaacaaaatattatcaatcccaaataatgagatattgccaaaacactatatttaaagaacttaagtgatttgggaaaatattatcttgtgagggcaaatacattaaatttgtatattcagtattgccaaatttatataaaaaaatgggtagaatttctttttaaaaaacaccttaaaatataaacggagtacttcccaataatcagattacatgtgattttattttcccccctaattttccttaattttcaagttccgtacaatgaacatgtgttattttcataagtataaaagacttttttataaaaagaaatatatagaactaattagccaaataggaaagtttctaagaacaagggaagaaatttgtgaatggagtggtgaagagatccttggactgagagctgggcaatgtggatactaacactggctctgtcacaaagaaacaaggagacttattgaggttctctcttctggctcaaagattttatgagccagtaatttatcaaagagcccatcctagtgtacccatgggcctgtcaaccctggtagacaggttagtagcccagatgaaatttcccgtggatgaattttagaactccgctccattgatcacccttttttgttgttgttgttcttttactcttctggaagagagctaagaaacttctgataccatccccctttcccactcgccctcagttgtgagatggaggcagcaaatattcagtgtgttctttttggtcttaagtagttctagactcagataccacctcagcaccaggctgagtttgggctggctttggctacggtttgctgctgaatgtatcagtgatggacttttgaatgtttaatagccttagggaatgtggcagtgtcccctacatagagaactgtagattctttagtccaccatttccaaccctgtgatttagattgtcattataagcatcacaggatgccctgagttgagaaaaatctgtgctgtttaaatggtctttaagcagcctttcctttctcctctttctcagctctattctgcttaggatatggcttatgccacttaatcaacatgctatcatatgctttctgcattccagacatatattgaaatatcttggttgttatagccatcttctcccacatacatcccctttctctcttcccctctacatttttttctgttacttgttatttttggtactgatgtgcttttatttgagtaggatattggaatgcaattgtcttcttagtccaccatcccctgacctgtcattattgaaaaacaaaattctgtagcaaatgagtccccgaaagtgttttttttcaaatgatgatgatcggtcacgttgtgaatctgtagactcctttgcgaaaacaacaataaacacagtattatttatggtggatatgctaggtacatccaaagctcttcatatgtgttgccttgtataatttcctcagcaactctaatttaatagaaactattgtccatgtatagatgaggtagtttatacccagataggttatacaaacctgtaagtaacagagccaaattttaaaggcagacaatgtaactgcagaaaccttgttcctaattgtttaatggaatatggtttagaattctgtgtggagaatcttactctaccctagtggtaaacttaaagctctttaatttactgtggttatattatatatgtgcaatggatccctattttcaaacatagtcgtttgataaagtgtgggctgcttttcatcacgaatgtaaaaagtctcttagttgctacacccagcaactaagtgtcctttaattcttaactttgaatacttaattggatccctggtgctatgtgtatttgatttttgttgtgaaagttgcattcactgtgtccctttatttgacatcagcaagatgtaatttctataaaccaattaatgatgcacctttcaactcttactatgagaatattagctggtgtaaatatcggactccttgtgaaggatgactcgctatctgattggtctttaaaaaaatactttaggaaataatggcttgcccctgcatataccaatttgaagtctttctaatatcagccattagctgggatccacatggagtacatagacaaatgaccatagtttctactgtaaaaatgcctcaagatcttgtaggtgagattaggcaattagataaatgcctatagcacaaaatgaattaacatgattgcttgaaaagaattaatttctgtaataatttgaagaaggaagaagttatgtatgctttggggggtatacagaaaggctttataaacaaccctatgaaaaaatggaccacagttttaaacgggcaatccacagaagggaaacactgcaatattcattggaaaaagaaaaggaaggaagggagtgaccaagagaagaaacaagaaggaaaggactgaaatcttgtttgcctttttggagaagatagcatttgaaatgggccttggataataaggtgtgattgtcgttggtggaaatgaattgcatccagaatgcagaaataactcaagcaaaggcatagagattggaaaacatggggcaggtagaaaacaagtccagagtctttgctgcttcttagaagatgtataagggttttattttatagttttataatgaagggcttttaatttcaagtgatgggtcagtgtataattccttaggagataaaattccagggaaaaggaggaggggttataagataaatctagaaatctaactcataaaaattagttcccttccagggagttagttactccaaaaatatccttgataagctaactctgcatggatataactgtgttatctgtgagctggctacagacaagaatttacaattgtctgtagttgcagtctttgagctgcagtcattcaatctctgtctactgctaaaagccagagtttggaaagagcccttatgcatgcttgataatgacacaatttgactgagaatactgccattttataataatctctgaaagttacttccttggtctactgaatctcatattttgtgaagttaaatgaccaatgactgtcattcattggccatgattgtcttgagtttgttgatactaaggtgttatttataatgtgccttttgtttctcaagaatatgttcgcagaaatcaccagtagtgttatccatgtgtatggaaggccagactgtatccccttatgtactaacagactgtatggcaagaagggagccaggttgtcaatgtgagagctaatgttgatatcaacacaggcatcagaaagtcaattactctgtttccctagtttactaaatggtgcttttgcaatagggaccatgttgcctaatgggctgtgaactttaatttgttcataacagtgccaatgagtaaatggatctacctgtggactttagagtgtacttctaacattttaggactgcaagaaagtagtgtgttttatcctctgatacattcatattctctattggagcatacctatccaagcccaatatcctacatcagttttaataaagagaaattacatttaattgtgtctctatcctttcatattaatccattatgaatattttattccacaatgttagaaaaattacattaacttattagtgaagaacattcttttataagaagtgctttatacttcagaacctcataacttactttaaatatttcaggcacaataactggtaagagatgaaaaataagcctgaactcatagggtaaggaccatttagaagtcttttgtcttcagcttgtgattgttcagttaaacttatttgatgtgtgctcagcaggttgtaaaattcctatctttctggagtgatccataagagattacttcatagtgaaacacttaagtttgattcttatgagttgcaaaatgattttccaccaggaaaaataaagaatatgggttccatcaaaagtcaggcatgaattctcatctcctgataaaatgtgaaatatctttgctgatcctgtgcctattctcagtttccatgaccatgcacaattattatttttagcaaataagcaaatttgaggcaaaaacattaatttgataagatatctgcaaatgcctttctggaggagaaaataaatttaaaaagcatcagtgtgtttcactgatatgcacaatcccccacttcttataagaaattaaaacactagtttttaatatcttcagagagaaaatgagtaaaggaagcacagtattttccgaaacgtgttatttaaactaaaaccatgaaatttatgaaaaaaaaaaaaagtagacccttccttgatacacttggtcccaccgaggttcaaagtttcctttgaattggggggggaagggagattctgtaatttaagttttaaacttctgtctttgtatctatccttgtgctggtactccgctatcttggttgctatggttttagagcaaatcttcatatcaggtggtctaagttctccaactttgttcctcttttccaaaattagttgaactattgtgcatcctttatatttccatatacattttagatgtggcttgtcaatttataccaataaaggattctgttgtacatgtaaaccaaattagggagaactgacactttaacaatattgtctttcaatgcatgaacatggtatatctctccctttacttcatttttttttttttggttctctcagcagtgtttttaattattattgtaaaggccttgcacatattatggaacaaacacatattatggaacaaataaatgtaaaagctaaatctataaaacttttccaagaaaagaaaagaattcttacaaccttagataggcaaatatttcttaaggagtatacaaaaaaccccacaaaccataaagttaaaaatgataaatttgattttataaaaactctaaaacttgttttttaaaagacaccataacaaatgaaatagcaagtcccatacagggagaaaatatgtgtacagtatgtgtatatgacaaagattttatgccagaatatagaaataattattaaaactcaagaagaagacaaagaatgcaatttaaaaacaggcaacagatttgaaaataggcaatagatttgaacaggtacttctctaagaaaatacacaaataaccaataagcaaatgaaaaatgctcaatatatgtagtcattaaagaaacaaaataaaactctgtaaggtacctccatacattgatgagagtggctaagactaacaataccaagcattagctaaaagacagagcaattgaaattctcatacactgcagttgaggatgtaacatggtactgccactttggaaaacagtttggtagtgtcttaaaaataaaacgtgttcaacatatgacccagcaattctcctccttgacattgacccaagtgaaatgaaaccttttttttacacaaaggcttgtacacaaatgttcatagcaactatatttataatggccaaaaactggaaacaacccaaatgttcattaacaggtgaaaggacaaattatgctatatttatacaatgaaagatgactcatcggtaataaataaatgatctgctaatatgcacaaatacatgaaaaaaatcttaaaaatatgatgctgaataaaaggaaccagagctacctccacccctaaaaaagactgcctaccttagaattatatatttacaaaatcctggaaaagacaaaactaatctatactgacacaaagcaatcagtggtttgctgaggctgggagtggggaaaggattgattataatggggactgacaaatagggaactttttggggtgatggaaatgttccagatcctggtaatggaggcagttacaaagtcttataaatgtattgaaattcatcaaagtgtacagttaaaatggttttatttattgcatttagattatacctcaacaaaggtggttttaataaataaacaagaaaaagtgtttttcaccaattggtttgaaattcggccaaggcatatttgagcgagggctgtcagccttgtatttgttgcaagtcacagtgagtatgtcctaatggatcctctacaaggtccaggttaggtttctttaaaggatggcaagaacctgaaacagtgtgagtgcagagaacagtgaaacagtgtgtgtacatagtgctttgatttttgtgcattttttggtcctaatattttaaagtttgctgaaccatacctcatagaacatttacctgctttttctgagggaaatatctttatagaacttttccaaagcattctgcatagattttattttaagaaattaaaacattttatttgtattaatttacataataattggttaactcacataattacaatgacaagatcatacagtaggagcagacttgggatcaaatgcagctgactctaatagcaggtgtagcaggaggcacacagctgaggggacatttgagacgaaattgaggccaggttccacttcacattgtactagggttaagcgtgtccacccagaggaagagaatccttaggcctaaaagagcaaaagtgtacagacatactcaagagtaagagagtagccaggaacaccagccaagccataaactccagtctgtgtgtgttaacagataaaattaagagggtaatctagggagtctattgctaaatgaagggcacattaagtctcaacagtattcctatgatcaatcaagcaaccaatgaagtgtacaagcagaagtgatttgtcatggaatttcagagccagaaagatccttaaaaaggcagtgtactccaacttcctctgaagcttgtgtcctacctacagaattcccaaccactctgcttgaatgtctccaaagaggaaaaaatttagaagagaagacaaggaaaattaatcacaagataggcaatgaataggcaagtggtaagaggccagttttcccatcctcatttactctaaatttgattcatagattattgagcctcagatatctgtttgccatctggtctggtcagtctggtttggcatgcgtcttctttctctttagagtttgatgacgttttaggctgtgaggggcatttgcattgtagtagaaattggatgatgtcagacttgctttatcacactttctcaataatctcttttggtgagtttgatattctacttacagctgctaaagctccttataaccatacgcacaaacatacacttccatatagtcatacatactcacaaacatatatacacagccatttacttacacacgtgtacacaaaggtgtatatccacacacttacatgcacaatgagagatgcatagtaagaatttttccactacccctagtttaactggaagctgtagaaaatctgaactttattatattgatctctgggatcatccacaaaattgcccaaaatgggaatgcggaagctgtttcttacctttcattttctccacatccaatgtgtcctcttcaactgtgtattttgaaacaacctttgaatctgtccccttcccgcaactgcactgccaactgctgatatcattttttgcaaacaagtgtaatgaaaagagcatattctttaacatcaagcaaactaaggtgcaaattttagctctgcatgtattcattgtgctatcttggacaagttatttaactatcctgagcctccttgtcttaatgtgcagatagaagaagataatgcctacctgataggtggcataggaaaaggtcaaaaacattattttctactcccattgctccccttgcctgaaacattataatggccaaacaactggcctcccaacctcctttcccctcttcagtttttcctctacattatagctagagattttgctaaaatgtatatatggtcatcccattttttacttgaaactggtatcttcctgcctataaaacacattttgtttcttagtctcacataggaaatcctttttagtctgtcttgggcccaggactccagtccgattttcctcccattcctacctgccctcttggttttgaatgttccacacaacttcattcctttctttgttaattggcttttcctttacttagaatgctttcccccttcctgctttttagggagaacagggtaaactgttctccctatccttcattgagtctcctttcttttttctaaagttttttcttatcagcatccctcccccaatttgagctcattttctagaaagaattaatagctttcttatatgactctcaagatatttctgtgtggttctctaacagccttcatttattttatatggtaattatagatgtccatttgttctagggaaggcaggtgtcaggtcttactcatctttatattcctggtttgacatacagtgcctgatgtctagtaagcacttgatatctgtttattttaatgtttatgccctacattatctatcacaagtattaaagattgataggtgctctgtaaatgttaaattgagttaattattttcaatcttacaggaagttacataagtcattcctgtattcatttgtgaattttcgacatcctatattaagagttgcacttagaatgtgagttccatgagggcaacagcacttctgtcttactgctctgtctgctatgttggcccataattaaccactcagtaagccttttgtgaaaacaacctcaatgagtcttctacctcaagtcttttgaataggaatggatttaaagctgacccctaatacatctttcaaactttaagtcagtaaattttttacaaacttttttaagttgataaatccctcagaaattattctgaggaagctgatgggatagaaatgaaacagactaaggggctccaggcaatcaccactccccttcgttctccttcctctgttggtggggatcaatagagcaggatcctcaaaactgtggagttctttggagcatactttgaaagcctctaattctattccacgctctaatttccaaaagagggaactgaggcccgtggtggttaaatgccctttccgaggttacacagctatacatggtagagccgacccatgtcttctgactctcatcccgttgcacttacaactagcctgcatgttccccttttcccatatcgcatggatagcatcttacgcatctaagtttttttctttaataatgatcttctcttttctttaagagacaccatcactccgagttgtaccacttgcaccaggctaaattattcctcagtgtttacccctttcagatatttatagaccatcattatggcactccctagtcacctgtcagcttcctaatatgtacatatatggtttctttaatctttctgtacagtcggcttctctagtcccttaatcatttgtaccattctctctctaatgcctataagggaactgtttaaatatagtccatatgggaaaagtaacctcaacatgttgtaacagggggcagaaaaacacgctgaatagatgaaaggaacaatctacaggttaattagtagtatggccacaaatatgtgcacagttttgtttcagaaataaagcaagctgtatttgttgttaactatctcttctttgaacttaacagaatgctgataatgccaagctgtgtttacagtccaaatttttgctgaagaccttcaactttgcactctccctgtgtggtatctcttgcccaagacagaacttcaaataaaatcacatagctgatgcaagaaaccgttactgagcgtatccatttttatgcagtttctgtggacttacatggtttctgggagctccctataagccttagtaagggaaagctcttgacttatctcactagttattagggatttggatatatgtttactaaatgtgataatctaagtatggaaactacattagtacaagaggaatcacccagaaatactctactggcataaataaaacattacctattgcccagttttctcatttgtttcattttgtaacttttataatgtgtcaataagtttgaagtcttgaagggctgcccagaaaccaccacagagtggattttccttaccctcaatctgccttcatcaaaatttagtttgtgtgtttatcctataaaatttatctcataataaaaactgaagactaggacggtccttagaaaaacacttgattcggtgtatttattttataaaagggagtcacagagagaaaatgtggccagctcaggtacatggcttcctaggcaatgttccatttcccaaaactttcattggtccagaaagtgtaccttcattcccaaccaaatccttcctataatgctttccatgcctttcttctgtggctctctctgatgatctcacaggtctataagctcttacaggtagaaatatgatttcttgctgtgttcttattataaagcattgccatgcaactgagaagtaatgagagccagtggattttattagaatggaattttaacttttctactttaaaacccagtgattctgctagtctggaggtagcaaagaaggatgactattttctctctcacacaaagtaagattctgaaggggcttattctctgaatgaaaaacgagaggagaaaagtaagaaccttctaatgttttattcaaatgttaacaaagaaatttgagaagcgtgtttccttaaaattgacaccatttttatcccaaacattctggtaagtgatagcagatgactgtgcaagcttctatggagagagagagaggaatttttccaggagcatagtcccagtgggaagtattacctaaaagtaatacactaatcactttcaatcttgcatatttccacatactgtgtgcacacatatgtgtattaataactgttccctagacgtcacttcagcgctcagacagcttagtgttgctatgcgaatgctggagatggaatcagatgcagactacagtttagcaatgagaattcttcagagatacaagaatggaaatggccttaggtcctgcctcatgggtctccctctgagctccagtgtaacatcgggtgtcaagtatttgtggccccatctgcccactccactgagaatctaaatggcattgccagtatttgtgaggtactcatatcttaaaagtcagtgtactcaaatcagtcttgcattctaccttgtggattttgcatggaaattttttagaatgtcattgctgatggaagccccagatatataagtacatctgctccatcgtactggtgatttttatagatattcataagaaaatttattttacagcagtttattttagaggaattctttgcattttatttgtatgtgtgtatacttattttactggcaggatacacacacatgtatatacacacacacacatacatatatacacatacatacatatatatatgaatgtatgtttgtatcctgtcagtaatactttgaggtacctagggctgagattactatttctcttccacctatggctcaaatgggtaaaatagcttactcaaagtcacagttcatacatgtggtgcagcttgaatcaaaactcaattcttctatccacagatttaccactacttgagtagtctgtggtgtttaaaaaaaataataaacaacaggccgggcacagcggctcacacctgtaatcccagcactttgggaggctgaggcaggtggatcacaaggtcaggagtttgagatcagcctggctaacatagtgaaaccccgtttctactaaaaatacaaaaaattagctgggcatggtgacgtgcgcctgtaatcccagctactcgggaggctgaggcaggagaatcacttgaacccgggaggcagaggttgctgtgagccaagattgtgccgttgcactccagcttgggcaacaagagcaaaactctgtctcaaagtaataataataataagacgaagaagtaacaaagccaaactggaaagtttctgttaaatgaatgttctagataataccaacgtataaagcaatcattttataccagctatggtcaaacagggaccagagccttgacttttttttgcctcaacacagctctgcagaacccactcagtaccccatgtcctactgccattcctttggtttccagaacattgagatgtacaaatccaaaacaccacagtgtttcagagagaaatggcatgactctactggttgcaattgtaatggagttcaccttgttctggagtcatacagaagccatgttgtagacttagtgtcccacgcaatactcctaattacaatgaaaatctactgttaggtagaaggagaaattcctcacaatcaggcaacagcgcctactagtgggaagaaactgatacttgaggtagggcacctgggagatagctctgtgcatcttgagagagtgctacactgagagcccaaaggctctcaggtctcatctctcctgacagcttgctatgacatcttaatcaatgaattgcctctctcttaccctttgttattgagtctgtaaatgaagagtttggaatggctactttctaaattttctacacgtcctatgacccttgaaatcctcttaacaatgtattatggatactttgctactaaacggtaaaacagaatcccgagtaagatgaattggcttcctaaggaagtagtgtcaggggagaatagcaccatctttggggccagttccatttatgcaggtaatatggtatggtccagctcaaagatcactggactgggctgagttgcaactctgctacctacttctcaagtcatgtacaaggtcattcctatgttaactcatgtgttgggaagatgataattgtctcatttagcttttagttattataagattcatatgagaatatagaaattatgaagttttatgtgaatctgcaaatttattttcagtctttatatatcacaattttaatttaggctaattataatttttattttcccctttttgttctatattctaaattcgtatctcccatggaggcaggtactgtatggacaaaatcttttattagtcacatattgttttcatccattttgtgctgctatagcagaataactgagactgggtaatttataaagaatgaaaatttattttatcacggttctagaggctggtaagtccaagatcaaggcaccagcaggcttggttttctggtgagggctactctctgtttccaggatggtgctttgtgctacctcctcacatggcagacagtggaagagcaagccagcagaatgccgcatgaagcctctttcacaaagggctttatcccattcatgacagagaagcccgtatggcctgatcaacactttttaataaaatcacaatatctactgctgaattttggagggaaccaattcaaatcatagcacacatcttttctaaaatggaaagggtaatatgatcattggagaaatactcattcctttgcatattggtttactatccaagccaggtgtggtggttcacacttgtaattccagcactttgggaggccgagatgggtggatcacctgatgtcaggagtttgagactagcctggccaacatggtgaaaccccatctctactacaaatatcaaaaaattagccagccatggtggcacacacctgtaatcccagctactcaggaggctggggccagagaattgcttgaacctgggaggcagaggttgcagtgagccaagatcgcaccactgcactccaacctgggcaaccgagtgagactccatctcaaaaaataaaaaaaaaagtttactatccagagaatcttgtccaggttaacactcttttttgtctgctttcttcttttgtgaaacaagaaggtaagagggacactggagaaaacctaatgttctttacaaaatgagtcatagttctccatctgcaaactgtggctcccatttatgtcttggtgtcaatatgactattacatgttatgtacatggattccacctcatttgcaacatagtcttctgcctgagctctgtttgttggatctgatctaactttacatggtcttaagtcacacattgaactcttaagttctgtaggcctctaagcctttttaagttttagtattttcatcgttaaaatgagagtgattataacccttgctttgctgcctccaaatattattgagggatcaaatgcattgataaataagataaagcactagacaaatataagggatgcttgatgacttcacagagggaagattattctgttgctggctgctgaaatacagtagctttagaaaaacccctttgggttcccttattatcaggtttggtctcaaataaccagaataaatttggagatttcctaccacaaaagctaaaagtacctgggcagatttaccctttgagtggacctaagggaaatgcagattcccacgggagagatcacggagcagattcaaaccataaggcaaaaataattgttgcaatagcggttctaactgtactagtaaatattgatttttctgttagcagatcaatcatgaaatgaattctaaatatagaagactggttaaaaaattaagacggagaatgtgaaaatgtccatgtgtaaaaattaacttaaagagaaatcttgctttggccaaaagaaatactactgtttctgtcaggaatgttctgtgatttaatcaagtttcctgcctggccagataattttaggaattgtggacttttaaagtagtaagtcagtttagaaaactggttaagtggacagatgtaaagtcagactgcctaagccccaattccagcttcaatatttaactctgtggttgtgggcaaggcacataatctctttatgctgccttttcatcaactgttatggagataatgatagaacctacatcatagagttgttggggtgactacatgagataatacaattaaatacttaacacctggtccataaaaagcgctgaataaatattgactattatcatcaccccggggtctacaaatttttgtaggattaggattaggattgaaatttctaccgaaaaattccatcagtaaaatattgataaatataaatcttaaccaactgcctcagagacatagggacctctattttccactcattgactgtcatctttagagaacagtccaaagcatgtgcctttctgttctagttgttatgagctctttattttgaagttgaactatatacttcctatagtttaaaggagaaagaagtaggtctcatgctggacaccttctagatgttacctcctccgaatttcatagccaagtatttaaggcagttatgatcatctccctcttagagaagcctagaaaaggttactgcagtgcttgacagcaaatagaaactcaccaagtgcatttgttgagggattgacagaatggctggataagtgactcaactaagaccacttatctagtgagtgcgtctactcagctgcttgttttgaagacaaggaaattcgggctcagaaaatttaggaaacttgtctaggctgccaatagctagtaacaaaggcaagaattgcatatctgattttctttacaccatgttacatctaactgttcaaaagataaccatgtattatactcgaaaatgcaaaacagggttgttttttgttttgtttgttgtggtggtggtgatggtatttttgttttgtttttgctacttttcctgagagtggaagttgttatcaaaaagttactgtcatgactactatgtgtatagatgctattagtttcatcaaggttgggaatagggtatatgttgcccaactttctgcccctctccgcctcatattaaagttccagtttcctagaatatatctcctgggagatttggcactagccatcactgcattccaataccccgggacaaactactcttggtggaacacagaagcatacagtccttgttacagcagtggttctcaaactcacattcctgatggaaagctagagttgaagggtcaacacccaagagctgcagtggaggaccatcacctgtcctgattcgccacctgtggtagatcatgactttcactaagatcccctgaggcttgtggggatggagaagtgatgctggactggcccttcctctttccctgcaggtgttaatgggttctgctcctaaacaatactgatataggtcagagttatgattgaattgtatacatagaaacatgtgctgattgagaaaatgggctttacaagtcagacctggttccagtctcagccacactacattctgcctttgagactttggccaggtgatggaacatcaggtttcttatctaaaaaggagaataattggttggtaggactaaatgaaaaaatgtatgtgaaatgcttaggacagtgctgagcacagataaaaatgcacaataattttctattttttgttagtttccttcacaatacatatatttacatcagcgaaacatgcttgcttttgcaaccttctgtgggactccccctcctaatttaccacctcacctgaagttctaagctaagcaaatctctgtctataaatgaatcacatcgtggttagactttataacaacttccccttgccaggagatcactcagccttcacttcatctcatctggtttgctgcccaggcctttatccactcattcctgaactcctctccctgacaaccttggggttttggcttgttgtgtgcgtgtgtgtgtgtgtgtgtgtgtgtgtgtgtgtgtgttttgttttttgtttttttttactttaccttaatttctctttttggactaagatgttaaaatgtttcttaatgtgactgtctccgaaactgttttgtgtctaccactcatcctagtggcagtcattgatccttttcttgttgcgagtgtttgagtgtgggtgtgtgtgagtgtgtatatgtatttgtagagggaaaaacaagagagagggaaacagacattggagccacctttcccccactagccacgtacctgttgaaccttcaagcctctctatagaatcagatatacacaagcacagtgacagaactacatgtgtcctacagtccagcttttaagatatgataaaaactcttgtattcacagagctaaatggcaataaccataggagattgcatattgctacattatgtaaagacagagtcccaagaaaatagtgagaactcagtttgatgtatgatgtgatatgtgatatcttactttacatggctaacagttgacattctttgtggattctatattgtctaaggctacagaagagccatatgataaattcatcggcaacccaaaagaagcctgttctatcgcagtgcttccaattaatataagtaaaccactttctctggctcaatgctaccaaaatattttatgagaaaatttagctgattctgctcatgtatattttcaatggatggaaagccattgcaaacttttcaaactaaaatataaagatagcattagggagaatactctctctggtgaaaaacaacatgtattatgatgcgttaggaatttctttttttcagccaactcgtggttgagcagtctgtccccaaactgttttgcatgcggacgaaacctgtttgggcgatacttgtcagcttttcttctgacaagcaggacagaaataggcacccccagaacactgagtttgacttgactcaacatagaatcacctggagagttttaaaagtttctctcctgtaatatcccacctccagaccaatgaaatcagaatctttggagttgggaaccagggatcaatatttttttttttaagtttcccagatgattgcaatatacaggcaagattgagagtcactgtcctagagtataagcagtttaagaaacaagttgtctattattacatgcatcaatactacagagtccatgaaataaaagctttggtgataagaaaatgccaccatcctagagccttcagttaacatcatatgggcctgtcatataaagaatgcaaactcattctgttatctttttgggccttcagtggaagataatttttaaatcagcttaatggaaactgtgcttcaggaaaataacttcagtagccatatgtaggataaactggagcaggttttgtttctaggaatatgttgccatcatttcactacccttatataatcttattgattcaacttttagaaccaagactttttgcagaatatatcgaagaatgtgcttaatgggaatgctgatatatcatacaattggcatatagagcttcagttcattatcatatttaaaggtacaatattaattttgcttgtgcttaaaatgtctattataattcaagtagcaaggaagacataaagaaaaatgtgacctggctttacatctgcacatatttaatactttacatttgatggtgaataatgggaaagtttgggagtatgtcatgctcagtcaccatgcatcaactcccaaaatggctgtggacagctttggtcctgcctcaaaacaagcactgcttgcaaaagagggtctgtggcttatttttatcagttgtgtggtgatcacaggaaaaacattttaaataaaaagtttattttgccatcatgaaagaaacaaattcatattaccaaaagagaaaataaatatgacaacccagcctggtgcagtggttcatgactataatcccggcacctcaggaggccaaggttggagggttgcatgatcccaggagcttgagaccagcctgggaagcacagcaagaccctatctgtacaggaaaatattaaaaattagctgggcttggtggcgtgtgcctatagtcccagctactggtggcaagggctgagggaggaggatcacttgagcccaggagttcaagggtgtagtgaaccatgatcgcactactgccctccagcctgggcaacagagtgagatcctgtcacaaaaaaaaaaaaaaaaaaaaaaaaaaaaaaaaaaaaaaaaaaaaaaaaaaaaaaccccaaaaaaaaaaccccctttttcccttttcccctttttttttttaaaccgggaaatttcctgggaaggccctttttccccccgccccccccaaaaaagggcggggaaaaatttaaacttttaaaaaaaccccctttaaaaaaaatttggaaaagtttttttggggggaaggggggggaaatcaaaaaattcaaaaaaacggggagcccttgggaaaaccctttaaaaggaggggggttttgttaataccccgggggggaaaagacacctttttcaaaaaattggggggggggtctataaggggaaaaaccccgggggaggaaaaaaaaaaaaatgggggcggggcactaaaagagccccccccccaccttgtatttaaaaaaaaaggggttttaattataaacccccccctttttttgggttttggggggggaaataatttaaattttcctggggagagaaggccccccctgggggggggggggcccctcttggaaagggaaaattttttttagggacagggcgggcgccacaacaagggggaaaaaaattttttttaacaccccaccccgggggggggaagaaaaaaaaaaagggggggggtccttttatagccccaggagccctaaaaaaaggggaaaaataacccccgggggttctttgtgtaaaaaaaggggggaaaaactttctcaaaaaaagggggcccaaaaaaaggggggggggttttaaaaaaggggggggaaaaggccctttaggggcgcccaccccttggtgggggaaactttcctcctctagaaaaccccccaaaaaaacaaatttaaaaggttttctctgaaaaaggaaaaaaaggcccttttttgccccggggggggggggcattaaaggggggccccccttttttcgccgggaaaaaaggggccaagaggtacccccgagggggcccctcgttccaaaaaaaaagnnnnnnnnnnnnnnnnnnnnccccttttattttttgttgtttttttagaaccacactttttccaataatattaaaaagaggtgtttgagaggaggtttatattcaccacggggggatagaagagcccgcggtgctctctattatagagggacattattatattgtgcgtggcgtaaagagtgtttttattttcccggggcggaggagggcccataaaaaaaatgtgggcccgcgtcttccccgcgcacattattaatcctcccccttgaggggaaaaaaagagaaaatttgggggttatttattttcaattcccccaggccaattctcaaaaaaggattgtgggaagattttggttctcccttaaaaaaaagaatgtttttaaaaagaggggggggggctttttttccagagggggggggcccccggaaaacctttttaaaaaaaaggttttttttgccccaaagaaagaaccaatttctttttccaaaaaagaaaaaaattatgccccccccccctggggcagggggttaaaacaaaaaacccggccccccagggggcaaaggttgggggggtgtattatccccgggggtttggcccacccggggaagacaaaaaaacccctttttggccggggaaattttaaaaatttctggggggggggggggggggccaaaaacccccccccttggtggcaagggttaaggaaaaggattccttttggccccggggtttaaggggggggtgacccaattttccccaatgcccccccccccgggggaaaaaaagagattcctttcccccaaaaaaaaaaaaaaaaaaaaaaaaaaaaaaaaaaaaaaaaaaaaaaaaaaaacacaaagaaaagaaaacccatatcacgctatgccacttctcttgttcaacctgtagatttccctggaatgccactattcacccatgccatccccaaaaatgacttgttaaaattctaactcttcagattagctccattattaagacttctgtaaagtctttctgttggtaagaggaggtaaatcagagatatcagaacaatcaggaagccattgcaatagcctttgaaaggaagggtgattaggtagtaggcatgtggtggaaagcaggcatttctgacacattgctgaggttgctatagatgggagagcagaggtgaaggataagaagaattgttggctgaatctagagtcagtacaaagcaatatataaaataagtaataatatataaacaccatttttggttttgtttggaaatcttaattcactgacaaagttccccatcggctgccggccctctgtcatcggatcttttgattgactgactgctcagcattggcagcaagctcttcacaccagccctgggtctgagctaatcagctgtgtttccttcatgctctgatgccttgaagtttggtactattctcctggtttctcttgtttaaaagtgctgagatacttgtctaaaagatgggccttaagattgtggtgtgcttttaataatgtgtggggtaagtgcctctagaggcaagcatacactatgcttgagtaactttctctccattctgaatctctccctaaaggacacagtttgtaaatgtttgttcatgtgaaaagggaagattcaggtaccttttctgtcctactgatgtgtggggctatttttatgttttgttcttcacttttttctgtacttgtgatttaaaggtgccagactggttaccctcaaggctagtgtccccactgtatcccaagaatagaaaaaataatgagaggcagcaaaactggcctgtgtctgagtccagcatattaggctgacccactctagaggaatattctccaaagcataaagtagaagatcattccttaggaatacaatacagtccatctgttttcatagctgagaaggcaattccgtgtcatgccatcatggagccactgcagtgttttggtatccaagccatagtcactcattctctccgtgagggaaaactagaatgtcttttcctcttccacctttacctttcaaaattccatccttgaaggttcggctcaaatgcttctttctccacacaacctttcctgagcccctgtgagtgtggttttccttccacattccatagcactttcttctaagacgtgttacatgctttgccatgtgactattgcatgtaggttgtcttgactgtgagaggcactgacatcgtgacatcgtcgaattcatttttgtatatcacacagaaggagaacatagtcgtgggcaagagtagatatttgaggttgaatagatggaccatttcaaagcttatcttttcagcctgacctttaaggctttgctctggccgttccctctaaatcagtgattgaagtttgctcccagatcctcatgagtagctatcaaactctccataagccatgtaggctcaggttcttggattccaggtattacacttcgggcatcatagtctgaatcaaaattgctacttttagctgcttagtagactgccattaccaatagtttaatgagaactacttttttaggggacggggggaagtgtggtccacagatccctgatagcccttcgtgtactatgtagtgaatctgcttgacatctagaaaagggaagagtaatatagaaaaagaattttgttgacctgcctgcatttaacaaatgtaaaatgtaaaattacagctttcacaggaatctaatatgcttttaataatcatatggattggtaatccatttactcctaatccctaattcgttttctgcaatgaaatgttgtcaaagggtggcatgaagctgttagaatttaagcatgattttcaaacatagcacattttttttgtggttttgtttttttggttttttttttttttttttttcagaataatttcaaaaatagtgccatatgaaatagttttgttactgttggcaggaaagtccaaaatgttatctcataataaaaacaggtacaagttcagtcttggataaaaacttttgaagtctgccacaaacaaatactatacaaaattttttcatcaaatgtcaagactgtggtatcaagactttataatgatatcaactgtagtggtgacagcttagtttccaatactttaactctttttccagcacttcatatttctttttggtttgagatgaagtctcgctctgtcacccagctggagtgcagtggcgccatctcagctcactgcaacctctgcctcccgggttcaagcgattctcctgcctcagcctcctgagtagctgtggttacaggcacacaccaccacgcccagctattttttgtatttttcatagagatggggtttcaccatgttgaccaggctggtcttgaactcctgacctcaggtgatccacccacctcggcctcccaaagtgctgggattgaagacatgagccactgcacccagccttcatatttcttattccttaggaaaaaaactaagatgtatactttgggttatatttaaagtcacattcaaatcccacaacaggatataaagaaatacttttcagggccaaatacaactggagaggattagaaataaatttacctttttttctctcacgttgaaacatctagccctcccatgtttgagtgtgaaatggctgtcaatccaatgtgatggagtgctgaaagccgtcttcagtgagaagtctctccataatgctccctaacatcagatccatgttaatcctgatgcacagaactgggaataggtaatatagcatagtgtttaagagcacagatgctgaagttagactgcttaggctggaatttagttaaccatttgtgtgactcagtttcctcatctgtgaaataggcataataacagtacctgcatatagactgttgtgaatatgaaatgagttaatatatctaaagcccctagaaaaagtctgacatatgtgaagcactacatttgctataccttatctatcaaagcctacagcttctggctaacattcccagtgttctataattattagatagaattttttttaacttagtagaaacaaagactaagaagggaaactagatgtggacgtgacgtctagctcaagattcccatgatggagccacatagagatatggatggcaaccagcataatgcctctcactgacataactatttgtctgaatttatattttattgttattatttaaagcttactgcaaattttaaaaactgaaacctgatgtccatatgtaggccagatgccacattaatcaatttaagaatgctggagcttcgcagaatactgcatgaacaacgagaaccgtggccctgaaagactcaaaaccctacagtatatgaaactattgcaggatgtgtggatgttcaaaggaataacagacttggaagcaatgcttactgaattttgatgtattaaaggatgtcaagtccaagagagagataaggtctcagaagacagaactagaaccatggggtaagcagttagaatgaggaagcactatggctcagtaggagaaagaaccttttagccatcaaagcgatctagaaattaaaggactgccttgggatctgcctgtcactgagagctggctgcagaggttttacaatcagggcttttgtaaaaggaactaaaatttgagtttggacccaattatcttacattctaactggatgtgtagaatctccaagaagaaagactcttctgtactgttttatagattttgccttccactccaaacatcctgagtcatgttccttttatacttgcatgtgagatgagagtcagagcactgacctcaaagccagcgaccgggttctactgttcctttctgcaagaacttagactatgagactcaatcccctcaaccgattaatgtaaaatcccctccatgccaatcttgcagaggataggggtggctgtactggtgatcttgctggggtaatggggtaatagtactggggtaatgacggcaggagtggtggttctattgctgctgacgttatgaacctgctttctcctccactttggctttagcaggactgaagtactccttggtgtgttcttatcaaacccttttttttccaggccgctgtgctcgctgtggagaaaacgtagttggggaaggtacaggatgcactgccatggatcaggtcttccacgtggattgttttacctgcatcatctgcaacaacaagctccgagggcagccattctatgctgtggaaaagaaagcatactgcgagccctgctacattgtaagttccagatttgttcctcaagcactttgcaaagatgtcttctgtggctgaatgccagtcactctagatagaatatagccatcagatctttgcttcttcctagacttcaaaatgtgtgtgtggggtgtgtgtgtgtgtgtgtgtgtgtgtgcgtgcgcgcatgtaaattagcatattgtaatttttttctacacatcccccattcataagcagtcagaaaggtgtattagcatgggactgccattcagttagtggtctgctgggaagatcatcagcctgtggctttctagcatgtatgtacaagctaaaattttctttcttaaagcatcagaaagctttccaagtagctgagtcacacctcttataagatctcaccctacatttgaagtgcccagtagtttcaaggaaactttacagaatctctggacttgtcagtcctcttccagaatactgggccctttgagtccatttttatctaccaaaatgtttcttccccctcttatccaacaggtttttaatgatgcaaacaggggaactgtttattataaagcaccttaaagagaaatgaacagtaatgctgactgagctaatcattgttttcttttattacagaacacaaaaactatattttaataatatacctgggtaactaaaaaattctcagtcatgttaccttagcgttttacaatgctacttacttaatctacctgttaaactattctctggtagagtaatttgatgaatgaacacagacttttttcatctattgtaaatttctttgctatccttcagcatgattttaatctttgtttaacacatgttgatgggaaaagtagtgttttttgtttgtttgttatgtaaacccacaaaacagtcatggtttgtccctcagtgcccagagatttcaacataaaagacaccttggtttctttaccaaggtattgggagtcatacttggctttacaaggttcacatttattgaagacgtttttggcctggttggtattttcctataacttggcagctctaacccattgtaaccttggggtctgtagcacagatctgaaagttcatcaagattaaggcttcgtaggattaaatatggctttgcatctgtcttaggttcaattttatttcgttttctttccaaaggtaacttaatacatgtaacatcatttctttccaaaggtagcttaaacacatgtagagccatacagtggtagagttggaaaaaaaatcttaaaatcatttgcgtaattactctctttagcaatgagaatgccaagacatacagaagaggaaagcgacttcgtatgacctatcattagtgtcagaaccaaggctgcattccgttattcacgctccacagtcttagattctttgcagatgctacatggttttcattttcctaaacataaagataaacaaagtaatgtactgttgatctggaaggagcaattatgcataagcgaaagtctagtaaacaaaagcttacctctttagaatataagaatatttcaaatatctttgaaatctttattgaaaaaagaaaggcattacataattccttgcctttttaaacagactaaaccgggtgtcattcacaatggcttggcaccacgtttatgaaattatttattgccacgagccctaaggtagtgatgttggcagagtgtgtagaggcacccagggttgtccttacaccaagtaaacacatactgctgtgtttttttatagctcctgtctattttttatccctttttgactccatagttgatttttgctactttaatgatgctactgtggcagcagccttcttcagttgttttgtttcaacccttgttagcttgaaatcatatagacagtattgggaaacagtgtaacagggtgggaagaacatgaatttgaatttcgttacgtcacttagtgcctcccctccttgggaaaattatttactctttctaagtatcagttgcctcatctatataatggggacgatggcagttattttccatgaagaagaaatgagacaatcctagtaaagcacactgggcctcttcaggaaaagtagtggaataaatgttattctgggattaactttaatgatgtttctgaaactgtttaatatttctgaatgtgggaaccttacatgtgcagtgaaattcactgggctttaggaaattattataacctttcagacatactcctcgcatttttacatgtttgcttgcttttctgagtgcgtaacaaaactggagaaggtctaatctgattaaataataggtttctacagtgtgtgggctcaagtttctatctccattccaggcataggatgggtctctgtgattctgtaggatgccagccccttcttctttggtttgttgttactatactatgcttatgagaaggaaaactatccgggagatatttaatcgcgtacttggaagaactgggtgaattcaaataatggaaattctaaccatttttttttttttacttctttccctcataagaacatttaatcaaggtttttctttaatgagatctattcgtggtgactctaaaatgtaatttaattcttatcagaattcagttaagctttaccaaagacccttgttcaatattgattcgagttcagcacagtcctcaagccctcagatggatgtatcagaactttaatttcttctgaacttttatatgtccaataagctgcatactagaagtgtaaggaggttgaggaaattgggcaaatgaaataaaacaagttggctttgaagatagtttgcattaaggagaatcctagaactgtgcgtctctcttggaaccaaaagccttagaacaggaagcatattctgtgtgatccagcaaaattgcctttggttacactgttgaaaactgatgtctaaaaggtattccatacaaaccagagcaaacctagcccttggccatcagtcagtgtgcctgtcttttttttttttttaattgatggaatgagaatattcaagatagtggcttaattatttttgtataaggaccagcatgtttgatactctgagttcaggaatgagaccagtctaatgtaaattaaatttacttctgcctaaattggttgttgatcaacttaagatcctattaaaattaaaaatttacatgattttgagggaaaatgcaccagtaatgtctgcagctttggttcaatgatttttaatattttcctgtggtttattgagtttgttcttaatctttgtgcttaagtagttatgattaaacagtttgattcagtatagcattgtaattctctttaatcattttacatattttgttttctattttttatttattaacataatacaaatgttcatatagttttgcattgttagtattcatttttagatttttatctgtttagttttacatttagattacacacttcattttaaaaccatttgccagtcaaaatgtattgtgtgttttgcaatcttttagaattgtaaataacatgcctatagatagttaataaaaattttattttttattttgaattacatccttagcataaattctttgatttatattaccaaatcaaatttaatctggaggacttttgcattaccttgctagatttctttagaaatatttttctaatttacagaaccatcaacaataatgaaactatatgttaaaatgcaaactatcccctatggcagaagtttatttatattttctgaactaatttaataagcacattatgtcttagttattttaagtttgtgtaattattagcaaaatcaatgagatgcttttcttctttggtgatatgtctcttgaaagcctagttttggttattcttatagatttgaatatgtaaacagattaaagtaaagatcactaaaactttgttaggaagtgatataaatagaatgtatttatcctaattctagctctcctggtgtgaccttgggtaaatcatttagcttctgagtatcagtgtcctcatttactaaagggagatattaatttctcccatgtcttcacagataaggaataagcagttgtgatattttgtatacatgaaattatttactaatataagtgcttaatctgattaacagaatttttatcattgctttttttttcccctttagtataatgtgatacactatagaaaccctctaaatctggggcaatttcttggctgtagttgctatggaaatactgaaataaataaatgtcatggaaggaatataaggacacatattaaaagcggaggttcatgctttgcttaagaagatttttatgttggtatgaatatgaagggcagcaacagtgcctcctgcttatgtacccttctgcacataaagagacagccttactcataagtatagttttagaaaaagaattgctgttttattcctagcattaccaaggagtctgggcctagggacagagtgcatcagaaattctcagcaaaagtctatttatgaagtggcagccaaggatcctcccccaaaccagtgcttttattcccagtggatggactccaggtcctaactctctgacagcagaaggtggtacagacatttttactagagttgaaatccaaatgactaaagggcctctggaaataggaggccaactccacaggaggctaaacactttaaggtacctgaaacttggcgcattagtgaccaacccactagcagccttttgctcccttatgtcatcaaatggctacagttaaaacattctaacttgtcagcctacattaagaggtagttttgtacctctgcaggaaagctgttcttttatatactcaattcttcttaataaaatgttttaaaagcacttatggccagtgctttatgtggatgttggaaaaggaagcaagagtttggactaaacctgaaaaatccacatgaactttcttcctttttttctaattgcctacgtctgctctctcacctccaaggagtgtttgtctgtgcctcttgtctctctttctgtctcacacaacacacacacacacacacacacacacacacacacacacacactttcttcttgctgttacatcatcatttcaccagaactctcctaggaaggagaaaaatggttcaagaaagagaaaaatttgtcaagcactctcttgggaagttaagcatgttacccactgggaatagttatctcttccattcatacagccccttacattttataatgctaccgagcatctgttgttgcatgctgtcatacctagtagagccttgtgaaatagatcatggggagattattagtctcattttacaaatgtggctcggatgttttcaaagtaaatgacaaaacaaagactatgaataacttttataatttacactttattgcttggcccatactaacatccgtgctaacattcagcaactaattttttttttcttttttgagatgtggtcttgctgttgttgcccaggctgaactcaaactcctgggataaaatgatcttcctgcctcagcctcgcaagtagctaggactacaggcttgcaccaccacgtgcaacgtgcaacttaatgttcaactcttttttttttttttttttttttttttggagacagggtctctctctgtcgcccaggctggagtgcagtggtatgatcttggctcactgcaatctccacctcccggattcaagcaattctcctgccttagcctcctgagtagctgggattacaggcgcccaccaccacgcccggctaatttttttattttttcatagagacggggtttaaccatgttggccaggctggtctcaaactcctgacctcaggttatccactgccttggcctcccaaagtgcttggattacaggcatgagccatcacacccagcccatgttaaattttctacgtgaagatcctaaaagcccccaactactcagatttaaaatcaggtataattatagccttttcccagaaaattttaattgataaccacctgactcatgctttccagtatcacagaacctgaaatgctaaacttctactgatgaaaaaccataagcccttgtattttcttgagcatttgaggccttaaaaagcaaaaaaaaaaggttaaaaatatttataacaactgacattgacattaacatttgctcagtgctttaacttttatgaagcacttttcttttatcatattaccctctaattaatgatcctagaaaatagttacagttatttttgccttcatttccagtggcaagaaactgaatcttagaaagtgtcagcttgcttagttccatagagtatgagtgtcagagctaatacttgaccctgggcctctgattcccaaggccggctatctctacatctaacagaaaacactggaaatcccatttgctgttgctaggttacctttttcccatgatggtaattcttttttaaaatcctaagtttttcattaatgtacgcccattagagaaaaattagcaaatagaagaagaaaggtatgtaattctctcatctcagtataatagttcacattttgtcatgcacttcttttctgttatgtttacctgtgggtatggaaggatgtatacaaatgtaaccacacatctgtatacatgtggttacatacacacacacacaatgagatcataccttaactattggttagtaccttgcttttgttacataacagtatatcaaactttgccttctatacagtccgttttaaatattcttgaaccactgaaaaagaatatatgtcacctacatatgctttctgaaggttgattcaaggatattttccaaaaggcaaataaagtaatcaaaataatatgcacaagagatgcatagcaaataaaatggtgaaaagcaatgaagtaataaaactactggtaaaaaaataaaggggcaaagatgtagtagtaaactcagaccaaaataagataatattaattacctactaactacaatattcatagaagaaaagtaccattcagtacaaaggtatcaagcagtctgaagaacattactttttgataaatgtcacagttccccatgaagaatagccctgagctttccttcattaaatatcattatattgaaatgtataatttaaaaatactgaagtaagagataagaagggtgaaaacatattctttataaaacctgaacacattgcttttagtctttgataaatcataaaaaggagttaaataatatgattgataacgttaatttaatccacatacactgatctatgcaaacaaagagtttctatcttctgtctaaatctgcatgggagatttagaaaaacatttatcatatcaaagtctaataggaaattgtagacagttcctactgtggctggcagaattacatgtagccatatagtagaacaagaaatgaataaatacataagcgcactcttgggttaaggaatcttagaaagtagtgatgatgctaacactgcatagcaatgagaacgggatggagccgacatagtatgccaagtaatactagtctcattaattgcaacaggaaacagtgcatatgtattaacttaaaaaactagaacagacaagaaaatcaaccttaaagaaatccattaaaataaaacattgttgataagttgaaaaatactgcaatgtttagatctggggatgattttttgaaaagagcagtgaaataaacatttggttaagataaccaagaaagaaacaaaaactacagaaaattaggaatgaaaaagacactcagcatagatacagatgacattttaaaattattgcacttaaaattttatatgagagactatgttctatgcaaatctaaagtacaggtgaaagaaacttgaataaactcgtaaagacagatggaatgtgaagctactacttgcaaaagagccagaaaatttcactaatcaaagttttcagatctccaaagaacaaatgatttctgtgctatttcaactttaagagcctagcaaaaaacgagatgcttaccaaatcattttataaagctagcgtgctcccaataataatacctaacctaggttacccccagaagacaattctgtgataatctaactttcataaatgcagaaatcctaagtgaaatattagcaaattgaataccacataataaaacattccagttattccatattcagtgctagaacaattaggaatcttttagcataatttgctatattgatatatcaaaattttagaaaaactagtaatctccatagatgcttttcattaaaagggcatttaataaaatttttcatgcattcatatttaaaaacaaaaacaatggcaatgcaaaataagctctaagtagtatttacatatttcgatttattatgcaacatttctaacatatataaagatatgaagcataatgacaaaggtccatgtacctgttatccaatttaagaaataaaacattaaaaattcagtagaaatcccttgggttctattccatgatcatgttcccccagagagagccactattctaaatttgttttttatcattttatgcatttctttaaacaatatgtagtgttgttagcacatagtgtttcttaattttaaataaatggcattctattatttgtattagtgggagacttttccactcaacatcttaagactgtatgtacatatagtcatttacaaatgattgattattcttctagagaacctgaaaaattttaaatattggaataatgaaagtttagtaagctgacaatataaaaatgacaattttaggtttagaatatataacagaaaagtgtcctcatacagaagcaataaaaaatataaaatatctaggtaaaactttaaaacgtataaatgatctaagtgaggaatgctaaaaaagttttgcatgaataattaactcatgagcaaaaagggtattttggggattgaatgtgctttggaaagcctctctcgctttaatagacattcgtattatcaccctttattatacaacaatgttttcagtgggggaatgaatagttactacactctcctttgctagtggtatttatttagccctttcaaccaaatatcccccagccctctgctcatcttagttactgctcaccacatccttgcacgttccaaggcagcccttacttggtaaggaaagagaggcacagacctgtaagtggattgcccagaacaacaaagaggcctagctgaacataaccctttcttcccagttcctgttgcaaaccgtattaactgctgttgtcatagaattagaatgctttttaaagtccagcaggaaccttagaaattcaataatgccattttatagctgagaaagctaaatcccaagaaagctgagtgttttgcctgaggttatacgatttattaacggcagaggtgggactagaaaccatgagtcttcatgaggccttcaaagaactactttctttgggaccgacatgaagggtttaaacatttgtggctacaggtccagagagacatccctagaaaatgctgagattagtaagattttggttggagagtgtagaaataggacagcgtttgctttcaccctaaccagaatgaagggtctcagatttccaggttaaatgcctctgaaactttattctagaaccttcccactgccctagtttgtttaagtcaagcatgaactcaccactcaatgtttgccagagtttggatgaatgtcagcatcaggctactgtaataatggtttaagattatttaatcccattagttatacacttcattaggctgagtgaattgttggcagtggttcagtaaacttcctcctttagagataaaaggacagaaagaaaataggaaaggagcctattcctcattttctttcatagttataattctttttttttttttttttttttttttcccgagacggggtcttgctctgtcacccaggctggagtgcagtggtgcaatctcggctcaccgcaagctccacctgccgggttcacgccattctcctgcctcagcctcccgagtagttgggactacaagcacccgccaccacgcccagctattttttttttttttttttttgtatttttagtagagatgggtttcaccgtgttagccaggatggtcttgatctcctgacctcatgatccgcctgccttggcctcccaaagtgctgggattacaggggtgagccactgcactggccataattcttaatggataaaggaatgataattacccagctgtagcgtggactccatattagtacggtctcctaaactactcttcattctcaggagaaataaatgtttgtaacctaatattctctattagaagaaaatggacagtggcagagaagagagtgtgtgtccgtgtgatcaggccataaagttaatcttaaaagtaaacctgaaaataaattcaaagattctagatatgagagtcttttacgtagtggggttggtatgaggcagtaaatgattttaaggaaagaatatagaatttaaagtgagacctggttcacactcagccagctgctattctgcattcttccctttacttttagcttcagtttcctcacacttagaatgaaaacaaacaataagagcaaaccagtttgttatatgttctcacatctgactttgtaaaacagtttgaaaacattagcgtgctcagctccaggattgtcccatgcaggcaatgactgttacatctttcccttctttgtagtttatttttgcccagatggatctgcattcatttgtactatctattataatattgttagaattcactattatactgtagaattcattaattctattatattgtagaattcactaattctataatattgtacaattcacattatatattataacattgtagaattcaccaataatattgtaaaagtcactaataattcataaaaggaatgaattcatttgtgatcttatcaaaaaaaatttaaaaagaaaaaagaggccgggcacagtagctcacgcctgtaatcccagcacgttgggaggccgaggtgcacagatcacttgaggtcaggagttcgagaccagactggctaacatagtgaaactccatctctactaaaaatacaaaaattagctgaatgtggtggcacaagcctgtaatcccagctactcgggaggctgaggcaggagaatcacttgaacccaggaggcagaggttgcagtgagctgggatttgtgccactgcactccagcctgggcgacagagtgagactccatctcaaaaaaaaaaaaaaagtaaagaaagaaagaaaggaagaaagggagaaagaaagaaagaaagaggcacttgaatgaaagtactgtttcttagctcacatggttatagggtgaaatgaggattcggagaggacaggactgaacaaaaatcagtgtgggggctttgagtcgtaaataactgtaccagggcttagccccagttagacacataacaaatctgcaagagagaattttgcctaacttgaatcaccaaaggacaactgtaagtcagcatttcaggctctggaatattacttgcatacccacttggtttgagaacttgtggagtctgagagatggcaagtcatgagactaggagctcggttttctcaaaatgtgtcagcggtcacctgctttgtaatcactgtgaactcctcattaaaaagtaaagttctggactcctccccagaatttctgcacaaggagacaggaactttgcatcttttgcaaggctcctgggacagcagggagttgggaggtaaatttttatgcacagtcaagtttgaaatccactagtctgtacttccagtcaagctcatgcaaaaattggtcccaaaatatgtttgcattcttatctcccatcagctctcctacacattctttttacaacacttgcccaaggtgaggactcttctcctggacattgatatggaggtttctctgtctattcccatgccattggttgcctaccttctgccttttccgatctccagccttaaaatgctttcctggaacttaaccaactagatgtaaccatttctgaacatgcaaggttttcatttccacatctctcataggattgatcctcaccacaactggtattatcaagtcactggcatccttgacacactccagtactgacaggaaccccttgaagactgtgcggggtgcggggaggtcacccttttttcttttcttttcttttcttttttttgagacagagtctcactctgtagcccaggctggagtgcagtggcgccatcttggctcactgcaacctctgcctcctgggttcgcgccattctcctgcctcggcctcccgagtagctgggactacaggtgcccgccaccaagcccagctaatttttgtatttttagtagagacggggtttcaccgtgttagccaggatgatctcgatctcctgactgcagggaggtcacctttaattcgtctttgtcttttctgtagtgcttatcataataggtgaacctattgctgctctgatagtgagggggatttggggggagcctgtgtcactctagcactatgtctccccacagtcattgactcacataccctttgcttgccccttcgtgcacctaggacctgagactatgtatgtataagaaggaaggaggagaacttggctctgagagactatgaacagagtcattgctgaaatgtaaatatcaaagattgaagggaaagatgtgagagtgaagccagctgtctagcttccagccgtagaatgatcataagagctactacactcaaggtcaaacacactgactcacccatgaaaattgccaaggagtttgagtggaagttctctgatattccaatgactttgaatgggacacggtaattccttcccacagccagggcttacttaaaataagtaaatgaataaataaagtctactccctggatcttttttttgctcttgtccctgcagagtaaggggatgccagccaaggctgacatcatcattatagcaagacaggtgctttttttgaatacttcacaaggacaagggcctggtattatgtaggtcttcaaagaatatatatatatataaatttttttaattcagtctcctacatttatagtatggggaaataagacaagagcgaggaatgccttgcttgggatattgcaattggatggctgcactgaggactatttaagcaaccttaaaatcacaaacacacatctgtgatgactttttaattatatctgtcattttggaaaagatattaaacatcttcctcagaagttatttttactttacacactctttaataatgttaaaagatatttgatgcaatttatattaataaagctcatgggacgtgttagtaaaaataaaattgaatcttctaaaatatattcctttaaaaatgaatgtctataattttatgctagtttaagcaaataatctgaataaatcctgtttgtttagcataacacatgtacacgtagtttctccacaaaatggaacgcgctaaatgtgttggggcctcaggaaagaactagtggaagggggcataggaggatttgggggcaaaaggaggaatccaaaaagaaggtcttcatggaggaagagacctgtcccaatgtgtcattcggtagatctcactttctcctagtacctcatagtcattcatttttcacccccaacagacaagtggagactgatattattcccttttacaatgtaacaaaatcaaagcttagaaaaccagggggtttggaaaataaggaatttgtgtaggattaaaatagaactttgagctcctggactctgaatcttagcttctaccttgcacttaaataaatttatgctaacagatgtcctgtcatcagataggacttttttttttctttttaatgtcggcaagtctcattgttacagctctctggtctgcccagtttggttacacctgttttgagattccttgcctatacccttccaactgaagacaagcacttcctactgtacttacagaactttcatctatgtcttggtttaatcttttgcctttgttttaaccgtttaccacttctgctttatattggtaggtaatcttacccccaaatacatagactatgagctccttaggagcaaactcatttttttttcctgttgttctttgtgtctttttttccctatccacctccaaatcttactccacatttctgaaaatagcacccaaagcaatacctctcactttggggagtatttagtacattttttaaaaaatgaatgtattatacagtctggatcaccataacaaaaatacaaggactgagtgccttaaataacagagatttattttcttatagattgagaatggaagtccgagatcagggtgttagcactgtaggattctgctgaggactgtcttcctgacttgtagatagccaccctctcactgtgtccttacatggtgtgtgtggggagggagcaagcccactaagtgtcttttcttataaggtcactagtaccatcatgagggctccatccttatgacctcatctaggcttaatcacttctcaaaggccccatatacacatactatcactttggggttaaggcttcaacatataaatttataaagggactcaatttagtccatagcaataaattaggccttttgactatagatctgtaagtgcataattggcactgattgatggattgcagatcagaatatcctatgcttctagttatatagaaactacatgcttagtgttttttttttttttttagacagagtctcactctgttgcccaggctgaagtgtagtggcacaatcttggctcactgcagcctccacctcccagattcaagcgattctcctgcctcagccttctcagtagctgggactgcaggcatgtgccaccacgcccagctaatttttgtatttttagtacagacggggtttcaccatgttggcccggatggtctggatctcctgacctcgtgatccacctgcttcagcctcccaaggtgctgggattacaggtgtgagccaccacacccggcccatgcttagttatttaacagaggtttattgagcactgtgttggctttaaacaattttgctagacattcagtagggcctgatgagtgtttaagacctcgtacagttcaggtgcattttcctttaaggatacatttaacctgctagatgtcatctcattttgaagacaagagaaaaagagaggaagacttgttttttcagagggttattatacattcctattagatcattaggaaattggcacaagtggcaggaagccaaactgacctgagtctggctgggcagtgtctgcaggttactccagcaaagctgctggaataacgatgtgttcttccataaagtgctttttgtcaaagtctcttctggaattaactcctcatgcacagatcgataaaccccaccaacttgccaatgtaattaagaagtgacaggttaagcataaccattaattaagttcaaagtaaaagaaaatgaagaagattgtttttgtgaaattgtgctgtcagatttttctcaagggtatttctgagttcctataaaggggaatttaggaaagggaggagaagattgtctccacttccttgggaaaagtgagtgtttaaacacatgtccattgaatatttttaactgaaaagtgaactatttgccagttttaagagacattgagtgagcaccttctgtgtgcaaaagactgtgctccgtgctatgcggaatacagcgcagtgtgagacttgttcacgctctcgtggagccctgaggtgaatgagaagtatcagacatgtgaacaaatataacacaaggcaaagtaatccaacttatctgtgagagattcgggcagttgtgagagctcagaggaaaggccatgccccatcctacagtggggagaggaggggactggcatcgagaaagacctcccagaggatgcagcatttgagcaaagccttgaaagtagagtaggaatggataagggggaaagaatgaatgagaacagttccaatatctcaacatttttttatgttgaattccattatagcttctaggatcaaaggaaaagaaatcagcctcttgttcagtaaagatttgttgagcattcattatatgtgcattattctgcagaaaatttggggctgggagaggtaaaaaaataccttcaggataacaggctttttcacaaaagtatcaaatagtcttagactcattgtcttcctctgatggcatcttaatggaattcaatacaaaggccaaaattcctttgttttgaagccacaagaaaacacagccaatggaaaagccgtgttagtgctgcctgtcctattctgataaggtgaatacttaaaagctatgaaagaagcactgagtactgctggacagtttgagttcatttggctggtagaattgagtggaagtcaattctcatgccatttaaactggaagaaactgaagattctccaacccaagctcctctttttgcagatagtcaactgaagccctgtaagactgtagttttatagataaaaaagagccatgtgaatttcctaaatcacataacagtcagtttattatttgacatttatggtacattcacatggaagagaatgattagacatttccaggagagaataacgactcccaattccctgagttaccattagatggtattaagcaacttcacttaattatgtacctgttttccagttatgttaattatacatcctttagcatttaccacctgtaccaatcatttagcataataataccttatacttaaatgcaagtacccagaatacttttatagttgttttcatttgatattcacaacaatcctacaaggcaagtgttatttctagattagatatgagagaactgaggcatagagaaggtaacccatatagccaagaaactaaaacagggttctgacatccattttctaactatgcatctaggtttttttttttttttacctctgcgtctaagttgcctgcctaaatcgccttcagtccattgaaatccatccaatcaatatttactgagcatcatctgtatttcaaatattgtagtgggcattgggggtatgaaattgcaaaagagagaatcatcagtatttgggaaactcactgtttgaatgagatagaaagccaaacagataaatgggaattattttaagtgccataatgggtctatgcactgtctttggagattggatggacagggtagcaaaagattgaggagctaattttgctgctgtttatctaagcatgtcagggtcctgtcttttcacgtagattatgagtgtcttggcatgtcttttgtctctctgcatcccccgaggctccttgcacagtcctcacactccactggcgttctgttaatatttgttgatgatgatactggtgattttttctctctgacatccagaacactggagagattttctgttggcccttgggtataacagatttttatttatacatttgaattagccttttagaaatcattcttaagtaaaatagatatctttttagtgagagagtttctaaatacgaacttattcaaaacagtaatgatattctattttagccagctaatactcaactacgatttgcaatttagagagttgtgcttgtatagattgtccctttctgaagtgagtgaattgtaactttaaataagggctgttaacacatcaaaatagtttttaatcagcctcaaaaattccccttatttccaagtatcttatttttactatttcattgatgtttcaagtggaatcaaatattccaactgttttccactggaagaagatgaatttcaggtacaattcagtagcaaagaacacccatgttttcaaaataatggagaaatttttttctcatatgaagttatgattaaatttgtgaattgcacaagcttggaattctgctgcaggatgcctacattctgtattgctttattttggtcatatattacaaatggaatatttcccagctcatttatatacagttcctggttgctgaaattttactggcaagctttgtgaactaattttacttctcaaagatactaggaataaagtgaaaatagggtcttttctctcataggtctaaaagatacttctttcctttaaccattacattctggaggtgtaattaatccaaccctgctgtagataggatctcattataaagattctaggtaaacagtctttctagcagaaatgatctttttggttcagtcttgcagcatttcctaaaattgctagtgtacgtagtaaatagggaggtaagtggggaaatttcctaaaaatgccagtgtacagagtgaattgttaggtaaatgagaaaatcaggcttgatttaccaaccaccccatgtgcacatacaaacaaacacacactcacaccaaagccaggaaccctgcaacaaagttctatttaccctgaggagatataaaactttgtgactgccactaaattatttttttgaaaaataatacagaaatttgtaagcagacacaacagctctagtttatccaccaaataacaatataaatgggacaagcaaagagaaactgtaatttgaagatttttgagtgtgatacttataaaagtgtgtgtgtttgtgtgtagaaatgtattgaatttgagagtaatttatggaaagtgctgtcagcatggtatttcaaatgcttcacaatttgaatttaaactagtcaatgggatcattaagattattatgcatgttttccaaagagtttgaattcaaatgacaacttaaaagaaaaaaaaaaagatgtccttgaaaaactaaggaatgttagtgcacttatagaaattcttgcagtttggagtaatttgccacctccccttctgaaaaagtacctgatgatagtgtgcttgagagataggggtattgcagacatattccttaggtgagtaaaactgaattgtaaagtggatgctatggaccatggattatttcatttagtacgattgacagtagaaaatcaggaagggacgtgcatcagtgcgaggctgacacacagatctgaggatggcagaagctcactgaatagcacacgcaaggacccttcaaactcatcacatgtgccgtttggttccctttcaatgggtcggtcttggaatatggaggtctgctttcattttgtgccaagtaaccacgtgagcagtttacaaaagatacaaacagaaggctgctcattcatttttcaaaaagacttttttttttttgcaatggagtttgcaaagtgattttgcaatggattttgcaaaaaaaatggatgccattttttttaaataagtgtaattccaatgatgggaaatttactagctctcaaggcagcttttccttgtgttgaaatctctaaaggttaaaaagttactttttggaaagaagtctatttccttacaacatgttttcattggtccatagagaagacagctaatacatcttccacttggcagccttttaagtatttgaagaaaattctcaagtccatctgaatcttctgttttggctaacttctagttccttcatccatttccaacctaaatttgagcctaacgaacagatttcttctttcttatttaaatatatatatatatgaggaaataaaggcacagagggcttaagggagttgcccaagaacatagagctggttggatgactggaatgtaaggctgtgtggctctaaaccttgtcatttagactagagcacctatacgtcagttagcttcctgccacttcttgttttctgcctggataggactttataaagagtttggaagaagggagagttccgacgaggtacagaaatcagaacttccccttcttccaaactatatacaaataatcagttaatcagattaaaggactcttagtaacattgaaatcaaacctttgtgtttccaggagctctgagaacaacaatttttttggagcattgcaatctcttgagtatccaaaatgattctgtaatgatgtctgtgaggtcagaattggagcagcaaatggaattcctttaagggcttcccatcaatggacagctgattccagaaatggaggaggcacagtttgtatccaaattcataagcacaagtgggagaaattaggctttggtaaagagggtgacattcccaaaggaatcatctgtgaagttggggaaggaattcaagctcagggctgctgttctctaccaggttcttcagccagctggacatgctccccaggtttctactcagtctggaatgttagtaaaagtccacttcctctccttgtttctcccttctagtgaaaacgttcctcttctctaccttcctgacctcaagaccattgttccacacatcccccctcaggatcccaccccgccattctcattctcattacattgtttctggatccatgtctttatcagatgcagcccactgtccctttcagaagatgccagaaaatttacatatgtgatcaaatgttcccatcacaacagttctttccagtaatcccagtgctgggcagctgattccagtaatggaggagacactttcagctattaggcaatggatcacactttcaaaggagattgagcaatctcctcatcaagttgtacttagagcacaaatctggtgccaaaaggcactaccggattcagactgacagcactgagagttttgagtgaaagggaagttagactggtgttatgtgtattcactgggaggaactcaccgggagaaataaagagggtttccagtttattcattgtgtaaagcggctataatagtatttataggggttttgtgaatgtcaaataaaattatatttggaacagtggctagtgccataagtaggacttaacctttagcaatatgtactacattaaaaggaaggtggacacatgagtgatctctagcattttgtgactggaaggaaagagactggatgaccactcttcagagatgctatggacagtacttttgtcaaggactgggagtggagaaaatgacttatagtggtctttccaacatgaagtttgtattaatccgttttcacactgtgaggaagaaatacctgatactgggcaattataaagaaaagaggtttaattggctcacagttccacacggctggggaggcgtcaggaaacttacaatcatggtggaaggcacctcttcacagggtggcaggagagagaatgagagacaagcaaaaaaggaaaagccctttataaaactatcaccccctgcctcggtgcggtcgctcacacctgtaatcccagcactttgggaggccgaggtgggtggatcacgaggtcaggagatcgagatcatcctggctaacacggtgaaaccccatctctactaaaaaaaaaaaaatacaaaaaaattagccggacatggtggcgggtgcctgtagtcccagctactcaggaggctgaggcaggagaatcacttgaacccgggaggcggacgttgcagtgagctgagatcatgccactgcactccagcctgggcgacagagcaagactccgtctcaaaaaaaaaaaaaaaaaatctatcaccccccttgattcacttacctcccactgtgtcccttctacttcacgtggggattatgggaactacaattcaagatgagatttgggtggggacacagccaaaccatatcacacatgaaacacagaaaaaggacatctttttacatggatcttctgatatgcttgtaccaaagcccacagtatatcctgtcttcttgaaagagtatcatagttattcatttgccttggatggaaataatgttgtaataccagttaatacttttttcaactaaagggaatttggcttcatctccagttgcaaattcacatcaggaaatatcaaatccaaagatcaaaactcagtatctcatcactttcaggaccatccttgccacttgtctcaggcatcatgtacctggaagctgaaaagcaatgtacagaacctttgaattggagagatatcaatttgaacccagatcctgctacttcctacattgtgaaagggatcaagtttctttagttctctaaagcaaaggtttttcatctataaaaggaggttaataaaagggaatacttatcatgttgaattaatgggaatattaaatgagtttatgtggtttaattgcctagcacagtatctgcctcctaagatatgtttaataaatgctaactgtgactatagagatttaccctgaagatacctgtcatgtcatgccttctctgtcaaatagatcatgaatgcagttcctagcctctctctcctgttataccctcctagcaatattctgatgcagatgaacccagccacttgtcttttgcttgccagaacagctgaatgttgctgggaaaaaaaaaaacaaaacacagccgggcataatcatatcattataagttgtgaccagccttgacctgcgccttgaccccacccacagcctacattcttacaccctgctctcaactgtttcagacattctctactgtgacttctatctcccttccccactccttccttctcaagggatgccctggcctcattcttcatagtgaaaatgaaagctgccagaagaaactctttcagcttctgctctcaaatctgtgcccatcctttctgtcccttagtgcctatcagattatcagttgccaattggtctccatgtatctctggtccctttttcccctgtcttctgagtgccctggctccatggatcatccattctttatcctacccaatgggattcttctcgtcaacatccatttgtgccccagcttggcccatattttccctccattgactccacagctctctgtagctattgctttatcccttccttcacagccaaactctggaaagttggatattagaaatgctgtctccacactattcacaatagcaaagacatggaatcaacttaaatgcccatcagcgacagactggataaagaaaatgtggtacatataccccacagaatactaagcagccataaaaaagaatgagatcatgtattttgcaggaacatggatggagctagaggccattatccttagcaaagtaatgcaggaatagaaaaactaatgctgcttgttctcatttataagtgagagctgaatgatgagaacacgtggacacaaataaggaaacaacaagcactgggatctacttgagggtggagggggagaggagggagaggaatgaagatagctgttgggtactgggcttcatacctgagtggtgaaataatctgtacaacaaacccccatgacatgagtttgcctatgtgactaaaccttcacatatacccctgaacctaaaataaaagttttttttaaaaaaagaaaaaaaaatcctgcctccatttttctatcaagtattctgcctgctaccaggcccctatcccttcatagactagctgaggacatcagggacttccatgttgccaaaaccgtgagtctaatcagtgtttacctaacttgatatctcagtaaaggatcattcattcttacaaaactgtccctcccaacttccttggcaccccagcctcccgattttgtttttaatttttcaataggttattgggggcacaggtggtgtttggttacatgagtaagttcttagtggtgatttgtgagattttcgtgcacccatcacccaagcagtatatactgcaccatatttgtaatcttttatccctcgtcccccttccacgcttccccccaaatccccaaagtccgtcgtatcattcttatgcttttgcgtcctcgtggcttagctcccacatatcagtgagaaaatatgatatttggttttccattcctgagttacttcacttagaataataatttccaatttcatccaggtcactgtgaatgccattatttcattcatttttatggctgaatagtattccatcatatatatatattccatcatatatatatattccatcatatatatatattccatcatatatatatattccatcatatatatatattccatcatatatatatattccatcatatatatatattccatcatatatatatattccatcatatatatatattccatcatatatatatattccatcatatatatattccatcatatatatattccatcatatatatatattccatcatatatatatattccatcatatatatatattccatcatatatatattccatcatatatatatattccatcatatatatatattccatcatatatatatattccatcatatatatatattccatcatatatatatattccatcatatatatatattccatcatatatatatattccatcatatatatatattccatcatatatatatattcatcatatatatatattccatcatatatatatatatatatattccatcatatatatatatacacacacacacacacacacacacacatacccacacatcccagtttctttatccacttgttgattgatgggcatttgggttggttccatgattttgcaattgcgaattgtgctgctataaacatgcttgtgcaagtatctttttcgtatgacttcttttcctctgggtagatacccagtagtgggattgctggattaaatggtggttctacttttagttcattaaggaatctccacattgtttccataggaccagcctgctgattttctctttacctatgtctcagttacctttgctgttttgtattctccctgactcctaagttgtccagtctctctgggatcattttctttctcaattttctctttagtcaccctcatatcctcccaagcttttagatatcatcagtatgctgacatgtctcaaataggtaccatgatggttttgttactattttttatcttagccattctgataggtgtgtagtaattatctcattatagtttgacttgcttttctcaaagtgctaatgatattaaacatcagtgcaggctgggcccggtggctcatgcttgtaatcctagcactttgggaggctgaggcgggtggatcacttgaggtcaggagttcgaaaccagtgtggccaacatgctgaaaccctgtctctactaaaaatacaaaaaaaattacccgggcatggtggcgggtgcctataatcccaactacttgggaggctgaggcaggagcattgtttgaacctgggaggcagaggttgcagtgagccaagagcatgccactgcactccagcctgggcaacagcgtgagactccgtctcaaaaaaaaaaaaaaaaaaaaaaaaaaaccaaccatcagtgcagaagaggatgtggagtggagagactgcatcaattatattttgctgatgagaatataagatggaacaaccattctagagaaagttttgggaatttcttcttttaaaactaatcctgcaactaccatgtgacccagcagttgcactcctgggcatttatcccagggaaatgaagacttgtatatcccagggaaatgaacaaatcaaatatttgttcatagcagctatatttgtaagattcccaacctggaaaaaacccagatgtctttcaacaggtgaatggttaaacggtggcacattcttaccctggaatacgatttagcaataaaaggaaggagttgttgatatatgcaacaccttgggtgaatctcaaaagaattatactgagtgggaagggccaacccccaaaggctgcatactgtatgattctatatataacattcttgaaataacactatataaatggagaacagattagtgtttgtcaggagttagggatgggagacaagaagtcagggattaggaattgggggtttggggtagctgtggttataaaaggacaatagaagggatcattgtggtgatggaactgctctgtatctttgccatggtggcagatacattaatctatacaggcagtgcaattacataaatcaaatacacacacacctgcatgaacttacacatatatacagacaagtggagaaatctgaataagattgatagactgtatcaatctcatattctggctgtaatattgtaccatagttttacaaggtattattgctgggggaaactggataaagggtacttagatctctacgttatttctttcaacttcatatgaatctacaattataagaaaatttaaagtttaatttatagaaaaggcaattttagatttgaaataaaattcctacattaactgaaaaattaattaaatataaatttaaaatcaaaattaaaaaccctttgacaactttagatctctctctcttacacacacacgcacacacacacatacatctaagctttattgtctttgctctactaacagttcagctccctgtaattcagtttctatccccacctctccacttacaccacacttctgaacatcaccagtgacctctttgatgtttaatacacttaagactcttcagtccttatcattcttgagctcttgcagcatttaaagatgttgactctatctttgtttcatttgacttctatagcaccgtacactctgggttttcttcctatcgctgtacacaactttctaccgtttttaatagatttcctctcttcattccttaaattctccatttttcttgagttctgccctaatctcccttcttgtctcaatctgtactcctgagttatttcatctgcttccgtgagtacaaatatcatctgtgtgctgagaactctctggccaaaatctgcagctggatctctctgtaagctccagatatgtatctatcattttagcctgcagtcttcatagattggcccataggcccacaaatgcaacagtttcagacagaacccaaggtgttcccttttaaacctgctcctctctgtgttccttttccatgaatggcattaccttgttgctccaaccaaaggcacaggagctggcctgtatccttcctcttccttcagtatcccctcttatccacttattaaccaatttctgacataatactttggcttcctttatatcttctttcatttatgagacaagttccttcagtgttttctagtgacttttcattacttggaagagacagttcatactcctcacactaccatgtaaagagctcatagccacatgcacacacatgcacatccacttgtgcacacatacctaaacacacacccaaaacagagagattgtctcatgcctgtggctgggtaaacacttgtccttgatggaatgtgtagctttcccatctccatcccaatcacctagccaaaaactctcctccttcaggcctccatttagacatcacttttccctcaagtatgtgtgattcttgtgccttatcctccccatcatcctgtaatagcatcctctgcttttcctcatcatagcatttagaagactgtatttaaattacctatttgacacatacctcagtagctatacattttccctaaggggagggttgatgtcttgtttctcattgcatcctgcagtaagcaccgagtaagtgtttcttgactctggggctgtactgagttgaagaaggatgacatcactgactacagaaccctttgtataagcatcaaaggggtagcagtggggtaaatgatcacatcctggctaaatggttccgattcctacaaccctgcagcacgcccccccggctctaaaccttttagtcatttcctgtgaatcttgccagcactcatttcattttttgttttttccattttcttcatctttcccacatagtatagaccagaatgaatcaaggtctaacttatgctgactgtccgtgttgcatcatcagtctttggggccccttctcagtttctgtggctgctcttgtgcctgctgactccatccctgtagaccttgctgttcctcccagtctgtggccactaacctcagttatttttactgaatgtgttacctcatccatagtgagtcttttgttgttgttgggttttttttttagcaacaatgtattttttaattaaggtatgtacattgttattttagacataatgctattgcacacttaatagactaccatatagtgtaaacataacctttactgcactgggaaaccaaaaaaataagtgtgacacactttattcaatagtcactttattgcaatgttctggaaccctttttgttgttgttgttgttgaacggttattataacatgtctgatttagaggaaagtacactgaactgaaaatcaggaaagctgggcccagggggctggccttgagcagctgactaagcctgtacatttaattcaaaaagagctactcaggttattcccttaatcggtcttatactttatgacagtaagcacttacctcgttctgtcacatggtgtggccagattatgcatgtactatgattcaaaacattcacgtaaataaatcttcctaacatacaagaattatgtgtctgtggtgctttccagcttttgatgtgcttgcaaacccattttctcatttaatcctcacaaagttggaaaccagctcacttacttattcatgtttacaggaataatcaacattgatgccaataattttgattatatattttaaaaatctcatgaaattggttttaaaagaatcatttattagacaaaaagagtgaacctatcaacaggcaattcacagaagagaaaataaaaataacaaatgaaccaatgaaatgatgttcaaattatttaaagaaatacagtttaaaatattattttttcattctcagaccagccggcatttataagttcaatgcttggtattggcaaaagtatgggaagcatgtactcacatgggcttgtgataggagtacaaattaatacaaccttttcgaaacaaaatttagcactatctttcaaaattttaggtgtgcactatttttgaccctgcaactcgatttcagacagtaggcgtatttgcataaaggcacagtggtattctgtttcagaatacacattgcaacatttttatgatagaataaaaggactagtaaaataaagtacagcaactgcatgcaataataacatggaggctatcagaaaaataagacaaatctatatatgctaattaaagacaccttaaaaactattttaggaaaaaacaaggtacaaaataggacataaaggatctgatttgtgtttgaagaaaaatttcaaacatgagtgtttatatgtgaatgtgtgtgtggtgtgtgcgtgtgtgtgtgtgtacatgcttatacaggcatgtataagcaatctgatacatgcctgtataagtattacccaatcttttagtgattatctctggaaaagagttttacttttcattctctacccttctatgacagttgaatttttgaatttttaaatgaataaatgtgtgtgtgttgtgtatttttaaagttaacatacagactgagcgcagtggctcacgcctgtaatcctagaactttgggaggcgaatcacctgaggtcaggagttcaagactagcctggccaacatggtgaaacccttgtctctactaaaaatacaaaaattagtcgggtgtggtggcgggcacctgtaatcccagctactcgggaggctgaggcaggagagtcgcttgaaccaggaggtggaggttgcagtgagccaagatcatgccactgcactccagcctgggcgacagagtgagactctgtctccaaaaaaaaaaaatgttagcatatagcgtagaattcagcttttcttattctaggtagcgatggtgcttttcactgctttgcccaacttaattgacccaagtagaaaagtcttcaaaaaaaaaaaaacgctttagaaaaacactttagacactttagatttatgtgacttcaaaagtcaaaaatggtaataatcctgcttaggcagaagccttgccctcagtcccaaaacatgatggacaagcgggtgacttacctgtggcttttcttgtatcttgcagtctgtcagcaatcatgaaatgtaggcctcagagtggaagggcccctagagaccatccattgcctctcaggagcatggtcattctgcagatcaaggtcctgctctgggagaaatgggtgcacactcactctgcgttctgtccagcccttctgccacctacatttctatgcttttctcttactgctaaatagcttcctaaaggaaaagtgaatggtctttgtgaattcaaacctcattctgttgcttccctatttaaaactcttcaatgagtccctcttcccaatgctctgtctctagttgttctgtatataaaagctaaacttcttcacatgtttctgtttctcttgtttatgcgatcgtttgtcattggccttgtgttggtgatgtatgttctgaatgaataggctccagcaattaagtgactgagatgaaatgcttttgtatctctctagcctcatttcttttttttttttaccactgtgatgcaaacacatggaactactgttctccattgcaccatgattagtctatccgtagtcttttgtgtgtgatctttctgtacctagaacactcgtcttgggcttttgcctggccagtacattgccattcttcaggtctcagctgatttttcacttcttccatggagccccctctgacttcacaagattgcgttgtcctgctcatatgtcctgctcagagcatgctgcatgtctcacttcatagcacctgttatttttttagtatggattttggttttgtttgcctgcaccccattccttgaggacagggaaagtttctgtccccctgttgtgttgaggacactattaagttccctgccattacctggtgcttaacacatagtagatgctctattagtgttggaatggatgagctctagtgagtaagcgcctaagacaacacagaccctaaggtcttctgaacccaaccaagtgccctgtttttgctgctataccaggctgtccttcttcccactgccatcctcctggttctgttctctcagcccaagcaccgtgtgtagcctaatcatgtatatctattctcagagtttgtaggacaggatacgagttaacgacttaacgcccttcaagattttgtgtaacagggaaaggagagaacacctggaatggttcccgcttggagaaacgtttttcatccttcttagtttcagctccaatcagatggattcagcctgtgacagtcaacatttacagcccttgggagcagctccatactcacctcctttgcctgcttaccgcaagctcactgcctcctcctcagattgtgccagacataccaggtttgctgccggtgagaagcaacaatccaaatcctacctttctgttcaggtcccagtaaaatcttcactggcagcattttagaattgccccttccctcttctctcaaagggctgctgttcagctggcaggaccagcttctctgatgcagtgcagttcagtgcaaaccaacggaaagcccacagtttttttgtttttttggttttttttctaggtgtaaacaaacctggttgattgtgaggcaaagaaaaataacaaaaacaagtgagaatacattagattaatttactctttcttttttcccgctcattcataatgtgattgaaatcagaagtaaagaaagtaaaatcagagtgagttccctctgctcagtcacccaccctgatcacaagacttttggaatactgggaggcactgcatttaagtaagtatcagctgtatggagagtatgaggttaagatgatgctggatttaatttaaagtctcctcactggtttgcgtgaaggaagatttttatcaagcagagtgaaagagacagaatcttgaagcttccgcagaggggaagaagacagggccgtgcactgcgagtcagtatgcctccagtccctctggtgggcaccggtccacatcacaggaagcccagctgtggtggctgtcagtgtcagaggggctggcagacagtagtagaggcccagagaagttactttgtacgtatcagtctagaaggaagagattatgaagattagtcaagcctccctttctcatttatcctttttttttttttttgagatgaagtcttgctttgtctcccagcctggagtgcagtggcacgatctctgttcccgcaacctatgcctcctgagctcaagcgattctcctgcctcagcctcattagtagctgggattataagcacccaccaccacgcccagctaatttttgtatttttagcagagatggcgttttgtcatgttggagagactggtcttgaactcctgacctcaggtgatcctcccacctcagcctcccaaactgctgggattacaagcatgagccaccatgcccggccactttctcattatactgatagcaaaattgagacccacatcagcgatctaacctgtcatttcaatgatgtcctgacataagagtaagcggccagcctgccctttaagtaaagcctactcatatgggagtatatgtgctttattaattagcagaagggtatccaggccttcttggaagctgtcttctctctgtatgggtaaatgggcaacttttctagccttccgtctaattgggtttaatatcagtgaaagaatctttaagaaggtgtgcccttaggtgctagggccagtattgtaggtggcaaccaggtacattagtctctgcccttgtggaactcatattcccatgtttgtaaaggagtctgggcctcttatatgtggtaaatgaagtgactgtctatgtagttgcctttgcaggacacaagtccttgccttagtttccctccagccaggactgccccaccgagactattcatagctccaacttaaggtgctttaataaagggcagaaatcatgacaagaaaggacgcttttcttcaggcaatgaattcagcctgattttagaagctgttttggagaggtctctgtaagcatattacattttattccctgcagtacaatatttatacatggataatttgtattgacagttgatagttacatagaggtatatctcactggttctcaactctagctgcattttagaatcaccaggagaattttctttttcgattctgatgcctaaatctctgccctagaacaataaaatcagaatctctaaaagtgaggcccagacatgggcagttttgttattatttatcattgtttaataataaatattacgtaaaagtcagacttttaatggctcatttgtagggaggagaacttgccatttcccaaagtatcaccagcataaaaggtgaatttgtattttgttctctaagtttctggcatattctgaaactgcaatttaagtgactctcctacctctgtcttactcccaatttatatttagctggattcatattagagggcaagaaggggcaaatagaaaaaaagtgatctttatcaaacccatttccttgtgttagaaaaacgatttgttggaaaaagccatcgaggagatttgagattcagcacaaaaaagaattcgatatcacctaatacaagctgagaagggctacctcagggggtccttgtgcacctcactaaggaaggtctttggcagaggcagagaccatgacaaaggttttttttttctttattggacaagagccagaaaaaaatggccccaagattatgctcagccccgggaacctacagaaaccatggagcagtaggaatgggtagctagccgtgttagaagtaaatttgaggccgggtgcggaggctcatgcctgtaatcccagcactttgggatgccaaggcaggaggatcacgaggtcaggagatcaagaccaacctggccaacacggtgaaaccccgtctctactaaaatacaaaaattagctggacgttgtggtgtgtgcctgtagtcccagctactcaggaggctgaggcaggagaattgcttgaacccgggaggtggaggttgcagtgagctgagatcatgccactgtactgcagcctggcgacagagcaaaactccgtctcaaaaacaaaacaaaaacaaaaacaaaagaagtaaatttgattaatgaaatctacctttatgtttttacccaaagtgttatcaggaaagataacgttaaaaaatacacgtgattttcttaatgtcttagtttgagcaagtaattctaactgctctagcaaacacatttttaaatctcagggatttaacacaatgcaagtttatttttgtctgacaaaaatcccccatgtttagccagtgcattccacgtgggattcagagactctgtcttattccatccagtggttccaccagtctctaaagcctagaggtcctatgccagattatgtgaattaaaattagaagagagtattaaggatcttctgggacagtggtgggatggttacagtttccagactcataaatgtaaaacagtgttccttctacaaatattctattggctggggctcattcactttcacacagtaacaaagaatgcttggaaatgtggccacactgtatacccccaaaagaagaggaattagtttggttcaaatttatctagtctctgtcatgctttcatcatcatcatcatcatcgtcatcatcatcgtcatcagctactgtggatcagcatactttcctgcaattttccaaatcgaattttgtggttatatattaacagagtatataaaattcattttccctacataatatgtattttattcctatatgtgttttctgcagtggtctgatttatatcaatgactaacatatagattcgatttgcaccaactagataatttaatctcttactcctccttgttgacagttggtggggtgcgccttatttttgaagaagaaaatgcttatccagttattcagccaatctcagttgacagcctatcacatgtcaggcactggaaattccgtggtgagcaaaaacagacaagtggcctgctttcaggaagtttctattctgttaagggagatggacagagtgttttaaaagaaaggagtattgtcctaagataattaaaacacaggaacctgacttagacagagattaagacaggcattcctaaggaagtgatacttcactgagttatgaggagtgagtaggagtttagacatctccagacagtgcagcacgctgatttgaggaactgaaagaaggccagtgtggtcagagctcagagactgagggagaagcatgatgcaggatgagttttgagagataaaccatgaaggacttaggccttgctaagcattttggcctttttcccaaaagtacaggaaagcctagccattttattattttataccacccatccattacaggcttttcctgaaaggtctttggcaataggggagctatggaagcaacatcatgagtaagtgactgggggaaccttttccctaagtgttgtggttgctagccacacaccatgtattcaacatctctccaactctcctcatcgtttcccagagctgaaagtaagatgagcacgaagaaaccatgtttagttaagaacatgacccgaagagtgaaaggtatttcctgttccaaataggagcccagtctgcattttctactacatgatttagtagaaagacacattgcatttgaaccatatttcttctgctagccaattccatcttatctacaactttttgataattattttgagaaatagatctagatcacagccttccaattcctaggccaggatactttccatttttctacacagaccccattgcagtcctcccttcttcacaatcttcaaaatatccttctgattgaaccagatatcttattcttcatcccgtttcctgccccctaaaatgacctatctttcccttctaaaacttccactaactttaaaattggagctcaaggcttccatctccacagactctgccctgacaacaaattggttggttttattttcttcccaatgaatagaatagccgttagagggaattgtcttcagctcttttcccccctcctcctcctcctcctcctcctcttcctcttcctccttcttgcaaatacaaacacagcagggctctatgcagctggttactctaggctctggtaacctaacatagcaggggaggacagaagtcaatagggtgagaagtctgtttttgtcacggatttgctagaagctattaaagtgttcttcctaagtctgttacttcataggttgagggaagtaatgcatcccacacaagaggactgggatatgtttaaagtagtaggaaggcatttgccactattctagtccatcctgcccatgctgcctaatgtttgttcctacagatcaaaatctcataatcttctagacttctagatacagaagagttggagagatcaaagccttgcctctgacccagattattcgatctcatctggcatatcctacactctagccatcctgacctgccgtgtgttcccctaaagctcccatccttttctgactttgcttttcctcattctgtcccctgcattgaaatgcctttcccacatctctatgtctaaatcttacatggccaattccaacgtaatctaatctctgaagattccctttgctccccagttagaagtagtcactccctgctctgctcactttttgacatatattaatttatatagctatgcatttatatgtgtatgtattatattccttacaagagaagcttttgagagaagggcctataacttttctttctatttgtgtttcccaaagctccttctggtgggaaaaatgctttgaggttgaattaagctcacattgaactctatgatgaaaccatttgcttatgaacttggacaagtttctttacaactctgaaccttctgaattttccaccaggagaatgggaatgaataagtaagaaaacttataagacagctcctggtgtagggcctgactcatgtcaggttcccaggaaggccactttatatccttcatacatttgtatgtctgtgttgacattgaatgtttgcatgacatataaaatataagtagtaatgacaaatttaatagtgaatacttacagtagtgcatttcatcctatgaaacgggcaatctggcccattctatataataggggagaaaatagaaacttagatttactaattagttcaagttggcacagatataaggggatctcagacttcaactcaggcagtcaggcagggcctatactcttgatattcctttcttgatactttctcagtatcaaattaccacataatagacaatgccactcataaatctagcccactctaggaacataataaggcctgttgagacattcagagatgtctccctgatcttcaaagatgaatttttattcttccctaagctgctgtctcttcagtctcaacatcctaagttcattttatctttcctcacaggtcaggttttcagctctaactgtgttcatcctggtggctctgccctggacatactgcagttcttttatgtacctcttatcgtatggggtacaatggctttcggtactgctcagtgaggggagagaaatagatagtgtagtttctgatgtcaaggaacactttagagagaccttaattaatgtagccatatgttgacttcctggagcactcataacaacatgggaagcccacgctgggaagatgctgagtaggaataagagaacaatgctaagagaagggaaatttcaccgtctgtgaagcgtctgtttagattttatgtttaaactttatgaactctgtcacttgctggtgaattttcttgctcagtatcttaaaatacagctgcagtgtgggttccaccctcttcacttaaaagggtgattaactgtttgtgatgaataattatttaattgccagttcagctacatgtgtgtagttgttttgcttctttcctcttcagtgtgagccaaatcttctcaataataaaaataatccagaattagtcaactgccttttatcatgttctcattcagcctgctggagcaagaacattccaattctacatcacctttagcttaaaaagtaaataaatagaagctctcactcagccagttgatagttttactctcacagcctctcctgtaactaataaagtcttgacttcatcttgaaccttttactctatctttggataaaaatttaatcagaaagaattattgctcttttaatacctgtttaacctttacattcgcgatgggtacaaaaccacttaagatttaaagctctcttgttatggacttgtatgctgacctacttttcctcagagatattttttgcaagaattgttgaagcttgacatggggatcactgcaaatgtctcagctttgccattcactgctttccattcctatgtcctccttgccctgttaattattttaacagagacttgctattttaaggaagctctttatcgttactaaatctttttttattgttaaactcctttttctttccagcatagaagtatgtcatgttttctgtcttcagaatgtgcaagtgcttaccttctcataaagtgtgcctgttaccttaattttatagtctttatcacaaaaaggtacgtaagtggggttcagaatagtgtcttgcacttaaggtttaacttaggttttagtttcttcatgcaagcaacttgcatatgtagagaggcagcatgctatatagtgcaatgttcttcttggtttttaattataaaagtgatttcttttctagtaaaaaatcaagttatgcacaaatatatagagtgaaagtgttttcaactcctctctctagaggaagccactagcagttggcatatttccttccagaatttgttgtgtattataaacctatatacgtgcgtatgtatacacacacagtagtacacacattgttctgcaccttgcttctttgttttccctaagaatgtatgcttgatatatttctaaaaataataatgtatatgggtctaagtatttttagtgatatagaattctataggatacatgaaccgtaactcccttagtcatttctctactgattagtatttaacattgtttcttttttttttttttttgccattaaaagcaaatatctttgtgcaattatcttcatgaaatgttgaagctttctttttttttttttttttgagatggagtctcgctctgtcgctcaggctggggtgcagtggcgcgatctcagctcactgcaagctccacctcccaggttcacgccattctcctgcctcagcctcccgagtagctgggactacaggtgtctgccaccacgcccggctaattttttgtatttttagtagaggtggggtttcatcgtgttagccaggatggtctccatctcctgacctcgtgatccgcccaccttggcctcccaaagtgctgggattacaggcgtgagccaccacacccggccaaaactttctgcaggatatatttttaaaatgggttttccaagtcaaaagtgtatgtatgtttccattttgatacctactgaaatagctctccaaaagtgaaaccaaatttattcttttcaatggtatgtaagaatgcctgattccccatactctcattaaccttgagcatgttccatcttttaaatttttgccaagaagattgtctaaaaatggaatctcattgtttgtatttgcatttttatgatttttggtggatttagcatcattttctatgcttagtaactgcttgcctattcatatcctttatccaggttttttgttttgttttgtttctttttggtttggttattcatgttttccttattagtgtattggtagttatatgagttttaaccctttgtcagtggctaatttggaactcctccacagatccctgggggtttcttagagcagctgactggctggcagagctctccatggccttacctccccttcctcttctccgaactcacacacacactgatcgaacagaatagaccaattattacctgcatttcatgttgggctttgtgcttgagattaaacaaaggttcccggggctaaacgtctaaaaaacattgccatggaatgaagagccctagattttgtcataaagtcatctgtcctaggctctacaatgtagcattttcaaattggaagagccttcagagattattttattaccaacacccatgtaatataaattatacagttaatatatgttgatatacatgcaatactgaagaaatctctaatgcattctatattctgtaacagtaatatgtattttattatttataatagcttcaacatatattgaaaactagaggcacatacgtctataaacagtgctcagggcgtattattttggtgtttatttatttattaggtatttattattttatttagtccatagatgatgcatttatctgagaactcctctgactcaaggcccagcaagaatctgctgcccacagttatgagtagctgaactgggccaagcttttaattctataaatagcgaatctatgtagacactcagctagttagtaccagagtggtacccagatccgtgatgtcttgactcttagtacagtgcacttttccccactttgccattctttgctggtgaccttgggtagatcttcttaactgctcagagcttcagttcttctctcttttaatgagagtaataatgcatgcattgatatcctgactaggatggagttggataaagactgttcttaccttttgtgaatagcatagtatcttacagaattgtgaggaattatccaagtagctattgcccctcatcatggtgttaaaagtaggattgctagtttgaacggtaactgcaggaattcaatgtgttttgattttagcatattcccgtatcatgtagaccagtgttaatatttttagtattttatcttagttcttttttttctgaaagtcttgatttttcccagttttattttttagatttgaaagaaaaagaaaaaggatgtaactatgactcttatgttttcaatctctctgaaatataacaaagtaataactctaaatggtcaacgtagtagtctgagggcattctcttgaatgcttagttctgtgttacttaggatccattcatagagcatattatttatattatgtgaggtttaactcttcattataactcatggaatcaatgatagaaatgcaggttatttatactgtcagtcccaagtatgtaatattaaaccaccaaaattcagtttaagaaacttgcaataagctaccacttggctcaaagcaaggaattaggatggtcaggttgaactttctttatatataaagaactgagtctctgaaaaaggaaaaagacttttaaatgacatccagtgaatgtctttttaaaaaataatagctttaatggctgggcacggtggctcacgcctgtaatcccaggacttcgtgaggccgaggtgggtggatcacctgaggtcaggtgttctagaccagcctggccaacatggtgaaaccccgtcactactaaaaatacaaaaattagctgggtgtggtggcaggtgcctgtaatctcatctactcaggggggctgaggcaggagaatcacttgaacccgggaggtggaagttgcagtgagctgagattgcaccaccgcactccagacctggggaacaagagcgagactttgtctcaaaagaaaaaaaaaagctttaaaatatatattgcatatggataaatttacatatcataaaagtatacttggctaagttctcaaaagtaaacacacttttataatccccaccctaaaaaagaaggaacattagcagttaattacttcagaagttttcttcatgacaacctggttgtatgcctttcttttttcctaaaagtgatcactatcctgacttataataatactatatattagattaaaatacttttgttgtatatgctttttttttttttttttgagacagggtctcactctattattcaggctagagtgtagtggcacaatctcagctcattccaacctccgcctccagggttcaagcaaatcttgtgcttcaaccacacaagtagctgggattacaggcttgcaccaccacagagagcaatttttaaaattttgactagagatggagttttgccctgttggccaggctggtcttgaactcctggcctcatgtgatccacctgccttggctaggattacaggcattagccactatgctcaacttgttgtatatgcttttatgcagttttcttttgttctgttatgttcatgaggttcttctaacattttaaatatggccatagtttatcttcttctagaagctttaataattttaggtgttacttttaggtgttttattgttttgagttaatttttatataaggtgatcaaattttgagtaaaggtatttttccccccatagggatgtccaattgttccagcaccatttgttgtaatttaattaatcttatgcagattgtaaatcagatgcatgttacagaccatataaaccatagatgggtctatttctggattctctattctgttccatcagtctgttaatatatgtctgtccattctccagttcacacactgtgtgggcaattatcattttgcagcaaatctagaaatcaggtagtacggtttgttctgctctttcaaaattgtttggctgttctagttagttcacctttgcatataaattttaaaattcgtttgtcagtttttacaaaaatccttctggggttttgattagaattgttgaatgtaggtgtaaatctagggagaaattacatcttaacaataattatgtcttccagttcatgaatatacatgtctgtatttatttagattgttaatttctttaattattgttttatatttttcagcgtaggaatattgtacatatttcctaaggtttataatgaagtattccatgttttggggtgcttttacaaatggtgatttaaaaatatgcaatttcaagtattcattgctactgtatagataagattgatctttgtatattgcccatgtgtgctgtaactttgctaaaattatttattctagtagctttttttttattcggggggaggtttaatgaaaaaaattatgttttcaatgtagtgcatctttatatatatatatatatatatatatatatatatatatataaaatggaatacaattcagccataaaaaagaatggaatcatgtcttttgcagcaacatggatagaactaggggtcgttatcctaaatgaaataaattagaaatagaaagccaaatactgcatgtggtcacttataaattggagctaaacaatggaaacatatggacatacagaatgaaataaaggtgggaggatgatgagggttgaaaaaatacctattggatacagtccagtactcactcttcggtttatgggtgcactaaaagcccaaatttcaccactacacaatatatgcatgtgagaaatctgcacttgtacccccaaatatataaacattttaaaagatttaaattacattttctgtgagtagaaacagtttcatttcattatttgaagtcatgccttttctgtttcttgcccaattgccctggctagggactttcagttagttgttgaatggaagtggtgaacatgaacatttttgcgctgttcccaatattaagagaaaacattgagtcttttgccattaagtgtaatgttagaagtaaggttattgaacatgctctttattaagctgagcaagtttccttcttttcattagttttctgggaggtttaatcatgaaagtgtgttgaattttgtcaattgcctttagacataagttggtatgataataagacttttgttctacagctggttcatatggtaggtaacactggttaatttttaaatgttgtatcagccttgcattcccaagataaaccccacttggttgtgttgtactactccttttgtgtgttattggatttaatttgccagtagtttgttgaggatttttgcatttgtgtcatgaggtatactaaactgtggttttcttttttggtaatatatttgactagatttgttatcagtgcagtgctggcctcataaaaggaattgatgagttccttcctctcttatattctggaagaatttgtatggaattggtattattatttaaatgtttggtacagtttgccagtgaagccatctggacctggaattttctttgttagaaggctttaatctacaaattttattcttgttaattgacagtttgcatctcttagaaaattggtccatttaatctcattttaatgtctgtaagtactgtggtattgtttccctctcattcatgatatttataattaatgtcttatttcttttttttcttcttggtaagtctgaatagagtttgttgtgatttttttttcacaaaagaattagcttttggtttcactgagattttctctattggttttctgctctcaattatattgacttctgctctttattattttactacttttgcttggcttgggttaagtttgctcttctctttctatttccctaaagttaaagattcagttgttgagttgagatcttttgtttttttctaatatgaacatccaatttcaaagtactgcttaagttgcattctacaaattttgatatattgtgttttcattttcattcaagatattttctaatgtatctagtaatttttttgacgcatggtttatttagaaatgtgttatttaatttttaaatatttggatattttttctaggcctttctgttattgtcttttagtttatttccttgtgatctgtgaacatgttttgtgtaacttaaattcatctaaatttgttgaggtttgttttatgtgctagaaatatggtatatcttggttaatgctctgcacatttcaaaaatatgtgtattctgctattattaggtgaagtgttctatagttgtcaattaggttaatttggctaacagtattgtacaagttctctctattcttactgattttctgtcttctttttcagtaaattattagagggatactgaaactttgagcataattgtaggtttgtctatttctcctttcacttgtatggtttttgttttaatgtattttgaagccatactgttaagtgcacatacattaggattgttatatcatcttaaccccatattcaattccttccttattacataatatgattctttaactctgaaaatattcttgttctgaattttagataatattaatttaactttcttttattagtttacaaagtatttttccagccttttgtttttagtctatcaatgtctatataattgaagtagcttgcttttagacagatacgtctttcattttatccaatttgaccatctgtattttaatttgtgtgtttacactatttacatttgatgtgattattgatatagttggattgaaattcacaatcagcttttgttacttttccatctgctatatttttctcttcctgcctttctttgaattaaatgtttttcacaattccatctcatttacactatttgtttattatttatactcttgattttaatgttagtattaccctttgatttgcaatatacacctttaattaactagagtttaccttcaaatactattatatcactgtctgagtagtttcaggaccttacaattgttactctcaatttacttaccatcttttcgtgttcttgttgtcattcattttacttatatatattctataaatacacagcacattgatactaattttgctttagaatgttatcttttagagcaattaaaaataatgagaaagctaattcatttctgctttttcagcactttatttttttgtataaatccacctttgtgtctgataccgtattccttctgcttgaagagctcccttcaatatttcttcaattctgtcctgaaacagtttttaattctccttcatttgaaaactatttttaccaagtagagaattggttggcctttttccttttatcacttttaagatgtcacttcattgttttctcacttgcatagtttctgacaagaagtctgctgtcaatgtctttcttgctttcaatgcagtatgaatttttgttttctgactgatctcaaacttttatcctttgtctcttttctaacagcttgaagctatgtttattagggtttttagttttagttttctggttttagttttagtgtttgtatatatcctgtttgtcagtcccttaatttcttggctcttctatcttcagttggttgtttattctttagaagatagccaatatctcttcaatttttattttgttttggtggtttgttgccttcattcttttatattttctctttggagttctaactacatacaggcttaatatttttctataattctttgatgctctgttctcttacttttcactctttctataaatttctattgacctatctttaagtttactaattctttccccagttgagtctgcttatgagcctattcaaagtattcttcttctctgttactatgattttcatttctagcattttcattttattttcataagacagaatgagaaatattctcatatgacagtctctatatctttgagatcatgcaaattttcttcctttttcactagagccttaaacattaatcatagttattttaaattccctatctgatcaatccaacatctgtcttatttctgagtctatttctgtttgttgctttgtctcttgacagtgtgttgttatttttacttcttggtatgccaggtaagtttttgttaaaagccagacatattatataggataataaagataggctaatatatttcacacctgtaaatgaacatgccttttcttttgttaggcctttagtgtggggtgtttgtgtcaatcttgtcagaagttggccttgatttgaattttttgttgttgttgttgctgtgattccccttagtgcaccacagatttcaaatatctctaatgttactttgtctttgtggtgaggagtggttttccaaaaggactttctcagtatttgctccaccctcagatttagatcttctttttgtgcctgtaccacagagacaacttctttttttgtctgtctcccaaattttgcactgttggtgggaatgtaaattagttttgtggttgaacttgattgctgttactttttacttgatgcttttgaggcagagggacattttctgctgttaccttcagttttagagaggcagtgtggctgtgagtctccgaagcaggctgtttcagtgatcctgcctctccccgggactaaaatcacttcttattcttttcccctacctatgatgagttatcactggtgccctaagagccacaagactcactgttattttcctggggctgaagacctttattccaaagggacaatccgggagaagtatatgggcagggcattaagcctttcccagagctgctgctgttccgctcctgaagcctgcaccacaacagatactttatcagtactcttttttgctttttattttattctattttactttaagttccaggatacatgtgcagaacatgcaggtttgttacacaggtatatgtgtgccctggcggtttgctgcacctatcaacccgttgtctagttttaagccccacatacattagctatttgtcctgatggtctccctccctttgcccccatcccccaacaggctcagatgtatgttgtgcttctccctgtgtccatgtgatctcattgttaaaactcccacttataagtgagaacatgcagtgtttggttttctgttcctgtgttagtttgctgaggatgatggcttccagcttcatccatgtcactgcaaaggacatgacctcattcctttttatggctgcatagtattccatggtgtacatgtaccacattttctttatccagtctattattgatggacatttgggttggttccatgtctttgctattgaaaaatagtgctgcagtaaacatacaggtacatgtgtctttatagtagaatgatttatattcctttggatatatatccagtaatgagattattggatcaaatggtatttctggttctagatccttgaggaatcaccacactgtcttccacaatggctgaactaatttacattcccaacaacagtgtaaaaatgttcctatttctccacagcctggccagcatatattgtttcttgactttttaataatcgccattctgactgtcatgagatggcatctcattgtgattttgatttgcatttatctaatgatcagtgtcattgagctttttttcatgtttgttgactacataaatgtcttcttttgagaagtgtctgttcatatcctttgcccactttttgataaagttgtttggttttttcttataaatttgttaagttcctctagattctggatgttagacgtttgtcagatggatagattgcaaaaattttctccctttctgtaggttgcctgttcactctgatgatagtttattttgctgtggagaagctctttagtttaattagatctcatttgtcaatgttagcttttgttgcagttgcttttggcattttcctcatgaaatctttgcccatgcctatgtcctgaatggtattgtgtaagttttcttctagggcttttatggttttgggttttatatttaagtatttaatccatcttgaattaatttttgtgtaagatgtgaggaaggggtccagtttcagttttctgcatatggctagccagttttcccagcaccatttattaaataaggaaccctttccccattgcttgtttttgtcaggtttgttgaagatcagatggttgtagatgtgtggtgtaaattctgaggtctctgctctgttccattggtctatcagtactcttattctgcctcaggtctttcgtgtgagcatctgctgagatctgaggaaaagagtataaattaaattccgcttctatctgcactgcccaaagattctgtgttttaatactaccctacaactagtctcttgcaactggttaataactgtagttttttttttctgttaccaatagtatggcattcagaggccttaaggcagtaaggcatctgccttagtgttctgcaagtgttcacatcctgtctctcctcagaggcatctatctttccttagatttcaggttacagtagtttccccaactcccacttatcagtagttttgccttctgcagtctcagttacccatggtcaaccacagtccaaaaataggtgactacattacaatagtcatgtagagactattgtctctctacaaagagagagaaagagagagagagagagagggagaccacatacatgtaacttttattacaggatattgctataattgttctacgttattattagttattgctattaatcttttttgtgtctaatttataaattatactttatcataagtatgtatgtataggaaaaaacagtatgtataggggttaggttgtatccacagtttcagtatctactggtggtcttggaaggtatcttccacggataaaaggacactacggtagttggttgttctgcagcctcagttctctatggattcaaaaccagttttagatttgcacactgtctggcttgttttaaattattgtatgggtgggagtggtgctcctttcattttctccatcttgtacagaagccataattattttcaattctatataatttttgattgaatgaaaaataccataatttttttgttctattagtagacatttgaattatttatggttaggttcatgacaacaaggaatgcttctatgagcacatgtcttttggtgtacatatataaaatatttctcaagggtatagatgtaggaatggaattcattaattgtaggagaatacatacgacacacacacatgtatgagttatagggtatatatatatgtgcatataatgatttcagtaaattattgatataaaaattttcaatgaagtataactcatagaaaagtgtacctatcttaagtggccataggatatcatttagactgtaacataagagaactatagatattcacatccccaagcattaactgagaacctgttatacagtgggcatttaggaaatgaaaagtgaaggaaaagttactgaccttaggggtcttgaaagcgagaaaatgattaagtgctgtatacacacacacacacacacacacacacacacacacgcacacacgctcaaagagtagggagagaaaaattatgattggggaaatcaataaaagcatattggagaagacatcatttgatattaacctttaagtatagcagtgtagatagtgcgtaagaattggattatagaacttagtcattatgttaggaaagaaacctatggccttgttttatagcaattactggggatatccaggtcttttgcactggaagaaataatcttagaaccatttattaaggacagacccttacagatcatggggtccaaaactgtcttggggtcgaaaactttctcatcttatagatgaggaaactgaggcttagggaagggaagggacttgcctggggtaaatttttgctagtaaatgtacttaatgagatctctcagttacactgaaacgtttgagtattggaacattgtgcttttgttgttttctttttctttaaatccttaaaaaagttgtggatacatagtagatgtatatatttatggggtacataagatgttttgatatagacatgcaatgcataataatcacatcacggagaatggggtatccatctcccttcaagcatttgtcctttgtgttgcagatcattagaatattgtcttcatcattcttttattccccaccaaagtttttgtaaggtagtaagaggatctttgtggaaagaattcttattcccttacgttcctcctggtctgttcctaggtcaaggttgagtacgtttatagatattctataaatatattttattttcaacattaagtgtagttcatatagttgatgatctaagcaataagaaataaagtaaaatctggataattttggttactctgcttttcctctgtgtgtttcaactacaaaattcctcactacaatgctccccaattccttttattggtgcttgcagtgccagtgggcaaactgaattcttcatgcaaccaaagaattccaaaaacgtatttcttgcagctagcataaatctccagttccacaatggtagcagtggtggattttacccaatgttttaatgatgaatgtaatcagaacataaaaagatctaaatgcatactttgaaggaatttgcaaaaatgactagaagaactgaaaaaagcacaattcagtttgtttctttagcatctgtgtttatctttccccttctcttgtgcatattgaggatgttttaaagattatatttttaaaaccaaataaatagtttccaaaatgttcactgatggggtaaattagcgttctctttgtagatgtaattattaaataaattcaaaggactaaccctagaatgacatttttccctcattcctgggtaatttttgagatttcccctcatgcccaggagctaattatactctctcactctccctctctctctctctctctctcgctgcagctttctgtatgtgtgtgtgtgtattatatctaagaaattttactccaaacatctaacattctgggtacgggtttgatttggggaaaaaattacacttttttttttatcctttagcttttctccttaaaaagtatcagtgagggcagggaaagggaaggagaatggacccaaactaataaaaggattgatcagtgattatgaacaaaatatagcttctgtatttccactcactcagtatgaagtttgctattattttccccaattcctggagccagttattgcagcaaatttagcatttggagcttatagactcatgctagacagacacatatagaatttacgaatcgaattagaaaaatggtctttgaataatataaattgtactccatgtatatttttatatatgaatgaacctactggactccagtgagattagcaaataccttagctatttcattgcaataaaaaccatttttcagtcactcatgtccctctgggttcttcagtgatattatttgatgtatgctttattctgtgccatttattgtactgagtattttgcatgaatgatcttatgtaatcatcagtaatctgttaaatcagtatcattattattcttgtttcattgatattgaaatataaaagtaggttatcataaattaaaaggctacgggtagtgataaaattttattccaggtagtatctccagaatatgaattcttaatcactactcgtgtttattcattccacatgtcactgaatgcctactatgtctagcaaagttctagattctcttgtagttgcattactcagttattggctagataaccctaaacactgcagaaagctgcactctgcccccttgggattgcctggctccataagattattaccgttgctgagtttggggacccacttgagcaaatctagcatacttaaaaggaagtttttattctggagaagttttgttaacaaaacatctattggctgggcagagtggctcataactgtaatctcagcacttcgggatgccaaagtgggcaaatcacctgaggtcagaagtttgagaccagcctggccaacatggtgaaaccctgtctctactaaaaacacaaaaaaattaggtaggtatggtggtgcacgcctgtaatcccagctattcaggaggctgaggcaggacaatcacttgaaccggggagacagaggttgcagtgagccgagattgtgccactgccctccagcctgggcaacaaagtgagactctatctcaaaacacaaacatacacacatacatacagacccacacacacatacagacacacacacacacgtctatttagcatctgtcccaggcagtgcttctcaatagcatgttaatagatgctaaaggacctttagttaggaggtcaactggtctacctctgtcacttagtagacaagaaggttgccctaaaatatacactaagacagtatgcattacaaaaaagccacaataaggacatagcttaggagaaatgttatgatctctcttcaccagtctccttatatgacactggttcaattcagaagtagaggtgaagatagttaatatcctaggaataaatgttaaatctcccttcccctttcctcacagtattatagtcaattctcataaggaaatggccctaagttacaacattaagcttttctattcacttctaataactgaaattccgcccaactgcctcctcacttgaattccatgtactttttttccaaataaattaaatgactttctctaagtcaaatgctattaaaattcttgttgttcctcaaactctgctttcttgtagtatcaggtttattgtgacttgaatgagacttatttgtaaatggatgtattttccattccatcttgctcttgcatacacacacatacactgaaattcagacttttctgctagctcttagaaaacaaaagcaatgtgtgattcatgtgtcacccactgtgggaagttggatgttgcattgcatttgtctctcagtcttaaaagtcaatatggcaaagtcattagcggcagagcccagaagatatccctgcccatgagctgtggagatctggacaagttactttacccaactccaagactcagtgaatgctcttatccgtaaaatggggacaatgataatatgtcttcctccctttgggtatttgatgattaaatgagaaaacacgtcacacagtcaattcagtgcttcgcgcacaataaaagcttaataaatactagttatgattatgtttagccaacatgtgttggcatctgacactaaataaatacttgtccaatggaaatgaccagaatttagtgcccctaacacttcactgtagtatttgccatatggataagcaatctttattatgctatttggatttagttccaaagctaaccccacctccttatattgaagccagctcctaggccacctggataacttttctggcatttcaatgaacacaccaatacaatacaagcataattagactttctggattttagatctattctcaagtatatattgtatagagaaccaagatgttcaaggactgtagagccagttataggtttggttttaaagcacttcatcttagactcatttcctttctggctgatgttagttaaaataatataagcctgggcttaagattgtatctctgagtgagacaaaataatagatgattctatctccctttagaaaaaaaagaaaaaaaaaaagcagcagcagcagtaattgactcttacgcttaggcaagaactccacaatggatttgttggggaaaaaaaaaatgttttcctgcttgtatgtgttggtttagattttctgttgtatgtgtgttgtgaaagaagactttggataattattgcgattttccaagcagctggtcttccaatggcattgttacagggtcagtctattttcctttaatctgaccataatgtcatagaacactggctgtttctttggcaactgttcagggaagactagctgttttctctacctcaagccaatggtggactgcaggcaggttctcctgcaagccacagggaagcagttttcattactggggtctttgtatcaacaaatcacttatttcactgtgattctgttgagacaggatccgaaagtaaatttcataagaaaaaaatgattatacatcaagctcaggtgactttaaaatttttcctttacattgagtaaagtttctggccacttttgaccttttttttcaaatgacattattgatatgaaatcagaaactataactgataaactacaaactgctgtatagacacttttctacacaatggtcattgcttttattctttatctaagcctgaattgtaaggcttccttctctttttttttttttttttttttgagatggagtctcgctctgtcgcccaggctggagtgcggtggcacgatcttggctcactccaagctccacctcccgggttcacaccattctcatgcctcagcctcccgagtagctgggactacaggcgcccaccaccatgcccggctaattttttatatttttagtagagacggagtttcaccatgttagccaggatggtcttgatctcctgacctggtgatccacctgccttggcctcccaaagtgctgggattacaggcgtgagccaccatgcccggcctgaatgattccttctcatcttctgggaggtttttctgacttgctttctcaattccactctcttaggcagagcttatacctcccttcatgtatgttacatgtacatgtattgagtcagtgcatcctcctaatgaaacttttcctgagatctctcttatttactttcttccttttctgaaattctctgctatttagattcagtgccaaagaaattgacatttttatttacttgctgaggaataaacagaactcgaaaggatttgggaacccaagaccaagttttatgaaataactaatcttgtcttcctaaatactataaaaatcttatataatccctaatacttagcatagtgctaagcaccgaataggaatacaagaaatattgcaatgatctgaattgcttacaaaatattgacaacaacttcttcattggtaaagaaaagctgcttttgacctttttttcttcctcaagagtaagtagtgagaagcataaagtacccaagagtttctttgcctttttgattgttgcatggaaacaagtatttgcaaataattaagatgggaaaatttggctccttgaaaaggcaggactgctttcagatatatttgaaatgaacttatacagaagccaacatggttatcagagcaattgggtctatttcctatcatctcttcatgatatcttgtaaaaatgccctgtgttgagagcactggtgatcatagcagtggggttggagtagaatctggtgcgtttcttcctctacagatctcctaatagcacttgccctgttttcacagagccttatcaaagtttgatgtagactccagtgtgtagtagtgggcagtgacctaccagatgacctctttgaacaagagctagtttgagccagtgtatagctctgaatcgatggaagatccattttcaaatttcaaaagggctgttaaaacacttagttctgtattatagagatacacaaatggatataacaaactggatgtctcttctgcagctgtttcaattcgtatgccatgttttctatccttcttgctcctggcaattttctttcctgaagcatatcacaccttcttacatttgacaagcattttcacagctactgccactccctgctgccaaacaaaacccagccctgtttgaattcttgagggctgagggatggagaggagacctgtttgactttgaaatggttttaacgtcactttgtatacagaacaaaaatggaaaaccagatcctgtgtttgtctaaaaactaaaatttcaaaacctaacctgaggtggagaaacagatactacagggcaaggaaatgtctgggctcaccgcaaaggaatgcagcaagggaaccacctgcagacacctgtttaagagtttacgtttttgttcttccacacgattattatcttagtatctcaactggctatacatgcttttaggaaagttgcagggatcatattctaaggcgtatcaaatatgttcagagtgcaagcatgagcagaatctctcctctctgctagtgaggtcctgtaggtctacaagttactaacttcaggcttacagaatgttagaagtaacgggtgcatatcctgtaatcaatcccggtattgagcaaacaggcacaaatgacacccagcaagaaaaatgacttgctcaagacaccacagcaagttcatggttttctgaactgaattccaagtttcataacttctaattaatcctcctttttttcccccagtacagctaatatgctttttgtgaataataacatataataggtgtaatctgtcagaactatttaatagttgatagtatgtatcctcagtttattgaggttcaagctcttctgagtattataatactttctattggtattttctctcttgagctattccctaccttgaatctttcagactagagatttcagaagattacgtagtgtctgtgacttcaactacacatggatagtccacaggactctggactttcacggttccatgtcagttggacaggtgttactctaaggccctgcaaaaatataaagtagtttgagaatcactctcctgttaatcttcagtaaaattctgagctatttatatgtgagattgagaggcagcttggtaggatggaaagagtttagactttgtagttctactgccccaggtttgtatcccagctttatttcctaacagtgtagccttgggcaaattgcttaacctctccgaggctcagtttcttcaaataaaaaaatggaataagccttcccttgcagagttgttaatattatatgaacgttatatatgtgaagtgcccaactccttgcaaatacctaatatacaccagcttccttcccaggcttttgctggtcagatctggtttccacttaactttggctgttggaagataagataatttattatgaagataattgtctggtaattgtcatgagaattcagttgatgataattgaatgatttgtttacctttctgtctaaagagttgcaactcatgggggtcgtgtgtgtgtgtgtgtgtgtgtgtgtgtgtgtgtgtgtgtgtgttacttacaatgtttttgccatctcttcctgtatgacagtatttgattagtcaggtcttaaaatgctaaacactttatccttttcttttaatttcaattttagattttgggggtacatatgcaggttcgttacaagattgtattgtgtgatgctgaagtttgggcttctatcgatcccatcatccacactgtgaacataatacctgacaggaagtgtctcagccctttctccccctccttccttccttccttttggattcccaagtgtctgttattcccatctttacatccatgtgtacccaagttttcgctataaagaaaaaaaaaaccctgaatacctattgcatgcctcactgtagaggctacaggattcacaaaacaaggccccataccctgggcattgataaaaggaaggaaaaatgtagctttcaaaaaaatgaaaattgactttgttgaagggtattgtaatagaatcataaaactgagtgaggaaggaatgtattctaactacacaattagggaatactttgtggaggaggtgggttctggattttgaagacggagtatgatctttgacagatggtgttcggtgggaatgaggaaaaagaaaggtgagcttcagccagggattggaggtggaaaaaatgaacacatgggtggcgatgattcaggcagaggggcaggaatgtgaaggaactaagacataaaagtagaaagacagtttaggcctggtttatgagggggtctttgaatggcaaactcacctttggtggtccacgggaaggtttgttagaactgcaggagtgtgcccaaacctatatgtcaagccactaactgccagccatcagtttgaaaaccgaagcaattaagatcgctgtccatcttacctgaaagggaagctttgcactctaacttgaagtagcctagaaatttcagaaggttacatagtgtctgtgacttcagctacacatggataatccacaagactctggacttattttcactgttgtgtaatagggttagttttgtttttagcagattctcccaaggaagtgtggtaatcacatttctcaaaccattacattaactgctgttagcaataaattattgcttatgtgctaaaagtcaaaaaaagcttttcccctttggaacttctttactatactccctgatatgttttgctgtcctagaaactggtgtttgtgtgtgtgtgtttgtgtgtgtatgtgtgtgtgtgtgtgttcaattgagtcaagaacagaggagaggagactcaggctgaaaatgtcaagttattttgagtcaaatatttgtacatttactttggaagttatcactaaaaaacaaaaagtgtgtgtctctttgtgtctgtatctgtgtgaatctgtgtgcactcattggtataaaaggaggaatactcttctcaaaagtacacaccaatgttcttgtccaaaagcctactttcatatatgtgaatgtgaattcctacattctgtgtgtttgcttctcctcactatagcccatttctaacatatcccaacttaatttcctaaatctgtcctatctacataccacaaagtgcttaactgagaaattaacttctgtgttacagataaatggaagttagattaaaaggataatacattttcatttttagtgttcttaaataatcctttttattgtaaataaatataacgttaactccgataagtccagactacttcactgagttcaccaccgaaatgttttcacaaaatcagcatcgttataccttggcttttataagaagttagtatacgaaacttgtataggaaaatgtctctgtattatctatgaaactgttaataaatatgttttccatcatgtccatgtcatcgtttacatatacgagatgatttcctcttagaattcattctaaacttctttaacagaaattatctttttttgattcatattctcccttttgtcctggttaccagacagcacaagtgaccatcatgtttagatttctgatacagttctctcttccattcctctctgtagcctctgatttttttttcagacttcagttggaaaaatcctaatgaatgtaacttttagttacaggttgaattcttttgaatgtgtatatttaaaataagtaatgcacatagttaaaaagaaacatgtttttaaaacagtggttctcaattatagctaaatatttagaattatctggatggttttaaaactctgatacccaggcagcatcctagatcactcaaatcagaatatctgggtttggtcacggacatcagtattttttttttaaagctgcccaatgtcattccaatgttaagattcattgttttagatattctttattatgatgttcatcatttttacagaaacacatttccaaaaggataaatttcaaaatcacctgtaaacccataatttattataagtcactcttaacacctaaaaatagctaacctgctaacctttttcttttgctttttccttcttcttttaaactaaaattacaataatatatgtgcatatatagtgaatgtattcatttatatattagacacaatttacatatttatgcttatatatatatggcatacatgtacacgttacaatatgtgtatttgttttattccaaatctgttttattctcagagacattttcccatatcttcccagatatattttctgagaacctggtttttaatgcttgtataacattaatacttgtagttagaccattttttttactcattcttctattcttacatattaatgttgcagacaacatccttaaacaacttttgtgtgactaatccaatttttttccttgggaataaattatgatctattgatttatttctatgtgggctgaattttgtccataagaatgaaaatggtagccccctaagatgctgtttgctccctgatatctcatttttctctagaatacgaaggaatggctgttttctgctcttcctaaagattcaggatgtaataatatactgtcacaggtttcagaagcatgggaccttggcaccgaaagggtctctactagctaagttgtcttggaaatgagtgggtccacttcctcttctgatacaggaagaacagggaggtcattaaatgatgacggggctctttgaagtgaaatgaagcaacattggagggtgtagcatgtaaaaactctcttctcggatacaaaaaaaattgagctacttgggctaggagaagtgagcctggatttggaggcttaaggtttcaggaaggtctgagacaaacttaagaagaaatgcatcaagagggttggaagggacagacgattgatgagagcactgaaattccagtgtgatttgggtcacccgtgtgacatggcatatatttatgggatacctggaaaataagggagaaacaagacatctatctctgtcacactttggggaagtatacgattaagttccacactctgtggtggaaagaatgtcctggaggcccccagtctttctcactgtgatgccatgctcatttgataacctcataaacacatttctgttcttattgccttacccattctgatgcactgatcattttttaggccatgtgaacagggcagagcttgtcattatgcctgggacatagtgggcattcagtaggtgtttgttgaatggaagaagcaggcacaatcacagctttcccttctggtgatctgctttatgatacaatttccaggaatgcattgtgtctaaaattggggaccatatgtacaggaaattctttcttatgtcagtgtgaaatccctccaaagtaaatccccctttatggttttttattggtgtttattcttttttaatacagaaaactgtaaactttttattagggcaggtttttttgtgcaaaagccttgtcatgggctagatgacatttcttttcctgtagagatacttggacattttacaattcaattacttccttccaaaagccatatttagaattccagccaatctgtgagccagaaaggagtgagccagtataataatcaaggtaatgtggcaagaaggtgtgaaatttcttagcctttctagaagagatgggtgaaaataaatgttttcagggtcagtaaataactttcccctagtagccagacagaaagcatcttactttgctcaagctggacctttgtcatttgaaggatctcctcctaatgccatctaagcttgagaggttcatatggctgcagcatggtttatcttgctgtttaaacattgtgtccattcaagctccattgtagacctttcttttaaagagagttcaccctgggatattaaataaaatggaatttggatggaaagttggcatcccagttcggaaccaatttttattgggcacagacttggggggagcagaaaaaaacaaacacaaagtctatgttgtaaatgataataaaaaaagaataagtaaaacaaatgaaaatgtttcgttttactaaggcttttttgcattcccatgacttcaaaatacttttgcattttatggcaatctataactgctttagtatagacagacaaagaacaaataaagttacataaatgcagagaataacagaagaaatatgtagaatgacagtggtcagttggtaaagattctattggaggttttggaggtttttgcataatttgtattagtccaaaaatattatgaaattaataataaattttaaagtgtatacgtttcttaatgtcttcaacttgccaattctgttgttagtcataaacttttatattcctccctatgtttatctttcccatctctccggcttgcttttgttattactgttgctgattctcaaaaccattagatcttaagtatattccactaccaaagtcattaattttaaggagaaaatgggaagttagaagccatgattttacttataataatccatttgtctcatactttcatctcaaaaatatgtatttaagtagaaagagagccagaaaaataaccgagagagttatattgtaattctggctctactgtatactagtagtgtgattttaagttggtaatttatcctctgtagcctcagcattgtcttctgaaaagtacgttcactcattcgggtggcgtgagatttaaaagaaatgactcctggtagagtagaatgaagtagaatgtagaatgcggtagcaatagaatgaagacatgagtattgatgatgtagcactggactgtgctatatgatagttaccagccacatgtggcttctttaaatttgagctaattagaattaaattaagttaaaaatttagctccttagtcatacgagccacatttcaaatgctcaagaaccatttatggctagtggctacaatattggacagtgcagaagaactattccattattgcagataatcctgttgaatagcacagacctagaatgacagctccgtgtagggcactgggaattgctgtttggggatggtatcaccttgagttggtctgtgacctgctgggagtaatgcagttctcaaagaactctaactctcctttaaccgcgtgcaaaattgtgaacctgggatgcgtgagggagtggttattttgtgctgaatggtatgtcagctacatcaccacagatgtgagatcagcagacttgcttattctgagtgccgtcagaatcgttaagtaccatatgtccagtgtcatctttggcacatttatctggcttcatctgagttccgaagtgaaatctcacagccgccttcataaatttagccatcaaagaccaaggtgatgatgacataccaagctttagaatcctcaagtagggtgggatattggtgctgggaatgacgaatgaagggacatctgagaatcatgctgcttttatggattagcagaaattcatcttacgtgaccaagagcagctgcataatggctagaaaacatttgccctttctgcttatgttttggttatcccaacacattctatgtgcaatgtctgagtttgaaagttctttttaaactataaaatcatttcccaaagttaggactgattatgaatatcatcaatgattgtttttaaatgtcattatggtaaagtcatagaatagtgaccatctgtgctgcctttgtctttgtataggtgcagtagtcccagcctttctttctctctctctctctctctctctctgtgtgtgtgtgtgtgtgtgtgtgtgtgtgtgtgtgtgtaggatcactggagtatggtggtgaagaaagctgtcacagcacagaagttcagaaggaggtactgtgaaggtcccaaagcattgagcttagctagttctgaaagcactaaggttaactagtcaactcgagagttgggtgtatatactgctaaggaagggttcaacccagggggctcttgctctcccaagacaggaaacatgtatctgaagtgtgaatctattgctattatcctcagtttggcaggcgacagggttctgagagtgagagagtaatggaatgtgtatgtctctgctcttgaagataccaggggcacctcgaaaactcccctccccagcccagggtcaccacagccttaaccgactgcctcctttgcaaacctttaccatgggtacctagaaaaagacatacacacacacatttcagcttatggtttttgttcgtttgtttttgttttttgtttgtttgtttgttttgccagatacttaagatttaagggcaatcttaagggaaatctcttctcccatcttgactgaggcacagagatgtcctgttcccatgctgttgatgctgacagacgtaggacacgtttttttctccgtgtgccaccacactcaagcagaatgtataagatattttctgtctaccaaggatacctggtgacataatcatacctagcctttctttcctccctccgccccctcagcctctcaccctgccctcccatgggtctttatgtgtgctactctatgtagagtacaactcataccggatagcctgttacttattttggttcaggagcagctgcagaggatgaactggagaggacagtctacttgcaaacacttgtagactctccagtggacaggttacctctaaagaaagagaagcctacgctttcctactcactgaagttttttaccatttgcaagtggatccaatatatgtttgttttgggtgaggggctaacaaaatgctctgcggtttctgcaggtttccttataggagatcctgttatcctcgtgtcgattcttgccccattagctttcagcagtaaatagttgagggtctcatctggaaagttctattattagtaccacatggtcagtacattttaagatagacattttaataggcagaaaactgtatacaaggagagatgtgcaatgcagaataactatcaaatgatatctagatatcttagattgctactctaggccatccatggtcttaccccatgggttcctctaactcccttcatcctcccttaacattagctgtaggttttctcatcactgtctttgctcacgttattttctctgccttgaattccctccctcaagctccccacaccagcaccaccagcatgtaccctgttctttaagactcaactcaaatacctctgcctcaaaaacatattgccctaattgtcctggctgaaagtgacagtcatctctggaccccccccactctcatctctgcacctctctatgtcatccttaatcactttctgacttgtgttcttacatagttgaatatgccttatctctactacttgatattaaacttcataatgataataagatcctatcttatcttctcctgtctcttccctgatcaggcctagggtagttcctcccacactgtactgttaagagaatacataatgaaaaagtaaatgaataaatggcagaaaccttatgtggaatgctggtgcaaacagttcctttgactgggggcttttaaaaagagactgattgtataggagatctgagcaattttcatattaatggaatggattattagagctggcatgaacatcaaaagaatctagccacaaccacctctcaggtcatcttcattttcaaatggggaatctaagatttagataggaccattccagatcacatagtgagtgattaatagacctaggactcatacctcatctgacatccaacaccacatgttcttttgaaataaggctggaataatagtgagacacacatattagacacatgattgtgagaagacagttttccaccccacagcacatgaccccatacgtttaagtccctgcctatacaaatagtacagacaaagtaacagcaactttagagggaaacatgactatttccatcatatggtgattctacagagcagaatcagaaacctgggtaaagagaaaagtcctactcagtttcattcttgttaaaagacttaatgactggagttcaaactggcggagtcattggcagcattaaagaagtggggttgaagctgggcaacatttccacaacagggagtggaacagagagacagaaaatattgggagtcttgtgccccatcagtagaaggagatgaaggccagagccaaatggtgggggcaggggtagggggaagattcctttctccagcatgtaacagcattatgggagtgaattcagagcttctgtgtgttctgagccaagtgcctgctggaatgtggactgtaaatctctcatcgtcctcttcactgacccacaagcaacccctgctcctcccatctgcttcccgaccacctgcctttcagtttttctttatataaaaaacgttttccattctcctaccttcctctctgtctacctttgtatggtacatctcatccctcttctaaatatttccatctgaccacatttttccctaatgagacaggctcacaataggataaagtgtaacatttattcatttatctgctcagcaaatattattgagcacatactgtgtcctaggcaccactttagttcttgagtggtcagcagtaaagaaaacagacaaaaaaataataccctggtggagtttccattctagtggggacacaataaacaaaataattggcaaattatatagaatattggaaggaagtacatgctgggagagaaataagctgggagggaaaagggagtgctgggggagaaggagctaagagtctcagttccagagttaggcagcctgagctggaattagaaccccagctgcatgcagtggctcatgcctgtaatcccagcactttgggaggccgaggtgggcggatcacctgaggtcaggagtttgagactaccctggccaacatggtgaaacccagtctctactaaaaatacaaaaaaaaaaaaaaattagctgggcatggtggcgggcacctgtaatcctagctacttgggaggctgaggcaggagaattgcttgaactcgggaggtggaggtttcagagagcagagatcacgccattgcactctagcctggcaacaagagcgaaactctgtctcaaaaaaaaaaaaaaaaaaaaaaaaaactcagctgcatccttcccagtcatgtgacctgggcaggttaagagaactccctgagcctcagttttcttgtctgtttatcaagagtcattagggaaactagtatctccttgggttgttgcagggattcaatgagatgacacatgtaacacaatcattacctcgggcctgtctcctataaatatagtgattgtcacgtttgttatttaaacaatattatatattgtgttttaggtattatgtatgtaatatatagtgtgaatatatgtatgcgttatgtatatagcattatctgacttcgtgcctctagtattacatgcttctcaaaatatctatagttttgtcggtatttctttctcctactagattgtgatcttttatcggcaaagaccacctctcgtttatctctataccccccattgtgcccagcacatcagagattttatgtttggctgctgaatgagaaacaaatgggatactgttcttctaagcacaatcatcttatattagcattcatttttggaactcttctctaattcctgtcatttttgtatcacatcagaagaagagctatattccctccaccgcctctcctcgcctattaatcaccataccttcccacctcttacgggaataccgaactaatggtccttgtctcaatgacctgcctatcctttgtcccttcatgggaatcttctcacagatcaagttactatgatctacaaggccagttcccatagcctcgttccacttacacacgatcttaaccatttctgtccagtgggagtcacccactcacctcctaaaacctctatgcatgccccatacccctagtcataatactcttatacaaatgtttaacactttgcagttgaagacccaatgtcatacatcttttcatttgatacttagagtcactgtgtgaggtacaaacttcagatattaccagttgcatgttactaataaggaatcagaagctcagagagggggaatgaaagaatccaagtatatgtggctaaaattggccacgtcgacacctgaaatcctattatctggggcaatatacatactgggtttgaaaaagttcacacttagcagttgaatgacctgagtcctcaccccagcttggctacttactcaccatgtgaccctgaatagtgccttgaagcctcagggtttttttacttctgtaaaacagtaactcttgccctcccggacacatgggatagtttgaagattaaaagatacattggctgggcatggtggctcacatctataatcctagcactttgagagactgaggcaggtggatcacttcagtccaggagtttcagaccagcgtggacaacacagtgaagccccatctcattaaaaaaaaaaaaaagatatattaagaaacttttgaaagtataaatcatctaaatcatcatgtataaatgtaagagatatgaaataagctctgtgaaaatataatggctgatggcgtccctgtgtgaaagatagaaatggacattttatgtaatttccatacacaccaaacaaaacaaaagatctttagaatttccaagcatgagtgaggttttacattgattgtaaagaatatagaatgcggaaactcatttttaattattaaaacttataggctgaaaaaaagagtaagcactatttaaaaaaaaaaaaaaaaggctcaaccaggcgcggtggctctgtaatcccagccctttgggaggctgaggcgggcagatcacgaggtcaggagatcaagaccatcctggctaacacggtgaaacctcgtctctactaaaaaagtacaaaaaattagccaggtgtggtggcacgtgactgtagtcccagttactcggaggctgaggcaggagaatcgcttgaacctgggaggcagaggttgcagtgagccaagattgcaccactgcactccagcctgggcaacagagtgaaactccgtctcaaaaaacaaaaaaaaaaatgcttccccacacccacccccaacgaacgaacaaacacacttaggaaatagggaagaaggttatgttttgggacaactttctatacactgagaaaatccaagaggtctccacatctacctataaaattcagtgatgctcagagctgacatgtcaatttttcctattacatagtaagaagctcagcattatgggccgagtttattggacactgcagaaattcatttacattgtgtgcttaccctggattgttgttgagtccagctgactgttgcttcacaaattaactgtcctttgagacttggaaatattgaaattgcatagagtttttgtgaaatctcaatcctgtagtattgtgtatattacaacaggtgctcaatagacttctggattattaaattgagtaatatttgtagcaaagatctgtaggctgaattataaagctaatctgtggggggatgccaagatttctctatcattctgctatgtttgccatggtctaccaggagatggcgcctggtaagagttccatattttaatgtattctggtccaaatcactggagttggcaaagatggagaaggaggaactgagcagttcatccccaaagacatgatgacaccactataagtgtgaagccagcaagagtgcaaagactgagagcagcgtggtcatacctagacatttatctggagagcaaaatcaagcactggggctcaaagggttcagtcccagcagttaggagagagaggagtctcctaggagtagttgccccaacagctgctagaaagtcctgatcctttttggtctgagccaaccaggtctcagcccagtcccacttgcctcaatttaaagtgacatttttggtctctagctgggtgcttccccctctgtagcatataacaaggatacactttcaaggcagggagcctggaggacaaggagataaccctgcaggcctggccacccaggctctttccggtgttccatgtacactgcatagattgagtggacacccaggttaaagagatctctcagtactcttggattttcctttaccttaattttgaaattataatattttagacataacttgtgcaggatcacacagtgagtctataggagaactggatgagaacccaagttttctgactttcaatcagctctctctccctacatgtaccttaacatgtatcataaagatgactgttgccatatgggctaagccctccattttctgagtatgcattaccacctccttccctcagaacaattaacagaggatctcataaagatgtgctatatatgtgtcccatagattttaatgagacttcagtaggtgggaaggtgtagtatttattctgggatattggaagagcaagttggataggaccttaaattttctacatagatacttgtggaggacaggctctagggtgacttccaatgacccctgcctcctggtgtttacatctctgtgtaatacctctccttgagtgcaggtgaatctgtaacttgcttctaatcaatagaagaaggcaaaggtgttggggtgtaacttaccatgattacatgttgtgatatacgagtccatctcagcagatagagagactctccttgacagcttgaggaaataagtgaccatatgagagaagctcatgaggcaaggagctgtgagcaacctttaggagctaaggacagcttccagcagacagccaacaaaaagctaggatcctgactcacatacccacaaggaaatgaattccgccaataatctgaatgtgcctggaaaagattcttccacagccaaccctccagatgagaatgctactcagctgacactttgattgcagcctgtaagactccgagtggaggacccagccagagtcatgcctgggccctcagaaactgtgagatagtaaatgtttgttgttttatgccactgagattgttagccaacaatcaaaacctaatacaataataccctttactgttttctagacagctgctatttagaaaagcctcccacccaataaaagagtcccctttatagttttccaagtaggtggttatcagggttctgcttcaccatcttcagtggcaaggaacttccatttcacagggcaaccatgtgtgtattacagaggcttgcatgttgtcaagttcagctgtggtcttcagcgggagcctaggacatgccagggatttcaaggtaggctggtgaggggttcctggttttcttggtcctgaaccatcccagtgccattctaacagttgcaagtctgcctccttcatgacaaaaggactggaggaaaatgtatctggcaagtcgataacactggatcgtttgctcccagctttaccacttggcatcagtgcaaactttcacccagttaaataacttaatgagccctgctctgcatgcttgcttcacagagttgtgacgatcaagtaagacagcatctatgacagtgtttgttggctgtaagtcagcaaatgattgcaaatgatgattattattaaaataatagtcatttgtcagtaaatatttgtcaaagctggtccacactgagggagacaggctctccagggaaactgctgatgcagagataaagaggagaccagccccagtttggaattgcatcactgattctgaattccccatggtacatttcaggtcttgcttcaggaatttgttttttgttttgtttggtaggaacaagaatcccctagagccagttatgttgtcatcaaacttagttgctaattaggcaccaaagcaaacctatgccagtgagacagagttgaaacttgaattcctttctgcaggtggagcgttggatcctagaggcggtgtatacagcttggctattttgatgcttctgcatgcaagaaggtttaagagaatctgagtaaagcaattagcatccctctgtctgcaggcaaaactggtttggacatgcttctctcttcttgaagggctgttagagccttggcagtgtatctgacgaaagatttcactaagcaaaatgtcttcacttacaaatccagccactttgcactctcagtcagcctcaaattcatttattttctttagagtttccctacaaccacgaaccaccaagaattaaattaatccccaagagcctgagcaattatgaggatgttgaatctatccattcaaggatgtcccagcaaggactgttcattcttttaacgtaaactatttatatgttttgattctcctcatttggaagaaagaaataagttttcatatatgtatttttcagggtgtattttatatatctgtttatattacactgttcacattactattaaagcatccccattttattgtaagtttattttgcctgcttcgggaagaacaagaccaagatcccattattaaaaccaaaatcttccacaaaagtttccttttaaaaacttagattaggaaattttcagtcagccagccaactctatagcctttgatacttggtcctacaaagttttcttcccctttggtctgaatgttttcctttgtctgtgcacactctattctcctgccagcatgataatacatgctgctttgatatcaagtggcgggaacatatagaaatgtgctattggtgctgcaatttgtatctttgttttcatcaaacttattatttaccattttaggatttttttgtttctttttgggtggttttttttttttttttttttttggtgtgttttgtttgatcttggttttggttttccaatctaggcctgaggtccagtgctaatttgatgctagtgtgaactctctgagcctggttccttgacgttccattgggtgactattgcagtggttcagatgtggtgctaccagccttccccaccaaggaagttgcctgctttctcatctttgatcctcttcaccaactaaccacaacacaccagtgaaaattttaatttctccattcagttcctcagtttccgccaccaggtggtgagttcctgcgatacagataacctttttgtcttgttcagtacaacctcagtgcctagcacaaggccttgcagaaagctgacattccttaactctttatttctgaaatgaattaatgttcttaggttccatgtctcgtggaccaaataatgcaatcctagatcttgccatagcatctgggacaccacgtatgatgatttaggtaatcagtgaaaatccatgtcagcagctgccaatttacagatgaattatgtccaatggtttggagatgaatgagttttacagttcatagagcatgacaaaattcatcttagccttccattttatagatgagctaactgatctctgagagaggaacgacctctgaatgtcctgggaagagcttgtggcagaagtaacttctacctagtagtgtattttccttactgcctgttctcatttgataacagacccatatatcaattatttgcatccttcaattaacccacaagaaggcaaatttaatccagtgttagataaaataattattcacagggtcataacactattaaagaataagctatggccaggcgcggtggctcactcctgtaatcctagcattttggaggccgaggggggcagatcacttgaggtcaggagttctagactaccctagccaatatggtgaaaactgtctctactaaaaatacaaaaaaaaaaaaaaaatcagctgggcatggtggcagacgcctgtaatcccagctactcaggagctgtagtcctagcattttgggaggctgaggcgggcggatcacttgactaccctggccaacatggtgaaacctcatcctactaaaaatacaaaaaaaaaaaaaatcagctggtggtggtggcagatgcctgtaatcctagctactcgggaggcggaggcaggagaatcactcgaacccgggaggtggaggttacagtgagccaaaattgcaccattgcactccagcctaggtgacagagtgaggctccatctccaaaaaaaataaaaagaatacactatgaggcagtgagatatagggcaagactcatgttaggactgccacagagcagtcagtagtggcaacaagaaaggaacgcccctacgatgtgacaagtctctaccttgatatcaatggaattatgaatgggcagagaggctgtgcccattcttacctaacagggaagctgtccataaataaggtagcaattcctgaatcaaggacaagccttctgcccagtctttatatgtaaagaaacagtagtttcatttgaagggaaaccattataattgtctcagatgtgcatcttgttccagggtacttctttgtatttttgatgaggaaccaaaggctttattatagatcttgtgaatacctgtcagccaggatttagaacaaatgcatttgggcaattttgccttttatttcagataaattttatatgttgtttctgtccagaattgtaggatcatgtttggcttttcaaaactgcaggaaatgtttattttacttttctttaaagaagaagacagtaatgaaaaatgtatcgactgccagcccactgtttttatttctctttgtgtgagctatggcttctccacatcttgagccttaaactctttgatgttgtctttttaagcataacataaaagattattccctttagtctgtaggcttggaggtgggcaaacatgacatattcctgggtattcatatttctataacaataattgatgcaggttttggggctgttgtatttgccgtagccttatatgataaacatttggcattccatgacgtttcagctttgtcaactttccaatcctgtatggagttccctcttattgtttctgtgtgaacaacttgacaagagtggcatccgtggtcagattcttcactctatccctgcaggacttttcattgtgctctgcacacgatggaggctcaatgcatgaatgaatgcatggatgaatttttcagtttgattccgtgagctgcttaattctattagatgcgctccctaggcttttataagacgtttaattggtacatgtttcttatcactttttaatactccataagtgttttgtgttctttgcagtagagtccaaataaatataaattaaaatgtttccaattacagaggaaatattttcagtatcttcccacaaataacactgggtttataaggcttggttcccgggtttcatggtcatgcttggttgactaactttgtgttcatgtggcataagattctaaactgtcagaactacgtgggcttttagagcccatctaaatccttctcactcacagacgagcaagctgacatatttgcctcatttattggcagtgaatgaattaaaatattgtgccttcatcaagatattgtgtgtatattcacaatgttgtttttcataaatatgtagcattactctgttttgtgactgctcctagactggctggttctagggataaagaagagccagagaagaaatctgggcttcccagcagcaccttgggaggccgaggcaggcagatcacaaggtcaggagttcgagaccagcctggccaatatggtgaaacctgtctctactaaaaatacaaaaattagccaggtgtggtggctggcgcctgtggtcccagctactcgggaggctgaggcaggagaattgcttgaacctgggaggtggaagttgcagtgagctgagattgcgccactggactccatcctgggtgacagaatgagactccatctcaaacataataataataataataataataataataataataataatctgtgcttcctgcttaatttctagttttggtattcctactatcaggcccaacctctgtcctttgtgttcacagctaaatttgatttgcgtttggtcagaggatgggagaacagagaacaatagtcaccctcatcagcaactgagaaattcagtctgttctgccaaccttgcttgtatcttttcatataaatcttgaaattgcctctatttcaagtctgatggtcagtgactaattattaaagccattacttgctttttttaaagcctgaaccttgctttccagaatcttttccacctttgagattattttaaatatcatcattactttgagaaaagcaaacttaacaaggatgccttaagaaatataaaggtgtcattgcccaggaggcaagaaagggaggcagaatggtaatgaaatgagacagcccttgctttggttttataagatctgggtctgaatcctggcagtgtgttctttctaactttaggtaattcaggagccctagaaacctcatctctctatctagtgtgggaaaacgtgaaacaactttgggccatagattgctctatgcaaactcaacatatgcaaacttgtcttattaaaaagcctatctctagtggttcctatccctagtcttgtttggttgggtagcttccaattaataacagcttcaaattctggctaatatttgtttagcacttcatggcttacaaagtacttcattattttaacattgtagtattggtaataatatcaaactttctgttattacaataaatgttccttttttactttattattccattactttattactgtttttcagatgtactgtgatctacattttacggatgaaaaaaagattctaggaggataagggactttgtcacaaaagttagcttctaaatgatggggggactcatatgcaccttttgaaactcctaaacccatgttgattccccaaaggctttggtggtcctaaacatttgacataatcagagtctattataaaaaggtatggcttatccagctcctggttcctcactgtctcctctatctcaaaatattctagaaaaaactttactccctgaaaatatacagctttaggataggtgcagctccatttcatactctgattttcattcctcatttgaaaagttgaagcgtaatttcttataagactttagaagttgaagtcaggactggataaagaaaatgtggcacatacacgccatggaatactatgcagccataaaaagggatgagttcatgtccttttcagggacatggatgaagctagaagccatcatcctcagcaaactaacacaggaacagaaaaccaaacaccacatgttctcactcagaagtgagagttgaacaatgaaaacacatggacacagggaggggaacatcacatactgggtggggcctgtcgtgggggtcgggtgcaaggagaaggagaggattaggacaaatatctaatgcatgtggatcttaaaacctagatgacaggttgatgggtggagcaaaccaccatggcacatgtatacctatgtaacaaacctgtacattctgcacatgtatctcaaaagtaaaattttttaaaataagaagaagttgaagtcagggtataggaatcacaatttgcagtgctatctttcacacttcttaccacctgatgaaaatcaccaaatagtatttcttcttttacctaacatctctaggaaagagagaaccctgactgcacctacaagtagggaaaggcatttgagttacgcaaagctgcttttaactctgaaactgtcctacagtgtagcatataaacagggaaaacattttattggtgttttaatagaatcttatctaaatatctggaatcttactgcaagggccgatcattactctaggtagatttcaaggcccacagctccattatgatgtcaacaaggataactgatgtttattctgtagttagagcccccaaggcttcagcaaacattttgctcatcacttgtaggactagcagtaaatgtaatcattgcaagactgagctaacacatctgctaacagggttgttcatttgagtaaacagcaaggtgataaggcgcagggacggaccattggattgagtcagacaggcccgagtacaaaaaccagcctcactacttaaatcttacatagcccattaagagtaagttgcttcactttgggaggctgaggcggacagattacgaagtcaggagatcgagaccatcctggccaacatggttaaacctcatctctattaaaaaaaaaatacaaaaattaactgggcatggtggtgggcgcctgtaatctcagctactcaggaggctgagggaggagaatcccttgaaccagggagtcggaggttgcagtgagccgagatcactccactgcactccagcctggcgacagagtgagactccgtctcaaaaataaaataaaattaaattaaattaaatttaaaaaagagtaagttgctcaactttttaaactttagttttattatccacaaataataaattataaattgctgctttacatatatgatataaaaatgcatcaatccagttaatttggggtaaatggtattattccagtcttacctcctagaatactcagaagacacaacggtgtatcactagaaggagatagttttgttttggtttggtttggtttcttcagtcttctttttcctattccttccttttccaagaaacccacgatttctttctttctttttccagctattgatgaggtcagggagtaatatgttcagatctttgttgtatctttgttccgtttagaaaccagtatctgggaattcaacagagaatttggggtcactggaagctatgttttacctacatacaactacatcttcctcttagacctagagactagatactgaaaatgcaaaaggaagccatattgacactcccaaggataagggaaggcattacatcatcctttgtaatggtgaatcttgtgcatttgtagagggctggactttggcttctaccatattgtttagctctgtcaaccccacacaaggactttatttatttatttagacagagtcttgctctctttcccgggctggagtgcagtggtgcaatcatggatcactgcagccttaacatcctgggctcaagtgatccttccacctcagcctctcaagtaactagcaacacaggtatgtgccacctcatctgactaatttctttttaattttatatagatgggatctcattatgttgcccagcctggttttgaactcctggccacaagcattattattatcctcatcttacacatgaggaaactaccagtgaagtggcttgcccatcatgtgaaattacatatgccagtactagcctgttctgaaatccagcaacattcttttccacctctagccttgtttctagcaccctttggcctccagagcaagctggggttcattttacattaaaagtagagccatctgatgtggcgggcatccaaaacacttgggaaaatgctactctgtttagaactcgcttttcttcctcccgggtcccagtgcaggaggtactgtgtgctatgtgggccatcagactgtccctggccatggcaggagaattaggagaccaccagggctgtagttaactgtaggtccttcattaagaccagccaattgatagcgtgtgttcatgagtccttgtgaagtcttttcatcagccacgtggaagaccccttagaaaaacaatctctgtaatttgtatttttggacatagtgctttaggaaggtggatgtctgaaggtgggctgggtttgaaacatctctcaatgccatgggacagtgtggtacagtgtcctgacaacttaagctcatcctgacaacttaagacactaaattctactcctgcctcttctagtctagttggtcacctgccctttctgaatttgtttttttttttttttttgagatggagtcacgctctgtcaccaagctggagtgcagtggcacgatctcggctcactgcaacctctgcctcccaggttcaagcgattctcctgcctcagcttcccaagtagctgggattacaggtgtgcaacaccacgcccagctaatttttgtattttcagtagagatggggtttcaccatcttggccaggatggtctctatctcttgactttgtgatccgcccaccttgggccactgcgcccagccctgaatttgttttcttaactacccatttatttgcttgaaacagatgacttaaaatattccttcctcctctgaagttgttctttaaacttttctatgtaagaaattgattgagctgtattcctaggtattttattctctttgtagcaattgtgaatgagagtttactcatgacttggctctccttttgtctattattgatgtataggaatgcttgtgatttttgcatattgattttgtacgctgagactttgctgaagttacccaccagcttaaggagattttgggctgagacgatggggttttctaaatagacaatcgggtcatctgcaaacagagacaattagacttcctctctttctatttgaataccctttatttgtttctcttgcccgattgcactggccagaacttccaatactgtgttgaataggagtggtgagagagggctaatttacattcccaccaccagtgtacaagggttcccttttctccacatcctcatttgttttttccagaagacagcatttgctattacctgtcttttggataaaagccattttaactgaggcaaaatgatatctgattgtagttttaatttgcatatctctgatgagcaatgatgttaagcagcttttcatatgcctatttgccatttgtatgtcttttgagaaatatctatccatatttttcgcccaattttacatcagattcttagattattttcctatagagttgtttgaactccttatatattctggttattaatctcttgtcaaatggatagtttgtaaatatgtttccctttcactggtttttgtcttcattttgtttgtttcctttgctgtgcagattaacttgatgtgatcccaattatgcatgtttgctttggttgcctgtgtttgtggggtgttactcaagaaatctttgcccaatccaaagaacattcatctttgtcaaatgagctatagaattaatgtttttcctatttttatttattcattttatatttatttctattttatatattcatataacaatatatttattcataatatcactttgaatatcatttgttttcatcttgcatttttctcatttttcattgaggcctaatttacatgcaatgagatactcagatcatgagtcgtagttttaggagatttggcaattgtatatattacccaagaaagttcccttaagttcccttattcctctttctattcaagtcccatctgccaccctcagaggcaatgactttctgacctctatcaccagaaattatttctatatgttcttttaaatcagataagaatcacaccatatttattttttgtatctggattctttcattttgtgcagttgtctgagattcatccatgttgttgtattagcagtcttcatctttttgttgtttagtatgccacgattataccataattaatttacccatttttcttttttatcataatcttatataagggaaaaacatgggaatacatgaactgtatctttggctcaaatccatcttctatcagttctaagggcctcagggtatttgccatgaggggctgtgacaccagcctggactattaggaatggacctttgcttctcacagcagtcatttattcctccactttttctactagcgtcatgtgaagtgggaagggtactggcccgagagttaggagactcgagttcaagtggcagctctgcgctggcttggcagtgtaactggccactccatcaccaggacttaatttcttcatcagtaaaatgtttggtttggactgaacagtccctttttcatctctgacatcctacggtcccttaaaaatccctcctctgggctgggcgcggtggctcacgcctgtaatcccagcacttcgggaggccgaggcgggcggatcacgaggtcaggagatcgagaccatcccggctaaaacggtgaaaccccgtctctactaaaaatacaaaaaattagccgggcgcagtggggggcgcctgtagtcccagctactcgggaggctgaggcaggagaatggcgtgaacccgggaggcggagcttgcagggagccgagatcgcgccactgcactccagcctgggcgacagagcaagactccgtctcaaaaaaaaaaaatccttcctctgggtacctcatctttttcagttgcccctgcagtccctctctttagcatttctgtgaggaagtatccaaagcattggattacttgagataatatttctggtcctcttcctctctcacactctacactttgcttttctagaattgaagcctggagaagaaatattgtctaaagagcttgctacaagaaaatttccctaaaaagtattgggtcttaaaatttcatctcattttcaagttcttagaatactgttaatttgcaaagctgattatggatggcatactttattatgctttttaatcatacttcaaaactgcactatggatttgttctttctgtcttcctcccatgcttaatcattatttttggtggcaccttctaaactgttgacttattttctttctttctgatttgtagtagatgttgtataatctaagtttaggcagagatagtgaaagtgctggcctgcctgtatttcagccagtcctgggttaatattattcatgtggcaatgtctgttttactttaggactcaacgtatttaatacttcctctcctcctctttacaatacatagaggaaaggcctttgaaacataatttctctccctatgggaaatgctttctataaatttttcattttcaatacaaactgcttcactttacaaaacagtatctgtccctagcatgaaaaaatactggagggatatgaacagtaaaggagaatatttttctagcttgtgttaaatcaataatgtagtgattccaagggaattgagaggttcgtgtatttattcatatattagtcaaaaattcaaaattctatctctaattaaaaaggaatttgagaagtatctaccatttttattgtccatctctttggacatatgctttgcagcacagtggagcggaaggagcgtagacctacagaaatttagagggctaaatttttaatattggcctggctacattgcctggactttgggaaaatcacttaagctctcttagccttagtctttttatctgtaaactgagaataataatgccagtttttcaaggttgcattgaggatcttaggtaatacatataacattcatggaacataaaatgtgaaccaatgaaggtgccaatgcaattacaccttcattaggagttgtcatttctgcggcttctcattagaacatcaaaattagttccttcaatctttactgaggcgcagagctttaaactctaactttgaaacttccaaaatgaagtgtgaaaggtctgaggccttgtgagtttgaaaatgcagttcacacttcattttagaagctccagaattttttaccaaattgagattggattcaggaaatcatattttaaagccctggttcatgccattttctaaagaagtacctagaaggccataatcagaatgcttattaagtgaccacactttgaactgcattgcagataaattacctctgtgtggggagatgtgtcttgagattctgcggtcaaggctcagacagccccagagctggaaacctcagagcatttatgcctctgtcactaaaggatggggttatgggggctggacagaaagcttgagagagatgaaaagttcagtgggcttgagggaggattactgaattacaataatatccacaccgtaaagtgaatttgtacttgcaagagacacattatttatctagaattttagaaagggtctcttttcaggtcactgtgtagattgcctgtgatttgttctccttgattgaatgtgagtgagtgtgaagcatatctaaacaggtctcacagcaagtttctttcataaatctcctctggtatatatgctgtgtacccttgacaaggagaacactattaatggcgacagtatgcactggaactcagagcactgacgtgggaattgggagctctcaggtctgttgtttctgccagagaatgactctgtgaccttgggacaagtggattcacaaacaagctgaaggagatcatatctgtcctagaccgaaagcttatctgagaaagatgctacatgactacaaagaggttatttagtttcttagttcagataaggaaaacactaataattagtccaaacttcgaggctttgtctttgtcttctaagcttgctttcccctgtgatgtccagtctctcctaaaccagataaggattcacactattaatctcgacaaaatcaattctttgcatttgtgcttttattaggtcagtcattagtcaatgaacacttattgcacgcctgctgtttgtgcagacactgtgctagtcaggggatgcaaaagatgagtccgtgctggtcccatttcaaagaactcaaaatatggtggagacaagcacgtatacaaaaccagaacacagtataatgaataccacaggagtatacccgcaaaagttatatgggtgaagaaagaaggattaattagttctgccagagaaggactaattcagggaaggctttggagaacagggcacacatgatcggagactttactggttcagtcagctatataagtgataaggataacatgaagagaggtgccaagggcaagaaagtataagatatgtgtagaggctgggtgcagtggctcatgcctgtaatcccagcactttgggaggctgaggcgggcggatcacgtgaggtcaggggttcaagaccagcctggccaacataatgaaaccccgtctctactaaaaatacaaaaattaggcgggcatggtggcgggcacctttagtcccagctacttgggaggctgaggcaggagaattgcttgaacccaggaggtggaggttgcagtgagccaagattgcaccactgcactccagcctggttgacagagcaagattccatctcaaaaaaaaaaaaaaaaaaagagagagaaaagaaaagttacatgtagagaactgtaagtaatcttatctggctagaatatagggtaccataggggaatgactgagcatgggtcagagttgtaaacatccttatcatgccaatgagttggatttctccagaaggcatagagagatctgtttatagtttctaggtaagaaagagtttatgaacttgcctgtgtcttcgaaatatgctctggcagaatagaaaaggtgatcaaccagagtaggacagaggccacacacatctgccctgaggtcagatacctgtacatttattgtgtttgatagccaaatgattttaatgtaaactagttgcaaacatttaaaatttgggaaattttacataaaaatctagattttcgagcttctattaagaagtagagtgcacaatatctgcctagcaagaaacagctgttgctgagaagtgtcttccaccttcagctagagcatgcagtctgacatttgcttttctggttcttgtatttgagtgtgagactcttggagtaaagcaaacccagggtcagaaagatcactggtgatgatgttgcagttgtactgtcaggactgatgaaaacctaaactaaggtggaagccttgaggaatgaagaggagggcaaggatggatttgctgattgtttagatgtgtcatggatgaaagagatggagaaatcaaagaagactctcaggttgtaattttaggtaactgggtaggattcccatgtagtcagaaacccagaaagaagagaaggctttgggaagatgacagtgtattcaatgtggctttttgtggttcaagactttggaaaatattgattagactgttgaaaagtacttataggtcaggaacctggtcagaaagtattgtgctaaaataatattgttatgacccaagcagttgtaaaaataacttttattgtctaactctcacagtttatcttgaactcttaacaggttgtcaggcaaatatctgttcttgaaaccagaaaaacaaatcaagaaattgggatatttgaaatgcctagagtgggcttataactgtaaatgatattttacaatggaaaagtagaaacagtctttagcagccaatgtgaaataactgggtaatgttatttaatagaatgcaaatttgaaatgagtgataaccattatggagaattttgttaggaaaaaaattaataaagtgaatgtaacacatgaagcagagctggaactaggaagaaggaagtcaggctcctggggaaccaaattaaggagacttcccctctcaggcacttgtgggaccctgacggtaagcatctccttaggtactgctcccatcctcatccttgccttgagtttttgaaaaatatatgttagaaatgtttatgattatatatcacaaactgttattctcaattttatgaaattccctagatatgattacaatagtcatttgagatttatgatcttatctaattgttatgtatgtacccattgtggggtgatacaggcagaataagctctgaatttgagacttgtgaaaaccataagagcctcgagtcttgtcttatgagtctccgggtagagctgaactggctgcagctccaatgagaggcaattgcttgagaactgtttccaccagcatactgcatggaatgggtccctctctgatgcagatcccactgatactgatgtcgcactcttgctgatgcagatcccactgatattcatgtcgcactcttgctgattttgatgggccagtcaatagcagggcagcgtgtcaagatgctggagcaaggaagtcctttgtactatttttctcactgctgtcttttccttatggcatgccattctgtcttagaaaatgtgagacctgaagtagacatttggcatcatctagtccaacctctttgatacacagatgtaaaaactgaggcacagaggaggggaagaactttgctcaaatcaaaaagtgtattaaggatggatgcagtggctcacgcctataatcccagcactttgggaggccgaggcggatggatcacaaggtcaagagatcaagaccatcctggccaacatggtgaaaccccatctctactaaaagtacaaaaattagccgggcatggtggtgcacacctgtagtcccagctactcgggaggctgaggcaggagaatcgcttgagcctaggaggcggaggttgcagtgagctgagatctcaccactgcactccagtctgatgacagaacgagactctgtctcaaaaaaaaaaaaaagaaaataggttccgggtgttgcagcaagtaataatgattaaacattgtttaattaaataattaaacaatgcttgcttctctcccactgaaggaggtagaaggcacagcaccgtggtgagcgaggcccagctttctgctgtgttcctctgccatgcctagcatgtgaccactgtggagtgatgccagacggctgtgccattccagtgcactgaggacggagggacccttttcctctgaggacacatcatttcaccttaacccctttggccagaacaaagttgcatagctgcaaggacgactgggaaatatatttattctgggcagccatgtacttagctacaatttggaggttctaaagaaagaaaggaagagaatggaaacaattttcaaggcctaccacagcaaattggtgccatttctaggactagtatcctatttcctaactcctagtagaatgttttttctataccacagatttttaattctcataaagatgtgatttttaattaagaagcctataagaacattttgaatatgcacaaattcatcattttatatgtccatacgggatgcagtgattcccctttgcttaagatcaatttttgtttttattaatcccttgatatatagataggagtcaggcagacccaagtttaatttctgtctaccaacttgtgactttgggtccatatgaataaaaaaatctatgctttgattttgttttttcctctctaaaatagtaacaacatgtcatcttggggttgttttaaaaattaaatgggatgatattaatgaaagagcctagcccagtgtttagtattgaataggtagatatctaatggtacagataccagtttccttctttctcctcacttccttaggttccctccaacctgaagacaacgtatgtttctcatagataattacaaggaatttaaatccttgacaaaatgattttctggctatccatagcggacatgtctagatacatactctgttcattttaaaagatgaggaggttctgacacaatcagagaactttttaaaagttatggatgcctgagccccagccccagagataatgattaaacaggcctagaggttgttagtttttgaatgaagtttttagtttttatctgcctgagtgagtctgatgtgctattgtgttttacacagatcaatatgatggtagaatgaaacagagaaaacggggaagctgagaggtcacttaggcaggtattgtgattatctaagtgagagatgatagaacaatatggcaaaagatggaattaaaatatttagtgggcaaaattaataggacttgatacctgatgagatataggaaaaataaacttaatacatctttcaacactagcaaaactgtagctcttgaaatttatctgacctgaactaattggttcggggtaaaggagaggagaaattgtgatatgtgaaatatattaatatttagaaaattcttccaacattattaatatatagaaaattcttaattatctggaataatgagccaaactcaacaagataaaatctaagagggtcaagtcaaatttcattcttacctttaaaagttagctatacaagtacatcatataaatgtcatttactttgatagctgtttatattttttaaaaaaagaaagaaaacaagactggtagagaagatagtctgaccgcaagatcaacaataataataataatgtaggaccacagaaaagtaaatgaaatcttggactgcattcatctaaagaggagcatgcagaacagggaagcagcagtgcctggagtgctgagttcagttctgggcgccacatgatgaagggaacctggataaactagaccttgggcagacaaaggtgcttgggagagtgaggtgacagaaatttctcataaggaatgatggaaggtatccctttattccaataaaaagaagactaaggaaaggcaatgttttcagtgctctttagggctgttaaattgaaaaggcaacagatttgtctggagaggacagaagtagggccaatggggaagaagatatttatgtcaaaataagaaagctctaacaattagacctaccagtggaatgaacgaaccaagagagtgagctgtccctggacatggtataagcagcctcaggggctggaaaaacactgactgactgggaatgttgtagagggaatttatagatcagattgattggggaaaatagccccaaaggttctcctctctctgacatcactctatgattctatgtgaagttctagctttttaactatttttttgtataattaaataatttgtctttattgattgagaactaatcattaaaaaagctactgtcttttcatgtctagagatgataagaataatactacatgcttttgaagaaaaggaattttatgcaaataatcccataccagtgtattacgcttttgcagggataatcaagagcttgcaaaatttgaaaccacattttcccctgtatggaggaggaaagtctattttgcatccgtactttatgccttgggcattattattgctcatatgctctaggatttttaataaacctaacctgcttcatgaaattacactgcattaattcaacatggccatgtccaaaatttaatattcattcatttattcaagtatttattcaacaaacaatccctactatatttcatgtgctattgtcagtgctagaaacatcaatttaaaaatgtttaaatcctagtcttcgaagagtttataattaaatataaaaatattgtctatgtgtcaattactgtagctccaaatacctatttactccaaaaattagtgtctgaaaggaacaatcatttattatctcttacagtttggtgggtcagaaatttgatagcatcttgggccaggcgtggtggctcatgcctttaatcccggcacactgggaggctgaggcaggcagatcacttgaggccggggagttccagaccagcctggctgacatggcgaaaacctgtctctactaaaaatacaaaaattagccaggcatgatggcacgtgcttgtagtcccagctacttgggaggctgaggcatgagaatcacttgagcccaagaggcagaggttgcagtgagctgagatcatgccactgcactccagtctgggggacagagtgagactctgtctcaaaaaagacaaaaagaaagaaagaaatttgattgtgtctcaagtgggcaagtttggcttggggtctttcatgaggtttctggtgtgaggtctctcaaaggctgcttctccttacacctgggccaggagtgtttgaacagctagtctggaacaacttggggtcttcaggtatctccctctatctgcatgtggtctctccagctttgggataacctaacttcttacatggtaactgctatagtttgaatgtgtcctttaagttaatgtgttggaaacttaattcccaatgcaacagtgttgagaagtggggtataataagagatgattaggttatgagggctctccccttatgaatggattgatgccattattttggaagtaggttagttattgagagagtaggatgttataaagtgagtttgactccctcttgctctcttgctgtcatcctctcttgaccttctgccttctgccctggaatgacacagtatgaaggccctcaccagatgctggcaccatgatcttggacttcccaccctccattatcataaaccaagtaaatttatgttgttcaaaagtgacacagtcagtggtattgtattatagcaacacaaagcaaactaagatagcaactgaggacttcaaaggtatgtatttcaagagaaaactatatcacattttaagattagcattaggagggctgggtgtggtggctcactcctgtaaccccagcactttgggaggccaaggcaggtggatcacctgaggtcagcagttcgataccagcctggccaaacatggtgaaaccccatctctactaaaaatacagaaaaaaaaaattggtgagcacagtgtcgggcacctgtaatcccggctactcaggaggctgaggcaggagaatcgcttgaacccgggaagtggaggttgcagtgagccgagattgtgccagtgcactacagactgggcaaaaagagggagactctgtctcaaaaaaaaaaaaggttagcattagaagtcaggcagcatcactgctatgacattctcttggccaggcagttgcataggttctcccaagacctcacctcttagtggtggactgttagtatcacattgtgagatgggatgtgttttggtgtagtcatctttgaaaattacaacttgccatagcatatgaacagataacactatacttgggttctctgctatggtgctgtgaaagaacagaagaggagagtgattaacagaagaggtaacattcacatatcatgggccatataatttgatgtatgtaacttgttaaggaaatacgttcaaggcaggggcaacagcagatggaaaggcatgaaagaacaatgagcacaaagtgtttaaaagcttgggttgacaggaacaaagactgagttgtaggagaggtgacaggctaggggcctagacaggggaggtaggacagcatcctgaagggccttgaacatcaagttaaaacgtttggctttggggagcagtcactgtctttagagcacaggcatataaactgatcgtctttggtaatctcttccatctacaatctttctttcctttgatagtaaacatatcatctctgttaaagttgcttcctagcttaaactgaacacagactccaaaccattgaagcactttagatttttttctttttttttttccttttcttttactcaccacaaacaactctagaatggcatgcatttgaacaaaccaaaagtgatttcactcttctaattttcagtgctttttggctaaatgcagagtgagaaattcatacctttttcaagcagtgtgggttctttttcccaatttctgtcatccatctggttctctggaggtcttggaatccaggaaagtgttagttcactgtgctgaaatccaaaaaagactgctaaactgtgaaagaaaatttgcattccagagacactgaaagagttagtccaccacccttttgcaacagcaaggagaaaacatctgtatttcctgcctctttgtctttaagcagttatagaatggaaaaccctatactccctggctgtgcgtttcatacctagttaatctaaatcacttttggcagggtgggggaggaatcaaaacatggaattattttatttctagtgtcagaaaatattacagccaagatactgtttaagggaagcaaattacttcaccagcttccttttgagctcctcatgaggtttaattctcatgaatgggtcctagagccgacatttgacatacacatcagcagtgccctcttcggaagggaaccgcacagtcacagccatgatgttggcatgtctttatggccttcctaagtcatgtgctgtcttttgtcttccattggcagaaatacaattagaaggccttgttctcaacagaagccaaatgattgccaaatctgttcaactgatctctagagaattgaagttagctcatggccctctggctgttctctttgccactcccaggagttataggcttaaagttatccctttcttttgaaagaggatcaagtttggttcaaagaagcttttctatcatccccaggagtacaaagagagcccttccatgaccctagttgtttggctcagaccacttatagcttactgtaatttaggaagtaattgtaattcataaagccaggtagataataaacatcttggcagggttgagtttcaggcagctctgaagggaaccaacatgtgagtggaatggtattgggaacatttctagtctctgcttgcagatcttgattctaatggatgactcaaactggtttaattctgatctgaaatgtgcaggcaggcagtcattactctgtatacacatagctgaaaacatcatcacttaagcatgggttttagacattctcctggatgagttagttacccatggtagacaaatactgtaagtaaaaagagcattctcctaatttctatgttgtgtgattaacttcagatcatttatattcctggagaaatatgtagcactattttttctttaaaagatatattcttgctgaggtagaataaagaacagaaaagttgtaagaggccttagattttaggttatttaatgtcatttaattttgtattcaaccaatacttactgattgcctgttatgtcttaagcgctgccgcagaggctgcaaatgcagtagtgtcttgaacaaactagtgtaagatgaacaataagcatggcagaagcatagtagcaactaaattcatgaagtgatatcatagtgataagcactatgaagaaagcaacaggataaagagacagagtctggctctggagagggggctgctgaaatagtgtggtgatgcaggccatctgaggatagtaatgaaatttgggggatgtctatgggagtagatgctgttggatgaatctttggagtactcccaaatgattgttcattcatttacttactaaaatatttactgagctccttctctgtgccccaggcattgttctggaaactgagggtgatgctttgaacaagacaaagaaccatgccctattgaagcttttgttcagccctcaaatcactccatttcaagggaccaaaagccctattaacttaattcccttattttatagctgacggaatttaggcccagggaggaaatgctttgtacaaaactcactgctggtggctgacgttggcaagactggaatacagcccttgacttctgctttatttctccttgccactgagccatacagagtctctgtaaccatctatgtcagcaattctagtttagtgctggggttggttagcactgtgacccaaagataagtctttttctctatcaaggcctcatgtctactcttaataaaggtaacaaaattgagggttgttaagatggggcttcacaggcgtgggtaccaggggctttgttggaccttgattacggttaagtcaagaaaatggaccttgccaagtataactgccgcaaactagacagagaactgtatgagacttcttattggctcatagacttctctgtacacactctaaatgcatggtatgtaactactccatcacttgataggcattccaggtatgtaaactaaataagatacatggcaagaaaaattacctgctgaagacaaaacaacaaaaacaaaataatctgtatttttccaaactcaatattcaatattcaagggagtatgggtacttgtgtatatattttatacttgtctacttctctccagtaataagaatgatagaagttggctcagttgattagtcagaggctgttgaaccaagatgtagggtcgatccttctgtgtaacagtaattctctccagcgaaaagagctttataacaatatctttatatctatttacattcttaaacagtgcttctcccatttcttataatatttaattctcattgttaagagattgttaaggcagaatacttagtatcccattctatagatgagaaaattgacacccatgtagcttatggaattttgttcaaggtgctgtgaattccagctactctggaaattcactgcctcaatgaaactggtctaaatgttggttaatagcctctatttataggttgctgatagtaggaattatgaaagctggacctaaggcttcctaatgtgaggctttggataggattatctgctctgagctcttagccagaaggcccccatatttatcagtgtgcaacaatcttgttttgacagcgacaaaacccaagtagtgtcacatactcagcttaacaatttttcattggctatgtaagtaattatgttaattttatcatattcttattgttaagtgggacagaacaccagggagatgtgttggtattcaaaaagggacctagtgtggggttgggagaagagcactgcatagaaaccatgccatctgcgtcctggactttttcacaaaatagtatatcacattgggcaaatataccacaataggcaaatcagcttcacaaaatgcagtgtcctagtatgtgaggtgagacagttggacaagatgattcggggaatttttcaagctcaaccaaactatgtatttatgagaggctatgggaaatctgcatgctaaagattattaactgcattctgaataattgcctttatacagaataacggagaaagatatctgagaaacttgttaattggaggacagtgtgaagtagaagaatgagcctttctctttgtactttagaaaacacaggttcaaatcctggctgcatttatagctgtgtgtcatgtaatgcggaaaagaattctaccattctacctcctataccagattgctctggagattagacgggctcctgtttgtgtacatttagtaaactttaaggattgtaccaaatcaaagtatcagttattatttttggtgtataaaggaatataaattacttttatgaagaattaagaaatgtatggatttggggtataataaggtttacacagaagaagagctttttcacaaaattcccaggaaagcagggggaaactcacttagaaatctagaagcccattttatattatgacattatccaattatcccagagtatcatatacacaattccttagataatccatttgttgaaaggacagatataaaatataggagaattaatggtgaagggaaaaaatagaaatacggtgcttcagtgtggtagttacattaaatgatcaaaggatgacaagttaattgaataaatgtcttagccccttgaaatttgtatagggaatttataaaactaacatttattatatagtcaggactgggttctcgctttgataatatgtgaactcatttaaacctcacaacactgcaatgtagacatttcagtctacaaaaaccaaaggccagaaaggtcaagaaaattgcctagcttttcgaacccagatcacctttttcctactgtttcactaattctcttactataatatggcagaccttctttgatgtctgagttaataaatcttcacatgacttatgttgtaaaggcaaaatctatcatttgacttgtctcggaaggaaaggaactcaattcttttctttctctctcaccatagtcttagtcttctctgatatgttcattatgcccatggcatgagggtctgacccacagtcctcagctcttaggccccttccccctgccccacatttttcaaggatcagaacacattcaaaagaagtgttttggaagacctagcatgtcacatgggttatgcattttaaagtaaaatattacctctccgggcattaaggtataaataaactaaatgttctataattgagattttcttttccgatttagtaaagctcagatcacaatcctaaccctagtgcttaagaataaaaaacagggcgtaatttactttgtgaagaatgtgatttttagctcatggcaaaattgaatagaacggcctaattgctgtgatctttttgttctttctgttggctttttccttatggttttagggcatatttctcaattttaaagccagtttatgtagtccaaatacaaacagaaaattttataagaaaattgtttttctaaattttattttgatagtaacacataggttttgtctgtgctagttaaaacatggatgttcggccgggcgtggtggctcatgcttgtaatcccagcactttgggaggccgaggtgggcggatcacctgagctcacgagttcaagaccagcctggccaacatggtgaaaccctgtctctgctaaaaataaaaaattagctgggtgtggtggtgtgtgtcggtagtcccagctactcaagaggctgaggcaggagaatcgcttgaacctcggaggcagaggttgcagtgagccgagatcgcgccactgcactccagcctaggtgacagagtgagactctgtctttaaaaaaaaaaaaaaaaaaaaaaaaaggatgttcatgtctggcaatattgagttccccttcatcagtgctgctcaatacacagatttcgttacaatattcttcctgtgaaatgaatttgtttcagtgcaggcttatctgcgactcctataagagtattagatattaaagactcttgttatagcacaacattaattccaaagtgggttaaaataagttttttttcaagtgccaaatccaatcccaactagaatagattcttaagagtcatagaccaccaccatactgcctgctctctcaccattcataagtaattactctcttctctgcgttcccatcattcattactcgtgcctcaatgatagcaatttgtcatgccctttgcctcgaatcagttgttaatagttgtgtccacctgtctcactgcattgagaacctttgagggcaaggatggcatctttatcttccatctcttcctctgtacctgccaggctgttgaacactttgttccattctttaggctttctgcaatattagagtaagtgaggaggcagctctgctctttagagaggcatataagaagtttgtttaaagagagtttataagaaaactgaggcaatagatgcaaaaagttatgctccaaaagattaacaaaaaaagttgaaattatttcactgaattttcagttctgtgtttcatagctgtcatcttcaggggtaggggggtgtgtcatgacatcaaaaaagtacagtttagagatttgatgctatctattaaattgtttcaaaacgtttcctatctatcaggaaaactttcatctgtaaaagaggaattttgattctaattgaaaaatcacagtcataggggtgggatgctgttaagcttgagattattattttcagtctgtttcaaaacacacattacatgcagatacaaatatagacttagattaagatatagacaaaggacattagaaagaccaagagaaatgttaataaaaagttcatgtctcacaggaaggcagagctgttggaaggttatctagtatagggtcattagaactaccaaggtaaaatgatatcttcacttgcaaagcaaacccaaaagtactgccatcatttgggaagcaatcttgatgaccagaatcaaggtagagaataagtttttattccataattaagttaggcaatagcagtattctgagttcagataatggcactggcatttcaagagaaattggctgagtcatagccctgctcctttactgtaccacattaccattctgttgggaacacctacacttgagctgtacttcccaacctttttcacatcccagttcatgtggaaaatgatggcattcattcagcacacggagtaagtggatgagatctctcctgtcctgttcctgaggcaaccgctcaggaactctggacacctctggtccttccgaatcctcccaaatatggtgcatccggaacccacttgaaacacactgtgtgttaacctgccagttgagaagttctagactggagaattgttttgcatggttaaatagaaaaaaaaaaaacttattttatataaagtacttacctggactttattaattcattaactaactgatatttgtggagcattaattttatgcaagcatactgttgtagatgcttgggatccaacgacgagttttctcttgtcctataggagtttaggagacaaactgtcttaagatcttaacatgttttctctatttatttgcatgtaacttgcagatagcaagcctgaatgtcttctttctatttgaaatacagtgtgtgtctaccgatatacagattccatataatgtgatgtagcagagagagtctccattggacagagaattaggagacctttattgtaactcccaatctgtcactagctgtgttctctatctataccttagtttcttgaatccagcagttggactagaatcatggttttcagatagtacaggttccatcccttcatgcccttcagccagaagtgattttgggctctttaatatgtgctttttttgataaattgtttccctgaagaaaggattatgggtgaatggccaagtaaaagaaggtgaaaattcctgggctagtgtaatctctaaagacttttcaagactgaatgtcttctaactctctctttttttctttttgttcttatctcaacaagacctaaactatctagatcatgagatgtcactccttatctttccaagagtctttcctgtttcacgatattgtttttgtacctaaaaaaggtaaagatgaatataagatcacattttaattttataaaatgaaaatgttgttaacatttccaaatggcagtaatcactttatagtcttctgaatcttcaattacttatgtaaatgaagactgtatatcttgattttaaatactcaaaattgaacacttacatatacctatgtaatatgtaaataatggtaatattcttattctttatcatctcattagtagttcacgtttatgttatctatatgcttcatttatattcatatgattcttcagctcttctgcctgtgagttacaagttatttatacaatatccaaagatagaaaaaaatactaccccattgtatctctgacttaaaaacgttgcatttgggggttttctgtacaaagttgatttgtgatttaattgttagtttcactgagtttttttgtttttagtcacaattgtattgccaacatttcagaaaaatttataagctgtgacttttagcaacagaatctgcttttttctgctactcttacgtcctttcattttaaccatactttcattggagtagcctaaaacatttttttatggaaaaaagtcctcaaacagtgcctgttgcaaaatgaataaaatttggattcttcattcagctttggccaaaggccttccacagctcgttaccaattacttactgtgtgtcatgaactttgtagtccctgggcaaggatgcttactattgtggataccgtagatagagtgtacaataggaataggaagtataagaagtataaggacttcctatactttcccacaggtgttgattgcaaggacacttcttgataactaactgtgtgcaaatctgcttcagaatttgtttcctaggaaacacaacctcagactatggcttcatgggaggagagaggagtgattgcagtttagtcatagaggttgacataaaccactaaatcaagtacattgtgttcagtgtcataggggaagcataatacaatcctatgggagtggaagaagttacttacttttcttggaatacaacagaaaaagatttaggaaagatttttcagaagaggtgacatttgagtttcactttgaagaatgagtaggcattctctaagcaaagtagaatacaagatagtctgggctggtaaaagaatgttgcttattaaagatgtggcagaaagctcagtgtggcagctgggaggaggagtccatgggaccacgatggagctggatcagcagtccagtcacaaagcacgctactgatattgaaggttcataagctggaaggtgctcttttcttttaaatccccagctatcaatgctggcaaccctactagacaaaaaaataaataaataaataaataaaagaaaaaagaaaagaaagaaagaaaaagaaagagagagagagagaaagaaagaaagaaaaagaaaaaagtgatttgaataggcatatttagagacatccctctttcacttatttgcttaaagactttcttttttttcaaaaccgatttatttgtcaaccatttcatgtcatgggttcagatgaatccaatatttgtatgaagcatgcatctttttgtctggctttaaaataatcatctataacacaaaaatatccctctatgatccttacaattttaccattagcaatttctagaattatcagtggaggtgcatagtaaaggtaatatagtccaggtttctagcaaatgaatgcccctttcaaacctctgataaggggttatccagttgtttttgtatatttctgataatgtaaacatgtatctttttctattgttgttaatactgatttatcacagattaatacaattacagagtttgaattaatcatttttcaaatgagaaaactgagatcgaaggaataaattatttacccaatgtcatacagcagattttgacaaagccagaaggataattcatattcttcacctagcaactttcctttttcatggccacataatgaattccttagctccctctctgcattattaggagtcaggtaactggggtaccagtcccacctctgcatctcatgctctccacaactcaggtccagcacatccattctcaaagtctgcctgctcacctgtggaatgagagtctggactaagggaactcccagccccctcctcctgacactgtgagtttttcctttctcgaaggctactggtaggccccactggagactgaaaggggaagattgcagtaaaaggcgcaggctgtcgaaggataacatgtccttctacatcattcactagcctaggatgccagtcaacttcattcttggaacctttattttccaatttgcgggcattttgcaataggctgattttaatcacattttatactttttttcctttgttgcagaaatgtttgtattacctgttctttgaatgcagcatctgtagaccacaaggtctttccataggaactaagcctgttatattgctgctagttttgagtaaatgagctgaatcttgcagccaagcctcagtgcaaacaaaaacattttctggccaaacattttctggttattcaactccattacagggctgactaaaaaaaaaaaaaaaaaagtaaaaacccacagaggagcaaaacacaagtcctgggaagacaatttccagccacattagctcacattgtcagggtagaaaagaaacaggccctcattcttcaaaccatcatcatctccaaactcttaccctgtgctcttctgctattttaatttcaccacttcaaaatgggaaaaacaaataggttaatagtttccatgcgtttagactgtgaccagaggcatacgaagcaatttcagaacctcaggcaaccacagctttgagggaaggatgatgatggatttaccaattcatcttgggatggattccagagttaagggagtcaggccagcactgtgctgccagagtgggatataaacaatattcattcgttcattctttttgtacacattcatctcaggcttatttctatttcagacagtatactgggtgcattataggacagagaaatacattcttaagacatagtctctgcccctaatgaaattaaagtctggtagaggaaatagacataagcacaaataatttaaataaagtgcacactgaaagtattgtaagcaaaccaaataaagtgctcaggaatgggagagaaagaagcaattcattccaagtgggaccattgaggaaggcttcactggggaatggccttctagcctgtaccctgaaaggtcaaaatggcaaattgcgatacatctaggcattagccaaggcacagaagtatgggagtttcacataggtttgaacaagagtgagtggtctgagatgttatgagaaccataaaggggggttggataccatgtaaagaataagctctttttacattgtgaagccattaagattttattatccagaaaggtacttgtatttgatcacatctgtgtttggaaagaaaactggaagtcattggagacaggggcaaggggagtattataagaagagagatacaaagaagccaaatcataggtcattgctataggttagacataaggacactagttacctacgtacagacacttcttgcttcatagccatttatatatcctcatggtaaaagagcagctacccctgaatttccacatcccattcagttctgcatctttctaataagatccacatcccgggtttattcctgattgtaaactcaatgagttaatccagatacctcagttgtaatatagcattttacatgtgaaacgtggttgtttgctaagagcatggaattaaagggcaggatggaaagttaacagccgatctttctgagacctgactcactaactggtgtctcttttaaggggtgctatatatttttaaagcttagaatatttttaaggccagataaatgtgtttcttaattcactttttcaaaccagctcccttgtacattcaacatttctgtcaagagtttgcaaactctaaacttggagatggtgtgtaaatcaaagctttaaatgatcagaagcctaattgattatgctgagttctgatttgggttctgcatttagcatgctctgtctcagtcatctgacaggctattctgtaaaaagtaggggtcttagtgatcgcactatggtctaagtggtcacactatgtctttgataatgaatcaagttttagaagtaatagtgaagcattcctcaatcggtgaaccagagtggtatagttcaagggtcaacaaactatgcccatgggtcaaatccagcccattgtctgttttttttttgtaaataaagtattactggaacacaagcatgcccatatgcttgcatgctatgactgctttccagctataatagcaaagttgacttgttacaacaaagccagaaatatttactatatgggactttagagaaaagtttgccatcacccatgctgtaggaaacaagggaaggaacaaggatagcagtcagaaaacacatgtcctcagttctggacttgccacctactacctgagtaatactagaaaagccacttgacccatctaattgtgtttccttctctctataacacacttctttggccagtttgttagttaattggccgataacacttgttttctatttgtaaggactgtattaaagctgtagatgtggtttgtaaatggtgataaatgccttccttagagtggtgtgataaggacctgagacaatctgttttgtaaagatgcctgtcatgcagtatggacccccttctgtcccagtctgacgtggtttctgtttccttccccagaatactctggagcagtgcaatgtgtgttccaagcccatcatggagcggattctccgagccaccgggaaggcctatcatcctcactgtttcacctgcgtgatgtgccaccgcagcctggatgggatcccattcactgtggatgctggcgggctcattcactgcattgaggacttccacaagtaggcaacctactctctcgtcaccaccctgccagtccttttggagtctgttcttactgcttggcatctgggcatacattcttctctctcagaactacagaatttcaggatttagtgaggcttttaaaagagcttattgatcccctcctccaatgcaagaattaatatcagacaatccatgcagtcatccagcctggtctctgtgtcaaggcttccccagagcttgtccattgcatctctgggtaattctaatgacgaaaaagctggctcagctatagtgtgtatgtgttagaaagaaacaggatcctggcctaaatatgaacaaaatttgtgacatttggcattgttcaacttatttgagctcttcagtttggtctttagatcaaaccctctctaaagctctctcagctgtgatgacccagagttttctcaagagctaatctgtgcatccctgccactctactgatagggagttatggtggacagacacagagaaccattcagtttcttttactaatgcaagcctctcacatattcaaaggcagtttcatgccattgtcaacatattgatgccattccctagccttttcttccacccaagtcttctctttctcaagttattttttaatagaattaatgaatgcaaattgtgtgttcttttgaggaggattaaaaaatggtgcctcaagatcaaggccagttattcatgggcccaaaataatctgtccccactacttcatttatctcctttttaggtccttctttcctgtattacagctggggtctttatgaaaattaagaaatttaaacagttttgtattgtgcttatttttatttgaccagtttgttacttaattattcaataacattcattttatatatatgtttatatatatacataataatatgtaaatatatttttatatattttatatataaatatatttatttatatacatgtatattattattgttattattttttagacaaagtctcactctgctgcccaggctggagtgcagtagtgcaatctcagctcactgcaacctctgcctcctgactcaagcaattctcctacttcagcctcccaaggagctgagactacaggcatgcaccaccatgcccagctaatgtttgtatttttagtagagatggggtttcgccatgttggccaggctggtctcaaactcctgtcctcaagtgacccacctgcctcagcctcccaaagagctggtattacaggcatgaaccactgtgcccagccaacgtttggtttatatttttaagaactgtactaaacctatagatatgatctgtaaatggtggactcaggtttctgtatgtgtttgctgggcagtggctttgaagacagcctttgaggctatcaaagagatgaagcttgtattgctcaccaggttgggtatccattctatggcttccaagtgtgaagtcttctgggttaattctcaccactgtgttgattgtcaacagccaggaagcacttaccccaaggagtttggagatctgagactcatattttaagaatgaatgtcctaaccactttccaagtagcaaagaaagtgaaaacctcaccaaaagacgtgaggttgaatgaattaaaaaatcccagaggcggaaatttgcaacctgaattagacaaggaaggactcacttttaaagggcagtcacagcataaattgtgcttcacattattgatatttttagcttgtaattacacattgaaaaatccctgcgtcttaagggaagtgaaaagatctcaatggggagtatgttctgttactgtttctctcctttcttagacttatcctaatccaagaaagactgatacttataatcggagcacacatgtttctgtggctagaaaagactgatacattacacccctcaattaaaacaggaaatcaattttgacaaatgccaatttatatctatgccatttatctttcatgtctaggggtagggagcataattagagactggtgactgatgacatcagtttgtgggtctgaaagctcccaaaaagcagacttgagcaactaaaagggggaaaaaaattaaaacccccagataaccttccccactcgttcaatgcatgttaaaacataaattaaaaatgataataatgttgtcttcatgattggcaggtatgtagggagagaagttttttgatcctttctccatttcctaaaggaaaataagaaactgttttatggaactcttatttataagccttaaaattactagaatacaaagcagctaaaagtccagcataggctaatcactgaaagaccaaagagagggcagacaaagggatattcctcctccagacagtttttggggccttgtttgtggtccttttgaatgggtctccttttgtggacctttagaaaatgcatgttaattcagttcaactcacatttataaagaaccctctgtgtgccaattgttgcattaaatgctgaaggagagagatacaaggagagaaattgtgcagatatatatagagaagtcactgtcagcaaggagcttgccaggaggagggcagagaaagtgtgcagacagggagaaagggctgaactccatgagacaggcacaggtaagggcttgcactgtcaaagtcagatcacctggctctgtggtcagaataggctttgtggacggagaatgtcaagagtgttttaagtgggaaacaaggagattcctggcagagggaacaactcaggcaaaaagcagaggcacagagttagtaaagggttctctgtgttcagggagatttgctttgctgtaactagagcagcctgggagtagagattaccttgagatacaggagacccataagaagggatttacctcacctgcttagcctgccttttatttatttatttgtttattttatttatttattttgagatggagtctcactcttgtcacccaggctggaatgcagtggcacaatctcagctcactgcaacctctgcctcccatgttcaagcaattctcctgcctcagcctcccaagtagcttggattacgggcacccaccaccatgcctggctaatttttatatttttagtacagacaaggtttcaccatgttggccaggctggtcttgaactcttgacctcaggtgatccacccgcctaggcctcccaaagtgctgggattacaggcgtgagccactgcacccagccttagtctgcgttttaaaccagtgcttcccaaactttaatgtgcctgtaatccacagagggatcttgttaaactttggattttaattcaggtctggagtggggcctaagattctggatttctgtcaagctcccaggtgcccatggcctgcactttgtgtaacaaggttctggaatactgtttttgagaacttgttaatggaccatcctctacataaacacctttggtcaatgttgactcatatcctccagcctactggacatgcaatctttcacatatgtcatttcagatgaccgctgcaaccactgcagtcttctggaagactatctcccctaccctaacacacacgtacacattttctcatttcacctaaatggttatctttaaaggcccaactcaattaccgtttcctggaagaaaacttctctgatctccacccctcccttttctcaagtttagatttacatcttaatctctgtgttttatagagttttataagtctgctgtagatagcacttaccacagtctgactggtatagaaatatacatatgtgtgtgtgtgtatatacatatgtgtgtttgtgtatatatatatataactttacaataatcatcttgtatcatttttgcaataaggatttgtatatataaattaatagaaatactgcagaaatatatagaactccttctcaggtctgtactggaagtcgttgcttattcttgtattcccagtgagaaaacccagaaaagcagatttctttaactgactctttgcatgtatggaggctttattcccctatctgtgctttcttatcaggaatattaccctcattcatttatgtatttaatcagcatccattagttgattgccagaaatgtgccggaatacaagatgaccaagatcatccctctctgagccttcgctctgttggctgtaaagtagaaatgataaaaatacttcctcataatgttgctgtcagtagaaaattacgtcaagtgtgtacagcacttaacagggcttggcacataataagcactcaataaatggtagctttaatcatcgaaagttgttttcatcaaatttacttttacgattattgtccactcagtgagctaagccttgaaatagaccacctgggattgtgagccctcctcgaattgctatcggaggaacactgtggggactatgagaaccacctcctgcctcttcgctttggtttttctcattatggaaatgaggccaattggtaggaaagaatcattactcagcaagaatacagtttatgtcttcccaaagaggaagaaccttgagattgaacataaagcccaactaatatctttttttatacagaaatatggcagattcatttcattagatacagcccaactttttttttctgcaccagtcacagtggttgttcctggagactcagagatggagcaaagtcctatcttgtggaaacttagagtttagtgccccataaatatatccaaataattactaccaaaatggataaattcaatgacagaattcttatcttagaggagtaaataattctatttggggaaattggagaaggcttatggatacactgaaaaggaaaacatacttctgctcccacagagtttggggaaaggaaattttgcagttgatcccagaagcctacttatttcaccactgatgacccagatttaaaaataatctggtagtccaaagcaattttttgccactgaatataaacttcttgcataaaataccaattataacaactctgattactgctgcagtggtaccatgatccttctaacttttctttcacagcaatcaattgatctgctgcttaattcatatttatttagattgcagccatacagatgctttttgggtgctgccaggaaaattaattacctacatatagaatataatgtatgtagaaatgctttgacaaccgtaacgtgctctgcaaagagttagattattatcattatttctttttaagtctcactacaaatagataaatttttaacatcgtttatcttaaaaccagtaccatgaaaaaactgagtcacagtctgtttttctttttttaaatctcttcagttcttatccaggtccatttcaaataatatgtcatttcataccttcacaaataccatctccaatttccagaagatacagagagatacatggcttatattttcagccaattaacctgtcatagaaaaaaaattgttaggtaccattgatcatattgagaaatactaagaaattaataagtattaaaagtatttaccagcagcctcaaaaacatatgcatatgcatatttatatgtatatgtatgtgtatgtgtgttagtatacactcaccctttaacagtgctaaaatcctttaaagaataaagaatttgatagctctttaacttttaatttttaagcaaaagtttaacacaataaaaaatgtaggaaatgcagacttggccatttttaagttttgtgtaatgtatatttaaacgcactaacctctgcccttttgaaaagctatgtatttgagtcttcttatgtcagttcctagaagtcaaggcaaatttccaagaaagaagctctaaaaggtgggaacaaggcaaagataccaacctcagactatttttctaggacctaaggagtgcatacaaaagtctagaaacaaaagtcagaaacaaataggggctggacaggactttgttctctcctccagttagcctatcccaagcacagggtttgcattcagaatctatctaaagatgaatttcataccgcgcaccatgcaggaaagagatgctagatgctcttcatgcccaagcaattcacacgctcactctctcacctcgccaaatatcacaatatttaccaccgattgatggaagaacctccacagtccctgagtctaactccctcaccttacggatgaggaagcaggtataccgactctcagtttccaccttttccttttacctctgcgtcccacctcagtgtcgacgcgcagtatctaaccagaactctctcttcactttcaggaaatttgccccgcgatgttctgtgtgcaaggagcctattatgccagccccgggccaggaggagactgtccgtattgtggctttggatcgagatttccatgttcactgctaccgatgcgaggtctggttgacagccctgccctgccagtctgtggcaggcgttgaaaggctcgttcgagctaggtttacatagatgtagcaattactaaatctcagaacggccttagtgcctgtactcataggacttgggttttagatttgacactagtattccgagcacatgctgttgaataagtcactgtacctctctcagtctgcttgctcaccggaagaaaggactcaagtccttaactcctccaaatatggctgtgagagtgaaatacaaaattgtatattaaaggacattgtaaattgtgaaatactaaattagtgagaaatggtgttattgaacatttaactttggctctgaggctttggttagaacttcttgttcagagtcatggagatttatttatttgttagcatgcactactaattgctcagtttcctgaacgcctctagagctgcagtatatctgcatgttcttttcagtaaagccaaacttcccgcagagtataaccattgctgctattgtgttctggataccccgttaacttaaatttcattctatgtcaaatgaagacatgaactccattgacctccttgccaccatggtagatagcagaggcgaggttcatagctgttgtggcctttgagagtttatactaaagttagcaaacacacacctcttgatgaagtactatgtatttattttccaaagaaacttctattttctccaaagacaaaggccagcatttaactgttatataacacttttcaaaatggaccctaagaggagctgtcagcggtagtatattcctttacagttatgcagttctttgcatttttttttttgatccattatcttctttgatcctcttaacagcttggtaaggtagaaaaggcagaagttattttcagagtggcagtcggcctgtgtgcattgaggcagactgtagcaaaactgtgggtggtgctcaggaggcctgtcccctggactagcaatctttgctctccacaatgctgtctcctttagaaagtacagcaaaccactactccccacaaactttaggattttattttcttactgcagttgaagtaaatacaccgaacccactggtggcccttctgcttggcagacatcagtctacctttgctctaggccagaaatggccaaaacattccattcctgtacctgtgcatgcattttgagagatccttaaactaatggtaaagggtaaaaaatgcatcggtggttagggacattcttattttctcttgttgagtgggggcagcaaacttctacatgggagccaagatgggtggcctcttctcttcttatacctgtatttcatatcaagtgagcttaggaggattatatttatgtccatttatatttatgtccccaatctctaattcaattacattcaagatatactatgttatatattgggagaaaggatacaggggattagcagaatgtaaagcaggaaggatagtaagtggccacattatggaggccttgaatagaaagctcaatcatgatgttctccacatgtgtacttaacgtttttacttatgtcgtttccatctgtctttactgttctaggattgcggtggtctcctgtctgaaggagataaccaaggctgctaccccttggatgggcacatcctctgcaagacctgcaactctgcccgcatcagggtgttgaccgccaaggcgagcactgacctttagattcagtcacctgttcagccggcactgagaagaacgaacacaagaaaaagataagaaatactagagtaaaggccatcaaactacgcgatagtctctgttcttcatctgctattaaccttgccttagaaacacataaattatgagattttttttaaaagttgttaccaaatacacatttcacattgaatcatgtaggatcttgatgggcctttgttcccaaggacttccacatttttgcacagattatgctccatcccattcacttctgcattcctgtaacttttaatccctatgtttgtctcacttttcatctggttgaatggcttttcttagtgtggtatttgctgtcacatagtttttcctgggtgagtctgccaactcacaggtgcttttaggcttgaaatctccatcctatcatttccgttttgcctgtgactgtaaagagtagccattcttttcccatgtattgaagaggatattcttctcttgctttatactactcacgtccttggggagggaaatgcacaatttttttttgttaggctgtaaagaatttaagctgtaaattacataagttagaacaagcccaaatttaatttgcaaccatcagaattcagaatctatagtgaccagtgatcaaggctaattggaaaagagttatcggcccatagctaataagtagtgacagacaaccaagcttcaatatttttctaaagaaattacaggtgggatatgctagaaaaggcattttggggttatgtttaaaaaaacattattgtcccacaatattaccttaagatttttcttttccgcactacctgaacattgtaatacagacaaacttgatttcttctagaagataacattttcaatactgtcccacttctcatcttaaaaatattgtcatgtttattctaatatccaacacaactatcaaaattgcctttttctctagaggatgaaggctgtgaaaaaaccgttcaaattctcttctttttcttttttattaccaggtccattttgcctgacaattgcaaatcagagcatacaaaataaaactgtgcagttttgtttggtttactttcaaaagagtagaaagcttgaaaagattctgaaaccacagtttcattattctcataatccttctgcaactgaaattacatattgcaggagacattttcatatcatcaatgtgacatttacaccacactttcaaagacaatcactgaaacaaaaattgtctttatgagctaaaaatatgcagaatctctgcctagaatctttattcaaacttttattagccagtgaaacacttgcttgccaactgccaagccatacttattaagttcgaacatgtttcacttaaggagagacacctagcttagtcatggcaagttgccattttgtaaactaaggattttggactgagatttcttaaatctttcttcaaatctcccacaagtatatacttttaaattatggagtattttaagtctacaaaaaggtataaataataatataatgaattcctatatacctaatacccagtttaagacaccaaatataacaagtataattacatcctccaatgtaccgtttccttattccacagatatctttttcattattgtgaagtgatgttcagatttctagttttttttctagtttttaattttaacatcagaactgaaataaaaaattatggatacgtgttttgaattgcaaactattcctcaggaattccaattaaatttattttacttgaataggaatgatcataaaagtgattctttttttgtgactagaaattcttaagccgatggtcactatagctcatccttaatgtatggctcatttgcttttgtcactaaacggttttgtgttagaaccaccaaaattatagcttttaagagcttcctttgaccactgtctttttcttaccctacttctcttatctttgatcgtatatttctcataatgtgaaatatgatgagattcacttaggggcagcatgttagttttgggaggcaatgtcaactgtgtctctgaattcctgtcttccaaattgaagccagaccatgctgatgacctcaagtagcactgactatttgacaatagggctgataatgtaatcggcttgaattttgacttagtaactttttatgtaatactttcggagaaattctctttaggacaaagcagagagtccaatttattgagggatagattgtatctcttaaagtggtcatattattattaattttgccaaaagaagaagaatttattgaatatttatactataaaatgcagtaacattctacttgcttattacatttaaatccttgtgtaactgaatgtttacatgtcaagaggaaaagctgtaagaaaatgctgtcacagacccatccctgtggcatcgtcagcagaatactgcttgcttacaatctttattatgcattcttataacataacctcagagtatctttaccaaaggtttttaaagtaaatctctttttaagatagacttattcttttataataatgaatgtgcactcatacatatgtagaaacatttagatttagagttttttttttctttcacaaggtataataaggaaaggatcctacaatattttattctagggtttcttaaatatatgatttatattactgtcttttctattaatcatttgatttaaacaatgccaagtcactcttttttagttgcatgaaattttgcctgcaacagagagaaaaagattgtattactttaatgattataatcatactgtctgctgatataatatcataattgttgtggtttaaatacataaatagtagaaaaatcagagtctataacagaaagtttgtaaaaatatactgattttgaaaagtatcaggaatataaatatttggtaattctgtgtaacaagagagacatggaaaaggaaaaaaatccactatatcatgggctctgcagaacatatcaaaataggatttcttaaatttttcaacccccagaccatactgactcaacatggagtctcactggccaagaaaattgcctttaaaactcgaaaataaggccaggtgtggtgactcacacttgtaatcccagcaatttgggaggctgagacaggaggattgcctgaggccaggagtttgacaccagcctgggcaacatagtgagaccttgtctctacaaaaaataaaataaaataaaaaccaaattagccagacatggtggcatgcgcttgtttaaaaaaacaaataaataaataatcgactcaaaaataagtcatgtgtcccagcataaggcatcaggttgttagatgctggcatctctgcagctcaaagatgtgggttctttttcttgtcattaacacattgttatttctgtaggagcaacttctctgatcaaaattacttttctgggtatgtgctgattaagggggtggacttatcaacactataattgttccctatgaaagattccacagagatgtttatggtgaggtttaaaggatatgaaactctacatttaaacaagtattttatatttgggtacagaggaagaaagagagggctttttccatggggctatagtagagagttagtggaatatagacaggactctgaaaacacaacttccagccatttttttagttagtaaaaatcctattaatgtgaaccagccaggaataacagtgttatttctattggatatggtttgggcttctcttgtcaaatctgtgtcggctgccccctgatccttccattatcaagttttgaagggtgttggggaaattatggcagctgctagggagatcagggaaacactgatgtaacctcaaagcctctcaccattcctcttggcttggaaaggctttattttttcatatacatttctagaaatattgctattctaccttagtatttcacatttgtagttcaaacaagcgattgtccatctgttgcctagagctatagtacatgtgtgttatgaatgaaatatgacagcatgttccatacccctgctttagccatctgtgggaaaccagcaaactgaaaaagacacctctgcaaaatgtgcctcaagtccatttcttgggatcgctcgtttggtgcactctcgtgggagacaatcagagaacaacatatacttgtgccttattttcaaagaatctatttacactactatgaatattccactgaagagtcaatgatgtaaatgataaccaccaaatctcaaaaatatactcaccaaaaagtaaaaaagtaaaaaaaaaaaaaaaagaaagaaagaaaagaaagagagagaagtcaacttttcatcttaatatattctagtagtatttattttttccttgtcttggaagtatctcataggtctttaaatgagtaaaacatttttatgccagaaggtgatataatggatgttagtgttttttatttgattttacagtagttttagtcagataatgaggacagagacttcaacttgattctttaccaccattcagcatattttttaattgtcttcattgtatttgcttaatagtggtccagacaagttcaaaacttgttctcagtgaggcattaatatggtgcaaccatgaatatttcaggccaagttattcacttgacagataactagaatgaaacttttctcatgaggctgttgtttggttagcatagccttatttcaaaccttaaaaagttacctgactgaagctactatgacttggtaaggattcttcctctcttgctttcttcctcccttcctttcttcctcttccttcctcctcttcttattttctttcctactttccatcctacctattagtgttgctgtacttggattttttgtaaattaaatcaatgcattatgattttagggaattatgattatattcataaggggaaggctaccagaaaatatatgtggcatccataaaatcttcttttataggggcatattttttaggttgtatttattcgtaaagtgaaatgagataatagagtctttctgtttcatgttaatgaattttcatcagggactgaggtcatagattcttggaaaattcatttgtgactgatctagttttctcagctgtatgcaaagtaatctttcaaagactaggttaagattttttttttaagtctgaagcaatgtaaccccaaaaaattataattttaatgatggcattttattttattccattgcagcttgataactttccttatagcaaaggaataactattgtattttcagaattttaacacagattaacacttagcctgtaagactaataatatattgtaatagttgatactaaaatatttttcagcaggttggacagcaccagtttttcttagatcacagactacaggcagaatttcccttcaatccagaaaaaaggacactaatttccttttctatttaattttcctggcccttgtgcaaaaaattgtggactctatcttagttacaacatgcatgtcccttattttgtggagagctgtgtgaaagatgcgttttttttctttttttcttttttttttttttgagacggagtctggctctgtcacccaggctggagtgcaatggcacgatctcctctcactgcaagctccgcctcccaggttcacgccattctcctgtctcagcctcccgagtagctgggactacaggcgcctgccaccacgcccggctaatttttttgtatttttagtagagatggagtttcacagtgttagccaggatggcctcgatctcctgacctcgtgatccacccgcctcggcctcccaaagtgctgggattacaggcgtgagccaccgtgccccgcgtgtttttttctttagctgattgacaggtccccttcaaagttacaaaaaaaagtgctaatttttgctgttaaattctggttgttatttaattgacagaagtctcttgatgcacgaataaatatctctacatctagcctttgttaaaaataaaaattaatattctacaaacacctacatatactagagaggggtgaaacactgcagctaattcctttataatactttcagatgattgcattaagcctttcatgttatgtggcattgttaatttttcctagatacccatccacttaagggccagagaaatccttattcatttaactctggtgggcatttatgtaacatacccaaataaaaacgttattaaacagccacaatcgcattcagtcaacttggcactgaatgtagcttctaaaatcagttctctaccctacgaatggaatgttctaccaagaaagagaagcatcaccatgtcatcttgtgttctacaccactatagagagttacagttgcccccaaacacgaatgctattcccaaataaaatagaatcatgctttgggaggccaaggcgggccgatcacgaggtcaggagatcgagaccatcctggctaacacggtgaaaccccgtctctactaaaaaaaaaaaaaaatacaaaaaattagcctggctcagtggcgggcgcctgtagtcccagctactcaggaggctgaggcaggagaatggcgtgaacccgggaagcggagctttcagtgagccgagatagcgccactgcagtccggcctgggcgaaagagcgagactccgtctcaaaaaaaaaaaaaaaaaaataggatcatggcccttttaaagatctgaatcttctctgttattttcctgatgaatcaccatcccatatcttcttagtcctggccagtatgtagttgcgctcacatacgtctattctagctctgtagctccacaaaacaagtcttaagtccaaatctttgcctcttcatgtctgatatcaccaactcattcagcttttcttcacttattgacatagtgtcatgtcctatcactctctgctgcttctttaaacagtggacacaaacatattttctaattttcagtgtactcagtgaaacttggcagttcaccatgagtcaggctaggttgaaaggctttctttagggttgaaagtaaacgaaattggaatcacccaaagagaatttccccaaaaaacctcagacccagaagtgtaaaagctacagaaggatagaactcccatgtctacagacagttctgttactttttgttctgtactattttggatgttgccaaaatcaaattcatcctgaaaacaggaagcaagctaatgcatatgccatccatgagattcccacttctgggtcagttcatattccattcaaccttttccttttatccttgtcttcttcagaataagacatttttcctccatattttcatattaaatattaacactttataggttctactttaatatatggacactttacaggttatacataaatatttgctggttgattgatttcgagattcattcattctgtgctcaaatatttgtacctagagacgttacatgttagaaaaagtgagcagcttctttctctaatcatttaggagtccatatttttcttttctttttgttctcccaacatccttatctcttactcagctcttcaatttataattaccaaataatcactgttagagaatcagcccctaagtaactttgattctggccaactgtaataagatccaaccacttaaatctgtacttactcaataggaaggaatgtgacatcaggaagagtcattccagtgacattagtaagactttatggagtacataaaatttgataagaaatcttgagctgattctttgacttgatttagaagttgagaaaagagtatttaaggcacaacagggaaacatgggctatactcagagaagaccctctgcattggccaaaatatcatggattctggaaattccttcttaacagaaaaaaaaggcttccaaataatcaggctgaatgggaagaaaaaggcatagaggaagcctgaggaagtatttacttgcttttcccatctctttataattggaagagaagatgatctgccaaaatataacccagcatgcacagtatggacaggaagcagccctccatgaactttattatcacagaatatgagcattcttattgatccacagctacatcttctattcttgcagcaagggtacatgtcctttgaccctccacaaaagaacaagcaggacatctctattttcctattgagtctgagtccattattagaaaggacttcccagccatcttttctacttggtattaaaattcccttacagattcattgctaagtgccaattctttttttttcttttgagacggagtcttgctctgtcgcccaggctggagtgcagtggcgcaatctcggctcactgcaagctccgcttctcgggttcacgccattctcctgcctcagcctcccgagtagctgggactacagacgcccgccaccgcgcccagctaattttttttgtacttttagtagagacggggtttcaccgtggtctcgatctcctgacctcgtgatccgcccgcctcggcctcccaaagtgccaattctgactctacttaaacatcacctgtatcagggagctcattattccttgaggtcttacatttctttcagcacattttgttccaagctacacgactttaaaacagagccagcctttggggcatatgttctctttggtgccacacaaaacctgtagtacatgatacagtgttgcttcccccctccttttccttccatatatatttgttttgttttgggcattgcattacttttttgaatttttaagaatctctaaaattagtctgaaggatgttctgagggccagacattagaatttgtgagtttttttgttgctggttgtactttcctatttagaagacagaccgttctgacagttgttgtgtagcttcatgccttccccagtaactaacccatgaacagtacaccccttttatctgacttgttgataatgaccttaaaaatgttaggaaatgggccgggcgcggtggctcgtgcctgtaatccagcactttgggaggccgaggcgagcggatcatgaggtcaagagatcgagaccatcctggtcaacatggtgaaaccccgactctactaaaaaaaatacaaaaattagccgggcgtgttggcgggcgcctgtagtcccaactacttgggaggctgaggcaggagaatcacctgaacccaggaggcagaggttgcagtgagcagagattgcgccactgcactccagcctgggcgacagaacgagactccgtctcaaaaaaaaaaaaaaaaaaaaaaggttgggaaatattggtgtataatccccatgtctaacaaggaagaagtcaaaagcaaaagatagtggtattgccgaaaactcattatttctagttagttcatctgtggaaaaggatatcgttcttgaggagaggggttctattatgctatagttttctatggaaatgtacaaatgctttcctcattgctctggatgactatttagtttaaataatatacctttgtcatggggaagaccatgattgtggcttcttctaccccaactttgaatgagagagcactgtaagcagaaactgccatcagtctcctgggcaggacctggaggtaactttctgagctgtaaaatagtaattcctaagagagcttacaaactgcttccacacagaaaatagcgcagggaggacagttattagtacccctattctagaagagaaagctgaggctcaagccattaagtgacttgccaaaagctgtgacatagctgggaagtggcagatttggggatataaccaggtcttgcaagtccagtgctgtctccaagtagccacgctcacagctgagaacaccttagaggacaatatcgacttcttacagactaccaagcccccagtcatccagggaaattcagagaccaattgactgccaggtggcaaatccacatgtgtactgcggtctttagagatcatttagagcttgcacacatctgtgtcttcttgtgggaaacctctaggtattctgtctgatcagcactgtgaggaagttggtgggaaaaggccactgataagaacaaacaatgggcagaaggaagcacattgcaataaatttccccagagagagttcctttacattccattcaccaaaaacctctctggaactgtcaggttcagaatatcaaccaagaccatatcatttagaattcattggcatgtagaggtgactcgattcctaaaagaagcctctctcccatgaaccacgatgtacgttccacagaggcagaaaccgccgtaggttagcaatgcattttagtctttctctccattcacatttactgagagcacaccacgtgcatgttgctgcaacaggcatttccgatagagccgatccatgagctaacaatgtctgaaaacaaatgttatggaactgttggcatttctgagatttggcctttgccatttgatagactttgcttcccaggatgctgtcattttgtgattttttataattacaaggaatttggtaccatgttgttttcaaaaaacctcctagaaagtctccatgtatgctctagaagttgctctacataacagttcagcaagcaagtgttccttctcttgagctgcgtccctcaggaagctgtacctttagggtgtgctttccactttttatttcctctcatttcactcctttcgttgtttgctatatcctaaaatatgtgaagtgagagaaaaaatatcatttcttctcattaaatctcctgcattaaatctaagaatcctttaaaataatcacacctgataagtgttttatgcatttccctccctggagtgttatcatccatcaagccagtatcatcatccacctgcttattccttgggactaatgagagccaagttaaatagcaaatgacttctcaccccttcctagtcctcatgcctgaggaataagggcgacattaatgggagcgggagagtggtggctttggttgagatgcacgttcacagactagaaaagtgcctcacctccatggtgtatatgtgccaccttttcttaatccagtctatcattgttggacatttgggttggttccaagtctttgctattgtgaatagtgccgcaataaacataagtgtgcatgtgtctttatagcagcatgatttataatcctttgggtatatacccagtaatgggatggctgggtcaaatggtatttctagttctagatccctgaggaatctccacactgacttccacaatggttgaactagttcacagtcccaccaacagtgtaaaagtgttcttatttctccacatcctctccagcacctgttgtttcctgactttttaatgattgccattctaactggtgtgagatggtatctcatagtggttttgatttgcatttctctgatggccagtgatggtgagcattttttcatgtgtttcttggctgcataaatgtcttcttttgagaagtgtctgttcaatactatgcagccataaaaaatgatgagttcatgtcctttgtagggacatggatgaaattggaaatcatcattctcagtaaactatctcaaggacaaaaaaccaaacaccacatgttctcactcacaggtgggaattgaacaatgagaacacatggacacaggaaggggaacatcacactctggggactgttgtggggtggagggaggagggagggatagcattaggagatatacctaatgctaaatgacgagttaatgggtgcagcacaccagcatggcacatgtatacatatgtaactaacctgcacattgtgcacatgtaccctaaaacttaaagtataataataatgaaataaaattaaaaaaaaaaaagaaaagtgcctcacctccctgtgaggcttgatgaatattgtggccagtgagtggaaaatgattcttgtcgaatagacagagtattcccaccccaggaatggattaatagaagacacaatttgagcacttctcagaattatctagtatgcctgagtagagactcacatgggtggaatctgtgttgtctcatcagagggaataaaaagacaatgaggtggtaaatgtgaaaaaagcagccttttagaaaaacattattttcaaatacctttataaatcatctaatttatcttcacataatataaagaaaaaactaataaaaattttcgtatttcactttacataatatgttctcccatatttagggatcatacaattgtattgtcttcaaaacacacacacacacacatacacacacacacacacacacacacacaccccttccaagaaagctgatccttcagaaaataaatcttatttttaagcacttgggttttcaggccagaaaattaataaatcctaaacctgacccatttttgtaacagctaaaaaggagaagaaaaagctagttaaattttgtgtggatccatttatctcttaaaatatgccaaagcaatttgaggtgggggtggaaacaggtatttatctctcatgcgtgattctctctttatatttctatctgttgggaaaagggtaaagaactattcttggtcattattgatgtattgtgttgccactttgtatggtgcctgctgtgctttatcccgaggcatagcagtaatcgttactatcttgactctttccttcatcacaagagagtaaatatgaagtctgaatgtcgttcctcacccccaaattgtttaactctgcttccaaactagtttaagaaatgcaaaatgggaagagctagcttttcttagatacatttcttccttttttattctttcttgggagacgttaagtataaaagggaaaaagtcagttccttcttctctctctttctctttgggtgacagcaatgctcacttagtaattataaactggaaataggagagtagcttgagcaggttatgatatatctgcccaatgtgtttcattccttcaaacataaactttgagagtaaaagagatttttataatttaaatgccaacgacaggaatggcctcatgttttaactttcaaataataaatggggagttggtatttgggcagagtttgcattttactaatcctatatactttgagcttagtttttagaattgtgtcaaatacatcaacatatcaggattatagtgccaaaaatagttaaagtgccttggtcctccctctgtaggcagcaaattgaaactaacatgggaccatgccatccttctagcataatggagaagtctgaactgaggagtatctttgatgaaagacatttaggaccctagaaactaaatcttgtcaccaagactttatagtaaagtagtagcaaaattatttttaaaagactttcttccttttactacccatttcctctcttgggaaagctgatgagcaaattatccaagactcatttctttattaggcaaagtcagaatatttcccctctgaaaatctgaattatgccctcattctttttcaagaaatatctcaaagagcaaatagaattaaacatgacacttgattgtctgattatttggcatgtataaaattatcatgtggcttaatgtgccttaagtgaaaatttaaacttagacctgaaacctttacagttggatgtagcgttgagcttttgcatgttttctgtataataaaccacttttgttttgtttgttttgtcttttaacctacacctttatcattactctaacagatttagggcttctctttctctacagctaagtaagggaatatgtgcaattatgagacatacaaaaaaggaaagggaaaggactttctaagtagcaaatctgtgccatgaagtagatgtggcgtgaagatacagagcctgaggatagtaattttccctgagccacgcacacaggcttttatttcatgccttttctctttctgtgccgtcacctttgagaaaaacgattgcaccttctccaagtctgcctttttaacagctacagttaagttggcaagacttccccagctctgaatatagccatttgccgactccggcctctttgcgagactgactcaaatctgtgatcttctgttcagcatacacatcagcaaagtgagaagatgagcactaaatataggctctattaactttacttttagatttactgccttcaaaaagtgcctattctgagcaacataaacgttattccttacatatgtatgtacacacggtacccagagtcgtactgtgcagccttcaaaaacataccatcagaaagagtaggtgctgagataaggaaactttgccaaatgaaagaaagtca

SEQ ID NO: 27 - DNA, 6379 bp, Homo sapiens
gtcacttttatttgggggtgtggacagctgctttcccaggggagtacttcttacagtgggatttcaagacaagatcggcctgaagaaaaattatatttgtatattttttaaaaagtaggtgggaactttgaggctcagagacagagcagaagacagaacctggtcttctgattccctgtgttctgcttttttcattgttccactggacgctcatcagagggaagatctttttcctcaattgattccaacaatgtctcacccatcttggctgccacccaaaagcactggtgagcccctcggccatgtgcctgcacggatggagaccacccattcctttgggaaccccagcatttcagtgtctacacaacagccacccaaaaagtttgccccggtagttgctccaaaacctaagtacaacccatacaaacaacctggaggtgagggtgattttcttccacccccacctccacctctagatgattccagtgcccttccatctatctctggaaactttcctcctccaccacctcttgatgaagaggctttcaaagtacaggggaatcccggaggcaagacacttgaggagaggcgctccagcctggacgctgagattgactccttgaccagcatcttggctgaccttgagtgcagctccccctataagcctcggcctccacagagctccactggttcaacagcctctcctccagtttcgaccccagtcacaggacacaagagaatggtcatcccgaaccaaccccctctaacagcaaccaagaagtctacattgaaaccacagcctgcaccccaggctggacccatccctgtggctccaatcggaacactcaaaccccagcctcagccagtcccagcctcctacaccacggcctccacttcttcaaggcctacctttaatgtgcaggtgaagtcagcccagcccagccctcattatatggctgccccttcatcaggacaaatttatggctcagggccccagggctataacactcagccagttcctgtctctgggcagtgtccacctccttcaacacggggaggcatggattatgcctacattccaccaccaggacttcagccggagcctgggtatgggtatgcccccaaccagggacgctattatgaaggctactatgcagcagggccaggctatgggggcagaaatgactctgatcctacctatggtcaacaaggtcacccaaatacctggaaacgggaaccagggtacactcctcctggagcagggaaccagaaccctcctgggatgtatccagtcactggtcccaagaagacctatatcacagatcctgtttcagccccctgtgcgccaccattgcagccaaagggtggccattcagggcaactggggccttcgtcagttgccccttcattccgcccagaggatgagcttgagcacctgaccaaaaagatgctgtatgacatggaaaatccacctgctgacgaatactttggccgctgtgctcgctgtggagaaaacgtagttggggaaggtacaggatgcactgccatggatcaggtcttccacgtggattgttttacctgcatcatctgcaacaacaagctccgagggcagccattctatgctgtggaaaagaaagcatactgcgagccctgctacattaatactctggagcagtgcaatgtgtgttccaagcccatcatggagcggattctccgagccaccgggaaggcctatcatcctcactgtttcacctgcgtgatgtgccaccgcagcctggatgggatcccattcactgtggatgctggcgggctcattcactgcattgaggacttccacaagaaatttgccccgcgatgttctgtgtgcaaggagcctattatgccagccccgggccaggaggagactgtccgtattgtggctttggatcgagatttccatgttcactgctaccgatgcgaggattgcggtggtctcctgtctgaaggagataaccaaggctgctaccccttggatgggcacatcctctgcaagacctgcaactctgcccgcatcagggtgttgaccgccaaggcgagcactgacctttagattcagtcacctgttcagccggcactgagaagaacgaacacaagaaaaagataagaaatactagagtaaaggccatcaaactacgcgatagtctctgttcttcatctgctattaaccttgccttagaaacacataaattatgagattttttttaaaagttgttaccaaatacacatttcacattgaatcatgtaggatcttgatgggcctttgttcccaaggacttccacatttttgcacagattatgctccatcccattcacttctgcattcctgtaacttttaatccctatgtttgtctcacttttcatctggttgaatggcttttcttagtgtggtatttgctgtcacatagtttttcctgggtgagtctgccaactcacaggtgcttttaggcttgaaatctccatcctatcatttccgttttgcctgtgactgtaaagagtagccattcttttcccatgtattgaagaggatattcttctcttgctttatactactcacgtccttggggagggaaatgcacaatttttttttgttaggctgtaaagaatttaagctgtaaattacataagttagaacaagcccaaatttaatttgcaaccatcagaattcagaatctatagtgaccagtgatcaaggctaattggaaaagagttatcggcccatagctaataagtagtgacagacaaccaagcttcaatatttttctaaagaaattacaggtgggatatgctagaaaaggcattttggggttatgtttaaaaaaacattattgtcccacaatattaccttaagatttttcttttccgcactacctgaacattgtaatacagacaaacttgatttcttctagaagataacattttcaatactgtcccacttctcatcttaaaaatattgtcatgtttattctaatatccaacacaactatcaaaattgcctttttctctagaggatgaaggctgtgaaaaaaccgttcaaattctcttctttttcttttttattaccaggtccattttgcctgacaattgcaaatcagagcatacaaaataaaactgtgcagttttgtttggtttactttcaaaagagtagaaagcttgaaaagattctgaaaccacagtttcattattctcataatccttctgcaactgaaattacatattgcaggagacattttcatatcatcaatgtgacatttacaccacactttcaaagacaatcactgaaacaaaaattgtctttatgagctaaaaatatgcagaatctctgcctagaatctttattcaaacttttattagccagtgaaacacttgcttgccaactgccaagccatacttattaagttcgaacatgtttcacttaaggagagacacctagcttagtcatggcaagttgccattttgtaaactaaggattttggactgagatttcttaaatctttcttcaaatctcccacaagtatatacttttaaattatggagtattttaagtctacaaaaaggtataaataataatataatgaattcctatatacctaatacccagtttaagacaccaaatataacaagtataattacatcctccaatgtaccgtttccttattccacagatatctttttcattattgtgaagtgatgttcagatttctagttttttttctagtttttaattttaacatcagaactgaaataaaaaattatggatacgtgttttgaattgcaaactattcctcaggaattccaattaaatttattttacttgaataggaatgatcataaaagtgattctttttttgtgactagaaattcttaagccgatggtcactatagctcatccttaatgtatggctcatttgcttttgtcactaaacggttttgtgttagaaccaccaaaattatagcttttaagagcttcctttgaccactgtctttttcttaccctacttctcttatctttgatcgtatatttctcataatgtgaaatatgatgagattcacttaggggcagcatgttagttttgggaggcaatgtcaactgtgtctctgaattcctgtcttccaaattgaagccagaccatgctgatgacctcaagtagcactgactatttgacaatagggctgataatgtaatcggcttgaattttgacttagtaactttttatgtaatactttcggagaaattctctttaggacaaagcagagagtccaatttattgagggatagattgtatctcttaaagtggtcatattattattaattttgccaaaagaagaagaatttattgaatatttatactataaaatgcagtaacattctacttgcttattacatttaaatccttgtgtaactgaatgtttacatgtcaagaggaaaagctgtaagaaaatgctgtcacagacccatccctgtggcatcgtcagcagaatactgcttgcttacaatctttattatgcattcttataacataacctcagagtatctttaccaaaggtttttaaagtaaatctctttttaagatagacttattcttttataataatgaatgtgcactcatacatatgtagaaacatttagatttagagttttttttttctttcacaaggtataataaggaaaggatcctacaatattttattctagggtttcttaaatatatgatttatattactgtcttttctattaatcatttgatttaaacaatgccaagtcactcttttttagttgcatgaaattttgcctgcaacagagagaaaaagattgtattactttaatgattataatcatactgtctgctgatataatatcataattgttgtggtttaaatacataaatagtagaaaaatcagagtctataacagaaagtttgtaaaaatatactgattttgaaaagtatcaggaatataaatatttggtaattctgtgtaacaagagagacatggaaaaggaaaaaaatccactatatcatgggctctgcagaacatatcaaaataggatttcttaaatttttcaacccccagaccatactgactcaacatggagtctcactggccaagaaaattgcctttaaaactcgaaaataaggccaggtgtggtgactcacacttgtaatcccagcaatttgggaggctgagacaggaggattgcctgaggccaggagtttgacaccagcctgggcaacatagtgagaccttgtctctacaaaaaataaaataaaataaaaaccaaattagccagacatggtggcatgcgcttgtttaaaaaaacaaataaataaataatcgactcaaaaataagtcatgtgtcccagcataaggcatcaggttgttagatgctggcatctctgcagctcaaagatgtgggttctttttcttgtcattaacacattgttatttctgtaggagcaacttctctgatcaaaattacttttctgggtatgtgctgattaagggggtggacttatcaacactataattgttccctatgaaagattccacagagatgtttatggtgaggtttaaaggatatgaaactctacatttaaacaagtattttatatttgggtacagaggaagaaagagagggctttttccatggggctatagtagagagttagtggaatatagacaggactctgaaaacacaacttccagccatttttttagttagtaaaaatcctattaatgtgaaccagccaggaataacagtgttatttctattggatatggtttgggcttctcttgtcaaatctgtgtcggctgccccctgatccttccattatcaagttttgaagggtgttggggaaattatggcagctgctagggagatcagggaaacactgatgtaacctcaaagcctctcaccattcctcttggcttggaaaggctttattttttcatatacatttctagaaatattgctattctaccttagtatttcacatttgtagttcaaacaagcgattgtccatctgttgcctagagctatagtacatgtgtgttatgaatgaaatatgacagcatgttccatacccctgctttagccatctgtgggaaaccagcaaactgaaaaagacacctctgcaaaatgtgcctcaagtccatttcttgggatcgctcgtttggtgcactctcgtgggagacaatcagagaacaacatatacttgtgccttattttcaaagaatctatttacactactatgaatattccactgaagagtcaatgatgtaaatgataaccaccaaatctcaaaaatatactcaccaaaaagtaaaaaagtaaaaaaaaaa

SEQ ID NO: 28 - protein, 606 aa, Homo sapiens
MSHPSWLPPKSTGEPLGHVPARMTHSFGNPSISVSTQQPPKKFAPVVAPKPKYNPYKQPGGEGDFLPPPPPPLDDSSALPSISGNFPPPPPLDEEAFKVQGNPGGKTLEERRSSLDAEIDSLTSILADLECSSPYKPRPPQSSTGSTDPVSTPVTGHKRMVIPNQPPLTATKKSTLKPQPAPQAGPIPVAPIGTLKPQPQPVPASYTTASTSSRPTFNVQVKSAQPSPHYMAAPSSGQIYGSGPQGYNTQPVPVSGQCPPPSTRGGMDYAYIPPPGLQPEPGYGYAPNQGRYYEGYYAAGPGYGGRNDSDPTYGQQGHPNTWKREPGYTPPGAGNQNPPGMYPVTGPKKTYITDPVSAPCAPPLQPKGGHSGQLGPSSVAPSFRPEDELEHLTKKMLYDMENPPADEYFGRCARCGENVVGEGTGCTAMDQVFHVDCFTCIICNNKLRGQPFYAVEKKAYCEPCYINTLEQCNVCSKPIMERILRATGKAYHPHCFTCVMCHRSLDGIPFTVDAGGLIHCIEDFHKKFAPRCSVCKEPIMPAPGQEETVRIVDRDFHVHCYRCEDCGGLLSEGDNQGCYPLDGHILCKTCNSARIRVLTAKASTDL

SEQ ID NO: 29 - DNA, 122779 bp, Mus musculus
  misc_feature (1)...(122779): n = A,T,C or G
atgggggtacagaagcctttaaaagggggtacaatgcaggaaccagtagtgttgttgcaccagagaaagtgggggattagcaagcacatattggcttggtgacagtgatatcgcagggacatgtaggatgggatcttgaagagggtcctataagacaaaagggtaggggtagattgaagaaaggaatgttttgtgactttcatgtgaataagtctccatgaggttcttggagcaagcttctaatgggaccagctgccagtagtggccaggaaagggaaagacagagaagcactaagagggactggggtgggtggttaaggggaggaggtcagctgtatattggatgtactgtagccaggagggagtggcttggacctcctgagcttggctttcctgttgaagaaggttaatgtgggtaaagatggacttggaggcagggacaagctggagagaaacatgtaggtcaactacagggtgtttagcatagttattagggtagagctcacccacaactcctgctcaccatcgtttttcccagggatcactgatgggaaggtgaaaacaagtcttcagatggtcgagcttggtgccaccatatctggtggattcaattctacatccccagtgtttgcaagctccatgtacagagggcccctggaggcaatcacctgtgttgcaaaaaggaaagcagaggaatgggccgggaatagtggagatgcaatcggggtgtagaggtaatttccatcctagttcagtatccttcaagtggggagtcctggattcctatgattttgttgtgttcgtcataggtctcttcagcaaaaagactccagttgtgggtattgggagcacatggcttgggcacctgccaccaggtcacggatgtcttttcagtagatcttgttctgtcatctcctccacctcctccttccttgatctgtcaagcacgaagcaggctatcttcttgtttggtgggatgatgaaatagacctaagctggtcccgtggaaaaatacaaacacaacatcttgtagttgtaaggagaggggtctggtcctctctgaatcctgtctaagggatagcaccatcggactaggatgggagtggatattcctagtgtgtgctaatggagggagacaggagactatttggcacttttgtagatattaagtatatttagagtagtcagagtcatcattaattgtatgttgggggtaggcatttgccttttgttttgtaagtaggccttttacggtataatgtgttctttctattatttcttggccctggggtttttgttgaatccttgtgtggtgggcagtttctcactgtgagcagaaggttttgaattgggagctggtaaaggcagggccattgtcagctgtcatatgtttgggaatggccatgagggcaaaggtgtagacaatatggtgaattaatctttttgagttttctattgtttgggctgtaggccatacaaaacatatgtgccaatggtcaccaagatatagttttgtctgccaaattaaggaatgtaggtgacaccaatttgccgtagggcattggacttgggacctcaggggtgagtgcccatagtttgtaaagctggggtagtgatgagggatgcacaagaggatcatgtttttattatcctctaaggcagagcaagagggatgtagaggaatcagtcaagaagcccctttatacgtgtgtgtgtgtgtgtgtgtgtgtgtgtgtgtagtgaaattgatctgcctgtgcaagggaggctgtgtatattcctgtccaggcagtctgattggtgagggcatttccctaagatattagactgagcaggggactgagggttctgctatgctgcatgtagagggagtggctctttcccataaaagggtggaaacccgtgtgagtagaagtgaaagcagattggtgtctaatttgacaaaggatcttgacagccaggggagcaaattaacagaatacacgctgcggaggtggggcggggtaggggggtgggggggggaagatgaaagggcctagtgacttctattagggctaaataggttgcatatggtcccttacatgggagggggtgaggatgatggggcagctctttgaattgggtaacaggggttcttcccccaggggattattatatatttgctgtggctcctctctttcttccgccataaatattgagggagccccaaatgatgggctttctctgtaaaaagccaaaagagggcagccactgcaccagacggagggcagaagttttcattagggtaatggttatcaattggtcttagcttaactnnnnnnnnnnnnnnnnnnnnttaatgtgggtaaagatggacttggaggcagggacaagctggagagaaacatgtaggtcaactacagggtgtttagcatagttattagggtagagctcccccacaactcctgctcgccatcgttttttcccagggatcactgatgggaaggtgaaaacgagttttcagatggtcgagcatggtgccaccatgtctggtggattcaattctacatgcccagtgtttacaacctgcatgtacagaggccccctggaggtaatcacctgtgttgcaaaaaggaaagcagaggaatgggccggggatagtggagatgcaatcggggtgtagaggtaatttccatcctagtttagtatccttcaagtggggagtcctggattcctatgattttgttgtgttcatcataggtctcttcagcaaaaagaatctagttgtgggtattgggagcacatggcttgggcacctgccaccaggtcatggatgtcttttctctcttcagcaaaaagaatccagttgtgggtattgggagcacatggcttgggcacctgccaccaggtcatggatgtcttttcagtagatcttgttctgtcatctcctccacctcctccttccttgatctgtcaagcgagaagcaggctatcttcttgtttggtgggatgatgaaataggcctaagctggtcccgtggaaaaatacaaacacaacatcttgtagttgtaaggagaggggtctggtcctctctgaatcctgtctaagaaatagcaccatcggactagggtgggagtggttattcctagtgtgtgctaatggagggagatagaagactatttggcacttttgtagatattaagtatatttagagtagtcagagtcatcattaattgtacgttggggttgggagtaggcatttgccttttgttttgtaagtaggccttttaaggtataatgtgttctttctattatcttttggccctggggtttttgtcgaatccttgtatggtgggcagttcctcactgtgagcagaaggtttggaattgggagctggtaaaggcagggccattgtcagctgtcatatgttggggaatggccatgagggcaaaggtgtagacaatatggtgaattagtctttttgagttttctattgtttgggctgtaggccatacaaaacatatgtgccaacggccaccaagatatagttttgtctgccaaattaaggaatgtaggtgacaccaatttgccgtagggcattggacttgagacctcaggggtgagtgcccatagtttgtaaagctggggtagtaatgagggatgcacaagtggatcatgtttttattatcctctgaggcagagcaagagggatgtcgaggaaacagtcaagaagcccctttatacgtgtgtgtgtgtgtgtgtgtgtgtgtgtgtgtgtgtgtgtgtgtgtgtgtatgtagtgaaattgatctgtttgtgcaagggaggctgtgtatattcctgtccaggcagtctgattggtgagggcatttccctaagatattaattagactgagcaggggactgagggttctgctatgctgcatgtagagggagtggctctttcccataaaagggtggaaacctgtgtgagtagaagtgaaagcagattggtgtctaatttgacaaaggatcttgacagccaggggagcaaattaacagcatacacgctgccgggggcgggggggggggtggtggtggggaggatgaaagggcctagtgacttctattagggctaaataggttgcatatggtcccttacatgggagggggtgaggatgatgggacagctctttaaattgggtaacaggggttcttcccccaggggattattatatatttgctgtggctcctctctttcttccgccataaatattgagggagccccaaatgatgggctttctctgtaaaaagccaaaagagggcagccactgcaccagacggagggcagaagttttcattagggtaatggttatcaattggtcttagcttaactcctattaagctaagagcaaagcaggcatgatttctaagtagccatcgaatattggagagatcgagaggctggcccagagtggttcttgggtggtggtgggattactggaaacataaagtgttcacagtctcaaaggtggcagaataaagagtagagataaagtttgcatgtcgcaaaacctgacttnnnnnnnnnnnnnnnnnnnntatttgctgtggctcctctctttcttccgccataaatattgagggagccccaaatgatgggctttctctgtaaaaagccaaaagagggcagccactgcaccagacggagggcagaagttttcattagggtaatggttatcaattggtcttagcttaactcctattaagctaagagcaaagcaggcatgatttctaagtagccatcgaatattggagagatcgagaggctggcccagagtggttcttgggtggtggtgggattactggaaacataaagtgttcacagtctcaaaggtggcagaataaagagtagagataaagtttgtatgtcgcaaaacctgacttagcaggaaatcccaacctaaggaagtgagttagatctgataagatctaagactgttcagcaaatacagtgtaaggggtgccacacggtgaagctcggggtgagaaaagcgcagcttaacctttctatttctcacacacttcagtgggccacccacccatgcattagccaaagacatgctgaagtcacatgacttgagggcatgtatgtgcaggcctattctctccacaagggccaggaatctgaaaggagcatgggtagtgtggacgatttacagaacttggcccagatggtatggtagagctaaatttttcatgtctatacacaagatttttctctttacacatacaccacacacacacacacacacacacacatacacacacacacacacacacacacacacacacacacacacaatgtactctgaaagtggagaaataaggcttgtaaaatgaaattactttcttatgtagtttcatttgcatatatatatatatgtatatgtcataggataatttttaaaatgtatgcctgccattttttatacatctggatggaagaaaggtaatgagaaaagggtctgaggactgtaacccatcttcagtgtgagagcaccatttggggcttgctcaaggtgaggtaaaaccatctatatccatgctgtccatcaatcagatgcgtgcagccttttctctgtgccgaccttgctttcagaggatactttgtaaccaatagtttatattgttatatgaactaggcgaagttgggtatttatttatgtgtgcaggtatgtagggatggagccagaaaacaactcttggttctttccctttatcatatcctgggcatcctggggatcgaactcaagtcaactggcttagagacaggtatctacatccactgagccatgcaaccagtccaggttatcctaattcatatttatattaactttcaattcagagaacattgtctccagcaaaactattttcatgggaatgtcagtagtgatagagcatgtgtagagtttctatccttttatgttgcaaagcaactcttagcaatctaagaggttatgagttggacagccaaagaatatcggaaggcaccagggtgtggtgtgtagggatagggaaaatatattgaacatggctgtgctagactggagtacgtttccagaagatttaaacactgaaatactggaccttcatacttcagaatctaattctataaagaagatcaaatgggtgattgtgacttttcttcagggaccatccaatatcaccaatattcttaggaaaagatacagataggcttatgtgtacagtgggacaaagacagtagccatttggaagctaagaagagaaacagcaagacaaacttacacctagtctgatctctgctcctagatttctatcccccagaacaataaagaaaccttaagaatctgtggtcgtttcttatgcgaaatctagtatcgtaacctagtaccaagggaggtgctattgatagctagagatatgaagagggccctgatttgtcatagagactgttatggctaggaccacagaacatccctaagcttaggatcctagcagctcatgtgatttaacaagcacgtgtacctgtgttagctggactcttctgatggctcctcatctatgagtattctatcggctaacagcaacactatgacgtcatagaatctcttcttttcgagttcccttgttgttttctttaggtggtgacaaaattattctagattatcactgcatgtaaagggggaaaataattccaatactcttaaggtagatttgagcctttgtcattttcaaaacttcgagtttacactaagaactaagctcttatccttttaaacgtcttaagatatctttggcaacctagtaggctcccagtgtgcagaaatagatcttaagcctttctaaacaaagtcaaatgtatagttaagacagaaaacagtttcttggtccacatgtgtgcacaaaatagataatagtgaatattagaaatattgttcttttctcaattgaaaaagtagatttggggtttgcccttagcttatttgatgctcacaaagtagagtaccaaagactggtgcattaattctatgccagatttcttggtttatagtcccagtgtgtaagtagtctaggatgcagggctcagcctacatctaccaaggacctttgtgatgcaccacacatggcagaaggtgtgtgtatgtgtgtgagacgcgcgtgcacaagatgtgacaagagaggaaggattttgtttgttcataatactcttttgatattcactcattattaattaattcacgatggtagaatttttataccttattcacctttcctgaggcctcaattcccaatcctgtcaccgtggaccttaagtcagtatgccctgagaaatcctcagattatatcatgagtaaacacttgatttgtatttcatataatttttcaccgaatatcaatcatgtaatgtagtagggtacgagttcatatgcaatattctgtgactctacagttccagctaccaggtctttcaaagcctctaaatacacgacaaaggtctaaatacatgagcagcaaagctgacagatacgcaaattctcaaaaacgggcttttgtactaatttatgttaattcacaaatttctgctctccaattattccaattacaatctttttaaaaaagaaacacatataagttaacctacaaataagttatctcaaaatcatatacttggacaattgacagtgtgccaaaaatcattgaatgagtaagaaatcttcagaaatgagctggaaattaaatctctaggtgggctattaaacttttatctactaggtaggtactaaagattttaaaactaagactaaataatgaaactctggggaattattgtactaccaaattcctgaagttaaagttgaatatctggcaatagatttaaaaaaaaaccattgtaatagttttttcacattaatttttaactttttaaaagcagtggtcctgaagatcaaatgtgtagctatgtgcttccatgcttactactagtgagcagtatctcaaatctcaggtaatttttgtacttttgaatggaagaaaatgaccttgtaaaactctctcccctgtggagaatcacaaagctactctgtgaatgagaagttacagcgctgaggtctctaactgtggaaacgtagctctgaggtccattctcagacacgtgctctccgggtctgtgttctcataaacagcatgtgctctggaattcttgcagtatccataaaattcctcacctccaatcatttcacaacctttgtagtcaaggatttaggaccatgaatgaagtcaaaatttaaaatttgtcaaacgaacatgacaaatacaaggaaggaatcacaaaagagggttgaagacatcccaaaggaagattagatgtggttataaagtacaaagagttattacaagactttttccgagttattatgatgatataagacctggtatttcttggattctttaccaagcctgcttttcttgccgtggattaaattacagtctaacttgtatgtgcactgtattattgtatttgtaaccctgtgctcattaatctaccctcccctgggtctcggtcttactctgtccctagtttagctggtgcaattgaagatattttacttccaggtttcttacttactgttaggcttttcctccaattccgtttacagtagactattccacatacggtagttaatcgtttgtttaatttggcaacagggatattagaattatgcatcatctaggcagtgattctttcataatgttgtttgccttatgtctattcatttagattctcttcagtaaataaaccttaaatccccagtctagcagtgactgtcacacattccagtgcatgaaataaacacagaatgtcagtcctgatgtatgtaacgaatagttgagaaaagtacagtccagaaggacttctaacagcgttctgcttatttgacttttttcttccagcaggttcatggcttgtgaaattcctagaaaggcttgggtgacataggaaatagctggagttctgggcccgcccaggttttgggacattacaggtatggaaggacgttgattgttttggagaccgttagacaggaaggtgatctggtataccgtcctatggctctagcctcgactgggggtcggggggtcgcaatgtcagagtttagcaagagccttaaatggtgcacagtaacctgcaggatgggcggttctggccgtccagcccgcgcgctgagaggagcttagacggagggcggggcccaccagggggcggggcagcaacacagcccctccttccgctcccgcgggtcacaagtagggttaggacgggtnnnnnnnnnnnnnnnnnnnnnnnnnnnnnnnnnnnnnnnnnnnnnnnnnnnnnnnnnnnnnnnnnnnnnnnnnnnnnnnnnnnnnnnnnnnnnnnnnnnnnnnnnnnnnnnnnnnnnnnnnnnnnnnnnnnnnnnnnnnnnnnnnnnnnnnnnnnnnnnnnnnnnnnnnnnnnnnnnnnnnnnnnnnnnnnnnnnnnnnnnnnnnnnnnnnnnnnnnnnnnnnnnnnnnnnnnnnnnnnnnnnnnnnnnnnnnnnnnnnnnnnnnnnnnnnnnnnnnnnnnnnnnnnnnnnnnnnnnnnnnnnnnnnnnnnnnnnnnnnnnnnnnnnnnnnnnnnnnnnnnnnnnnnnnnnnnnnnnnnnnnnnnnnnnnnnnnnnnnnnnnnnnnnnnnnnnnnnnnnnnnnnnnnnnnnnnnnnnnnnnnnnnnnnnnnnnnnnnnnnnnnnnnnnnnnnnnnnnnnnnnnnnnnnnnnnnnnnnnnnnnnnnnnnnnnnnnnnnnnnnnnnnnnnnnnnnnnnnnnnnnnnnnnnnnnnnnnnnnnnnnnnnnnnnnnnnnnnnnnnnnnnnnnnnnnnnnnnnnnnnnnnnnnnnnnnnnnnnnnnnnnnnnnnnnnnnnnnnnnnnnnnnnnnnnnnnnnnnnnnnnnnnnnnnnnnnnnnnnnnnnnnnnnnnnnnncgggccgtccgcgtcgctgccccgggcccggtagagcgcgacaggcggggccgccgcgggggccatgaccgtggagcagaatgtgctgcagcagagcgcggcgcagaaggtgaggcgcgggctggtcgccgctcctcgacgggccgcgtggcctcccggccggccgggccactccgggagcgtcgcgctcggtcccgcggggctgcgtgcggagcggggtgtgcagtagtgagaggcttcgcgtccactcccttctgcggattgctctcccagaaccgacggcgccgcgtccccagagtgacccccgcattcctccagtactcactctgccaggctttgtaattaaactttcttctccttcgcttccttttccagtcccttttcttctgcaagaatgtcacttgtcaccccttttggacagtttctctttcggaggtcttattgtgccaggcctgctgttctggggaaaaaaaaaccggacctccccaaaacgaattacctgtcttccagggcaggtacatcgcatcgacccagggtggaatctgtacaagtagagtgtttggttggttattctttcttttctttattttattctctcttggatctagaaagtatctcgcgcgtaaggagacctttatggctgttactcaaatcttttgtcccctaagtttgaccttgctctcttgttcgttctttactctagcatcagtttcacgcagagttaggggggtcatcacatattgtttctcgaacagtatcttgctagttctaggttttactttaagaatctttaaaagctccagcatagcttgctccatgtcctgaagagcagacggtcattacttgttctgccctcccccctccccccttattggtgtgaaaagcattttgagcaccggggaaatgttggcttagttgaattctaattgtaggagcaattaggtatacagtgaacagccagagcctcctttggctcatcggtgtgagtaatggatgccacaccctgctgtagttttgacactaggtacttgctgtaaagcctacctgtgcttgtctttaaagtgaggcctgttgtactaaaaaatagaccaataccttcaaacagcccccccccccccgtttttttctttttgtcattaaaatagttttagcattttatgttccttgagataaccaaagatgtcagagaatgttggaaagtagggatagtgcattgttattttagacactttggttaaagttggttttggagcctattttagtctatgcttcttgcacattgagacgattatggtgaactgtgatgtagtttgtaatgtggcagaagaattcaagactgaataacaataacgaagaaaacagttggcctcccaattctgtatgttgttcctagaacactataatctttagatgttgatgttgaatgtgtgctgtagttttggttggaaggtcatgggatctttggcatgttaagcaataggctcagtagcattttctttatactcattttgcattttaaaacgtctttatctcaaagtgggaaaagttgctgtcttttttgcttctcttaaacttcaagattgcaaggactttatgggttttgtctttcgttttgactaaaccacttctttgcatagtcagataactaccttgatggctcagaactgtatacataagtctgtagaatcaagaatcaaattactgaaagttaactttgttttctagtccaatattcatgcttaataagcctcctctcccctaagagaatattctctaattcaaaatattaacattgtgatgctgtttttagcatgtgttgagtatgttaaatcatttcactgataattggtgaatgcttttagagcaacatcatatatttttgtacacccagaatatttacttttaatggtgttggggactgaacctagggcctcatcatgctagccaagaactctaccaactgaactacatttgtagttttttaaatgtgttcctttgccttgttaatacactgttattttgtgaccagtattagaacagggccaaacagtatggttttaaattcttttgaaacaatgtaactcaaagttgaagttttaaaatgacgctagaaactagggctaggactttgccttaagaagtaggaagtgaactctatacttaagaaacaaaagtgaaactaatttcacttagaagcttcaaagactgtcagggaaaggaagggctatcaggagcaggctgctgtgtagatagaatttttgcagttttcttttcttttcttttttttttctcctctctaaaaagtgtgcagatctgttgacaaattttaagtaaatggccattatagttgttgaaatgattttctgttttcaagatttttcttcctttttattgtaaagagctgtaagattagtatctttttaaagcaacagtacacaaaactttgtgtttcttttctttcttttttcttttttcttttcttttcttttctttttttttaaatctaagtaaggtgcaacaatgtaattcgaaggggcagtgtcttcccttcctgtagtctctgcttaattcctgaagtttgccaaaccaggagttaggaaaagttggaaacctgcagagagagcgtttgagaggtttgagatgttatacgagagggtttggcaatgtgtggagtacaggtaaacttgcggttattgttttcttggccctctatcttcatcctttgtgcttgctatttaccttgctgtcggatcattatatcttagaagaaactagatacatacattcacattccaaatcccagttcattagggaaggattggtaacttcctcccaggaatcaaggtgacttagagttgagcccttcaccaggaaagcagcctcgtgagtgagttacctgttcggctgcacaagaggacttagaactgttcttgtcccatagtaggactcagtcaatagttaatgtgaatggttgttggagggaaagcaagtagagtgactccttagatccctaagtaagaactgacatttggttcctgagaaacaaagagggcttgacaagcatccaggaaagtaagtggtagaaggaacgagacaggacgtggattagatcaaaattgcgctctgtgaccttgggcaactcatgaaatgtctctaagtcttcttagaaaactttacactttgtagacacgagaaacttcttcagatctgagtgtttaacgggtctaagtgggcatttattattatttttaaatgtagtatgaggatatatagaggcataaatatcctcttcaattgaaaagagtcaagacaacagattattcaaaaagtgctatcattgtttgctctgtgtataaatacaaaaacagtagtcagaaaaaaaaatcttattagttttgccataagtatccaggtatgtccatcactgagcaagctggggcagaaatgttctcattttaggccagctggctacatagcaagttaaactgtagtagtcttgagaggagtaggggagagggagaaggaggaggggaaaaggaaaaaaagatatttataattttttataatggttaccaatcatattttctagacacaccatgccacaattcaaaagcagtaaaacagttccctaaaaaaatactgccttgggggccaaagagctaggccagccactaaaatgtcctttgcccaaacatgagaacctgtgtttggtctccagcacccatgtaagaagcagacatagcagcacccatttggaaagatggagtgagcatcacgtccagtgagagtctccaagtctacgggagaaagtgactaaggaacgcatccagcattggccactagcttactgtttattacacgagcaagtgtgcacatgatacgtgtgtgtgaacgcaggcacacctgtcccaacaagttttgaaggtcagaggacaactttgtagtcacctctctcctttcacctttgcgagaggttctggaaatgcaatccaggtcccctggcttgaaaggcaagcgctcttacctgctcagctacccagctgacccgttgcctgtttgatcagttccaacagtccccagggctcagtgcagaggagatatgctttcagcagcaactggagtttgaattcttttcccaggctaggattctggtgtggggatatgtctgtcattcgatgtgggacagcagcagtgaaccgtagctcaccgtctgtcactcaaaaggaaatgagctgctctttgctattgacttttggatacagatattaagttatgtgagatattcagcaccgtattgtagagcaccatttagactgggggcgatttttttctgattgaagaacagatttaagtggtttgagcacggtaagctatgatttagggttgattagtttgggcaaatcttggtttttcacctggatccacagactattttttaatgttttgtttttgctattaaaatgtttttgagcttcaaacatcttccgtatttcagtttgtttctgaatatttccatggctgtggcaacatagagacatcagtatatttctggttcttcctagtttttcattaggaattttttgttttatacacatatatatatatatatatacatatatatgtgtgtgtgtatatatattacatgttacaaaaattcatatatatatatatatatatatatatatatatatatatataaataaaatcaaatttgtcagcaactctttgagtaggcaggcaaatctgtatttgtttggacaaatacataggagtagaaatgttaaaataaactctcaaattgtgacccagactgccatactttctttcagaaaagtctagttggtttataatttcctcaagacttgctcttgctagtctttgatgctttagccacttttaatggaaactcatattggtttgtgtttccttttgactaacagtttttgaggccttctatgggtgattatgttctgaataacttttaaatatcacttttaatatagtacccagttttcccttgacataggtagtagcaacagctgactatttttcccaactgaaatgttaaaaatgttattagagctaaataataagtataaatgtgtttgtaaaatgaagccgcacaatccattttatttcttaagagacttatctgattaaaaaaaaaagcatcagtgctgaaaactaggaaccattttctttgtcatgcctcaggtcaaatattcaatttatctctttaattattgataggacatatactctagaaatcttcataatgcatattttattaccagtgtctaaaatattttcacagtggatgtactgccacaggtacgcagtctcaggaccagtctaggttacatagtgagagcctcttttaaactaccattgtcaaaaacaaacaaaaagccacttgttctgatttagttggtgaagaagttttggaaacaatgaagtttggaggaaaatggtagatacaggatgagtttagatgattgactcgaactgtaagccctcccccgccccactgcgtctgttggtattttcagtggaaaaggattggaaacatgaagggctttagtcatcagggaggaactgtctgcagaactgagagctaagttcccaccgaagcaggatagatatatacaggaatatgtagagaaggatcaggaaagactggatgctctgttaacaccaatggggacagcgattgcacagaggtgtatgtaaaacctagtgcttaatttcatgacagtgtacatgcagaatcagatgccttagatccttaaggtagtgctgtaaaaaccagcttgggctggagctcctagctttctgtatcctcctctgatgctgggtctggagatttcagctaaaaagtctggcaagtctttccctgaagccttgaggggaagggggaggggtggtggtaggggaggaggtgggggcgctggaagggagaaagggaggatgttgggggctcggggagggggaggggaaggagttggaggctcagggagggggaagggcaatgctatttgaaatgtaaataaataaaataattaataaaaataagaaagtggaacagtaagatctgagaaagaggatgaaaagtaaactagaaacagctttaatgattgtgtctttggaaggaagctgcagctcagcttagtttgcctagagtcagcagacattgtgcaccaagcagagtctctaaactaacattcattccagtttcccacctagtggagcatcagctacaggataatgatagcactgcagaactagaagggttgccttggtgccttgggtggctggcattagagggacaacagcagcgagcctgagcttctagagagctgtcactaggcaggtgtaaacaggtcacttggtggccaaccttagctgtggactgcctgtgttgtgagacagggacaggactctctttggtcacatggtcctgtcctatgtgatgtggctccagggtagctagtcggatcttaccattagcttatgttgcgcttccttggggctggcttgggcaaagctcatgatctgcagatctggagggaaaaggatgttgcattcccggtgaaaggctttgtaggtagtgtgtcttgtactccttccttgcctggggaagcaggtagaggtttgcaagcttatatccaaagacaaccggaagcttgcaaagcttgcccacttctttctctctcccttttcctccttacttcctgcgaacattctagtcgccaatttctttctacatgtatcttaatttaatctctctctctctctctctctctctctctctctctctctctctctctgtgtgtgtgtgtgtgtgtgtgtgtgtgtgtgtgtgtaggcacacatgtcatgaggaagccagaagacaatttgcaggcgtggttgcctcttcttgtccgtattctggggacagaacttaggttcccaggcttagggacaagcgtctgtgcctgctgagccatctccttgtccccttgtcaaattgttcactcatttattttctattttcttaattgggacttaagaatcctttgcctattttctgtattttcctagacgtgactgaccatttaattttcttaccaatttctttgaattaaaaatatttaaattttgatgttctattttatttatgtcatttcccttagattagcccttttaactatgtttcctttttccggttctccacttccaagtttagttttagcctggatgttttctataacctatttgaagttgtttgtatgtgtgctctgaggtatataaaattgaatgtatgtttgaaatttagtaaaatttgtatgactaatatttggtacaaacacagaatttcaaggctaacttcatgtggatgtgtgattgacccagtacctttgtgtgaaaggataacagttgatattgagttgaggttagttgaccatcgacgaggaggtttgatagtctcacctgccttcattctgttcttattctatataatgtcacaagcactgtgttttaaggacatattttgaaataggttggggaagttcttcggcattcttttttgttgaaagaatgtcttggctgttcttgctgtttttttgcatttccatgagaaattctaatgttctttgtacagttgagccgaaatgaaggtaggagttttgagtaggaatgtgttgattatagagatcaattctgagtgcatagacccgtttaatctaacaacattctacagttcctcgttaatttagattttaatttcttaatagcatatcatttctagatcctggtgtatcatttattagtgttgacttttttgatattattctagagggcattttttttgttgttgctatttaggtttgtgttttgtttttttggcagatagattataattgatttttgcataacctatgtcctgtgaccttgctaaatgatctcctagtgctaatagagtctatactttatcccttcctatctcctgtctcccccctctctgtctctctttctgtctctctccgtctctctctgtctctgttctctctttctctccgtgtgtgtgtgtgtgtgtgtgtgtgtgtgtgtgtgtgtgtgtgcttgtgtgtttgtgattatttttcttccttgctattgttttattgtcctctcgggaatctcctgaaaacattgacttggaattcttgcactcttcctcattatattccgggaatgctttgtcttgtactaaatgtaatctttgccacagtttttttgaaagatatatttcgtaaggttggaaatgttttcttcagttcttagcctgtgaaagttttggtgagaccgtggtcatccttttgtgtttcaggagatactgaagcttaatgatctatttgcttatctttgccagtgcttattgagcgttctgattcttgcttgtaaaattcttcttcttcatcttctctttattttcttctgatttcaaggtgttccttgtagtccagcatttacgcgtgcttgttttcttttgctctaaccgaataacgccaagcacatgaaaagaagggcaggtttggccggcccctctatggagttcatggttggttggccctattgcttttgggcttgtgcacatcatggtagagtgcctgttaaaggcagccactcagattatggtgggcagaaaagaagagaaagagagtggaagaagttaggtccttttccaggcatctcatccctagagtctgccttcctcttgtccctgcctttttcccttccctccccttccctcccctcnnnnnnnnnnnnnnnnnnnnnnnnnnnnnnnnnnnnnnnnnnnnnnnnnnnnnnnnnnnnnnnnnnnnnnnnnnnnnnnnnnnnnnnnnnnnnnnnnnnnnnnnnnnnnnnnnnnnnnnnnnnnnnnnnnnnnnnnnnnnnnnnnnnnnnnnnnnnnnnnnnnnnnnnnnnnnnnnnnnnnnnnnnnnnnnnnnnnnnnnnnnnnnnnnnnnnnnnnnnnnnnnnnnnnnnnnnnnnnnnnnnnnnnnnnnnnnnnnnnnnnnnnnnnnnnnnnnnnnnnnnnnnnnnnnnnnnnnnnnnnnnnnnnnnnnnnnnnnnnnnnnnnnnnnnnnnnnnnnnnnnnnnnnnnnnnnnnnnnnnnnnnnnnnnnnnnnnnnnnnnnnnnnnnnnnnnnnnnnnnnnnnnnnnnnnnnnnnnnnnnnnnnnnnnnnnnnnnnnnnnnnnnnnnnnnctacataagaattcactatgtagatcaggttgactggccaggaaccctcaaagatctgcctgcctctgcctccccagtggtgggattatagacatgtgttaccatgccctagcactgagccttctcattagcatcctgagcctttttattctctttatagtgaaagttcaaggattaaagtttctaggggattgttgtttttctcaatatgaataactgaggaagaaaacagcaaaaaaggttcttagctctttgataggaatttggtgagcctgtaaagtgtgtgtgtgtgtgtgtgtgtgtgcgcgcgcgcgcgtgcgcatgtgtgtgtatttctgttcattacattcctaaaatttaatctttctgcttcctactttgtggtttccatcttagagaccttttgtattttacagtttaggcccacggcttccaagtctctatattcaaaatgaacttcacgctacatcttcagctcagttctggattccagttggatgcctgctttgtgcataagtatacaattatcagtcagtgtcatgactgccttcatttcttcctcctctgttttatgcagatgaaaaacgtgtagtctgtgggggtgtgagcccaaatgataagccaaaggctaagggaaaatggaggagacagcactcagggcttgaagtggagggaacgttataaatatgtgagagagctccattgttagagagaagagcaaggacaaagaaacctgaattgatctgatattatttgtttactacaaatagctggactagaactgtggcagaataatgaacaaatattctgtcttttctcttgctttctggcacagagtcctgaaaactctttgaattgacttttttttttctaaccttaggaagatgactcatggtgcttgaagagtctggattgcttcaggatgggagttgcctgggaaaaactaaccagtgtcactcgagggtgggacatttggtatatcactgcaacctccagggaaggacaggaggatgcaggctgagttccgtcactagtggtcaatgattgcattacctggtcctttataaagctcagcccatgtctattttgaatcgagtgcctaatagtactgtaggagagtgctcaacctacatggttagattgtaaccttctgtttgtttttgtttgtttgtttgttgagacagggtttctctgtgtagccctggctgtcctgtgactcactctgtagaccaggctggcctcaaactcagaaatcctcctgcctctccctcccaagtgccgggattaaaggcgtgcgccaccacgcccagcagattgtaaccttcttagattgtgtttcccagagacatttgttctctcaagggtaaatcttcccctcctaattgttttgagatctattttcttagaaaatatataacaatagattttaataattaaaaaaactgtcaggaacattttctagttaagggccaaccaggacaaaaaaaaaaggagagagaacacaaaaattatagtaaggaaggctttatataattcaccaagaacagatgtttgatcaagagtaactgaaggaggagatagggctcatggaatgggcctgtaagaccagctaagcagggcgtgggccaggagcaggacacctgcctgggctacagattcatttgaagatcagcataggcagcttagtgagaccctgttgcaacactgaaaagagatgctgcggagaagactcactggctaagagtatggagtgctttcaggggcggcttcagttcacagcacctcaagtgcggcttagaacttcagtcccaggagatccagcaccctctgctgtaggctgcaaaatgttagtgcaaatttctgggttgcagcttttctcttaacccagatagctcccaaataattgaaatgactattagatttatttaacaggtttaaggcacaacaactgagcagtagtaatctattttatttctccaaactaatctggttacctcccagccaaaatattcgagatacttgcgttttagtatcgatctggctctctctgttccaggtgaattctcacagtgtctcctggaccttctcctcctcggggatccccacttcctgtgtctccctcctgctcccctggctggaatagtccagccctattctctcctctgctcagtcactgactgacaagtttctttattgataagtcagggagtaattgggagcaaagcttacacaacactgagacaagagattctcagaataaggattgcaatgagatgtttggttttttttgggggggagggcatggtggtcatagaaatcagcctttggataatacaaggataatctttacacagtgcacagtaacatgcctgtacatagttagccattatgtcattaataggaccaaaagttggatttgctttaaggaattgttttgtgacattaagctgtgaggaattatgagacccttttaatttgaaagttctgctttgaaaatagtgttggttagttttgatttcaacttgacataatctgtaatcacccggaaagagagtttcactgagagttgacctgttggacatgtctttggggtggtgataatctttattcctttgagatgggtgagaaaggtccacacattatgagtcacagaattccctgtgtttgggccttggactgtgtacgaggggagaaagcatatctatgcatccattttctctccctcctcctgactctggatgtgaccacctccctgcttcaaatgcctactcttttgacttgcccaccataatagaagataacctggacttgtgagctaaaataagctcctttctccttaacttgcttttgatgggatattttctcacaggaagaggaagaacaactagggcaagggttttgattaacaaattgattcttcactttgtgtgtccgtgtgtgaagcctagacaattattattgagctatcgtcctgtgtttctacttaatttcctgaggcaggtctcttactgactgctcttggctggctggctggctggccaccccagggattctcctccctggcactaggtccaggtccctgcatcgcctttgtggtgggtacttgaccaccaagcttaggtcctcatgcttaggtggcaaggattaggccctgaaccctctctcagtgtccaaagcatgtttatttcattagtataagggactttacttttgcactgaaaattaattatgaaaatgtaatgcagaaattagagatacaagccgggcagtggtggcacatagcttttaatcccagccctgtagagacagaggcagaggcaggcagatctcttgatttcgggtcatcttggtctactgagttaagttctagtacagccagggctacaaagagtaacctgcctcgaaaaaccagaaacaagaaaaacaaaaccaaccaaccaaaaaaaaccaaaccaagcaaacaaaacaaaacaaaacaaaccaagaaaacaacaatgaaccaaacacagaaagaaatttgaagtacatacataacaggagaactttatttacatcagaactagctaaatgcttattttatttaaaccacagatatggaaggtaaaatatatgacttgattctccaaattttgtttacctatgtgtcttctagaatgtaagtactctaatttaaaatcacagtgtatactaaaagactttgccagtttggtttttagaactgaatatgaatgatgttcccatagaaaccatgtttgttcctgtagggttcgtatttggcctcaaaatgtacctaaattccgtaggagttttggttctagcgctgtgtaataacagtgactgggagacttgtactgacagtgccggcttacgattgttttatctgtggcctagtaggggtggagagtttctgaaatgctgtggagtattgcagataggactgagggactgggtgacaggtgcggataagaattcttgggtgagaaggatggaaacttacatttatctaggactagctatgttcctgacttcttgttggtgttggtgatttcctataggtcaactcatctcttttcttggtgtttgttttatttctgctgttccacaagtgcttcccagcctactgtcagatttctgtgtgaaggcatggctgaagggctgcaggagacacagcattaccaccagaatcccattatggaggtttgcagttatcagcagatgcagaatgcatttgaagaggagatgcactcaggttccgtaccctaaagtggcagagttgaggggtctgtagagcagaagctagaagcctcccactcagtggctggcctgtaatctgaggtttgagtctttattctcagaaaacctgaagacttgtttttttctactggtcattttaaagtttgctggccgcagccacctttgaggggacactgacctgtgagttccttttctttgtacctgaattttctttattttggaaactgagttgacaaacgcagtggctgactaaagagtcactcaagtgttagtacaatccctttcctgccatagtctgtattgctttttatcttatcattatcttatcattgagtatttcacgtgagcataactagtgaacataattagtttaagctcagagtcttcatttttcacatcattgctaatgactgaggggagaaagatctggaaaagacagtagctattgaatttccaagacctgtttttattcctgtgtctgcatctgttaatctcttgaagagacttcagggagcttccgtgagaataacttcttggggaagagagcacatgctaagtttatgaaccggaggcatttagaaaccaatattttgtctaacaagggcacagtgaacaatttacccaccccctctgccgctagccattcccacttttgcattctcagcagttatcttgatgttaactaaggtgtctttaagttactggggagctgactggggccaccctactctgcctgcctagatgtgagcagtgaagagagacttttctagtgataattgtccctagcccttgagtacccaagaccagcatagtctacactggtagactataaaccctgagagctagctagggcttattgaacccaaaggctttaaacccaacgggttttgttttgttttttttttttttcttaattttaaaaatgcaggttggaggcttgcagttctggtttagccacgagtggctccaacatttgacagctgctgtaatccttcgttttcagctgcagtgagcggagcgagcagacaccagaaggcagttcctgccagtgtgagaactctcgggtgggctgtgcatggtgggtcctcaggccccgaataggctcccgttacagcaccgagacctatggtcttgggacccttggatgttgactgctggtagtgttccagccctcgggctcccggtgttgggattcttgactcctaaagcttccatgtccttggaatcccgccagtgagcagagactgcactgcggcttgtcttggcctcttctgctcacttagtttctgtccctggctgctctctggaactctgcagccgaccttctcgtgctgccaccacattgtgttagcggctcaaagagaaccactgccctgagaactccagccctgttaagtgctctcaagccacaccagctggtagcagcagagagggactcactcaggaaggcagccaggaagcctacttattatctgctggccctctgtagcaaggtgttcgccccactcaggatgctgtgcttcctgcaagtgcaagttgacatctgtgttaatcaagctgtctgcttacgatccctccctggtttgaatgaaaatggctctggggtcagtgcctgagttaacagaaggcttgttttgcagagagtgctgctttctgaggctagggcagactggggtgctcatacctggagcaggtctgcagcagtggctgtattggtcacactgcagctgttgtcgtgttctcagagtaatcgtaaaacgcccagaaaagctgggctgctgtgacaccatctatctggtttctaagagccaaggcttcttggctgatggttcttgagactgataaccctaagggaggcttctgcctttctggtctcttctctgtagtttgactcattcaaagagcatcaaatggatatttacagcagagatgtaactaagtaaagcttaacacagaactacgagtcctacaagcatgttccaatccatacttagtaatatttaaccagtgtctattgcccttctcttctggcccccgtattccatataggtaggttccaggggtgattccactttttttctgaaacattaagaaaaaagcctggcattccctagtctactggtgaggtaaaggatttgtgctgaaacccacttgcttccttatcctggaactgcttgctatattttgcagttgtagaaaagcaggatgtcattgtgcagtggaaataaaggacagagcttgaaggtgtgtgtgcattttggcatctttgcttattgatttttgtggcgtccacaaaccaccaaatctattgaattctgttttgctctttggcccggcggtgggaacaaacagaagccgctatgttctgctctatagcacctaagaaatccatacagaggaggccactgggactcaacaataggctccagaaataggcaattggagcgagtccaccttgcatctgaacttgctagggaagcagaggttcctatgcaggatgcttgtagtgaggagaagagtttatcagagacaaatctgggaagtgtgaagtgtctgagttacctgccttgctgcttcatcaaaacataaggcaggggctggggggttcttttggctcacagcattcagaggttcagttcatcatggcagaggaggtctggtgacaaggagaggagttgattggtcacatgtgtccacagtcagatgcccagcttcctgtctcgttcttagatttagtctaagaccctaacccatggaatggtacccactgaccatttaaggtgagtctttccacctcctttaagttaatctggaaaatatttcgctgacatcccagatttagtttccatggtgattctaaagccagtcaggctgacagaaaagattaactctcacacgaaggaaggtccaggccttaccagacaaaccaggatcatgatcactgcagaaatatcagcaatatggacagagctacagaagatgagagcacagcttgtgggctaatgacaaagaggacagtgttgcaaccaggcgacttctcctggagttttctctgttgtatcccccacccccacccccccgatctcttctctatttcttgtcagtttagctaagaaccttgtctgtagctttttttctcacctccttccccttttccagtgtccccacccccttatctcctcttcactcccagtcaaaatttgtgaaaacatgaatcatggtagaacagggttctttggcagtgtgtcagactgactgctcattaaaaaaaaaaaagaaaacactgaacatttatgatatacagcaaaagtcctctgcatgatttctctgcattttttaatgaactctgtgtcagccaactagtaccataaaaatcaccttagtatttggttgcataccaagacggtgctatcatgatcactgatttacaggcaggctgaatggctcttttctacgtctgccccatttggcagggggtgggtggcgggtgggcttaagtgggctccccgaatcttctagtgaggcatctgtggaaccataaggcacttccaaccctccaaatacatcccatttctgcttgtgtgttgccctcgatcgtaccactgttgaacgtctatcttctttgccatagggaaataagtctttagaggaaggaaggaaggaaggagtaccaccaaggtgtttatgtactgtttgggatgggcccttcctagcatctttgtattgcatttgttattaaaataaaagcgcgtttgccttgttcatactgcatctaggttgatttgcataaagtcatttgaggcacatttttcctggaatcagtctccggtgggatgttggtctttataatgtcccatgcgtatttggtcatctcgttaacattaatgtgtgacagccgctttcttggttcaaggacatgaacatttctacaaaataattaaatttccttgggatgttcaataatttttctgagatgcatgattaaataatttgccattaaaaaaataatgtaaataaaatattgaggttgtaggccctgtacattgcaaataggcttgtggcattttcttagcatgttatagtgactaaactaagttttacattatagaaaagagtcctgtatgttttttaaaaatatatacttaatttctaatctttggtattgattccactgtcagttttactccagtttttcaaatacaaatcaataggagaggtttaaagagaaatatgacttttcttattgcaacctgtagattgtccatttgatgctttcatgaaacttctgtgtacttcctggcctttacatacttttcttttgtatcttaacatctattgtattattaggtgctgccgtcttggttccttaataaggtttttatgggaatgaagttcttagatggcgtgagtaatccaccattgcctaacagtatctgctgtagtgctgcttctctttgctgagttttctcttttctttgaaagaattcatacatctctgatttcacttttataatggattttgcctaccagaaaattattttctgaactcctgaatgggtgagtggcttgacactttaatctgcacagaccttaagcagaagaagtctttttttgtttgtttgttttgttttgttttgttttgttttgttttgttttgtttttgacacagggtttctctgtgtagccctggctgtcctggaactcactctctagaccaggctggccttgaactcagaaatccacctgcctctgcctcccgagtgctggggttaaagtcatgtgccaccactgctcggcaagcagaagaagtcttaaagaactttttaatgtcaggctgggttttctagaactcttatgggaaattagatttggagatattaatgcaaagaacttccatggctttttttttttttttttaacggaagcatctgagaatctcctgtgggtggcgtacactttgaccactctgtcacttaaacatttcaagggtattttctaaggaagatgatgttcccctactataatccaattcaggaacgtgactaatatgttgtcatccactgagcagcttcctttgcttctccagtcacctgcactgacactctgcagggcacccagcctctcttgttgcgttgtggggcaatacttctggatttcccttctggaagagactcaccctttgtttttggtggtctaggcatcttaatgatgaccgaacaactcacttgctctggatggcttgcttgaggttgtctggtcagtcttcaagattaaattcaggttttgtacttgtgtcaaacctgcacagctccaggctgcagtgtgtcagcaggtgcatgctgccatttttgtcttgtcaccagtcatagtaacttagatgtcctggttaaggagggggcttgctagtttccagtacagagctaatttttctctttattcattgtagattgaaattttgtaaatactccttttctcagcatactctcgaccagtagttaattaagactacccgcaaattcccctcagatttggtaaaggggaaaggagaaaccattttgaagtaataaatcaagagacccacgttattgtagcaatgaggcttgctttctgtcttactttttctgtactttagttcatagtgctgttccacagtttgtgagaatcaggttttaagaaataaaatagaagggcatgcagtgggaattgctgattgaagatctttgcaagcactggtagtagaatcttgtgccgtccaggttatgaaattccctagtctcacacactgtggagggaagtgactgaagtggaccaaaccagttctactgaggctgttttatggcagtgaggttggaggatcagggggtcttcttgtcattggctgcatccttggaccctgagatgtactcgctggtttcataggcagcctgtgacatacacgcacatctcctaaccatcccaggagtgcgcccagctcaaacaggttcagattcttgcagaggcatgatctgagacgatgaagacaggttgaaaactgtgagctcggaagctgcttgggaaactctggaagctgggaatgaaaaacgagagtccaggcgtggtggcactcacctctaatcccaggtggatgcctgggagttcaaggtctgccctgatcttcaccgagttccaggtcaaccagggctacatagtaatgccctgtcttaaagaaggcagctgtagagaaacgtcagagttgcggcagggctccctgatatgtggtgtctttccttgttcaaaagagtggtgtttttattctgtgtcttccaaggcttacctcttctcttctctcctctttctttttctctttttcttaaaaaagaaaaacaaaataggttcattgtttctactgtaataattctgatttcttctctgccctctagcaccagcagacatttttgaatcagctgagagaaattactgggattaatgacgcccagatactccaacaagccctgaaggtatggccttagcttacagcttacatctgcggcgtacttttctctctcttgtgtactgtattagttaaaccatatatttgtagagacgggaaagcagtctcttataaagcgagagcctcattttgtgtgttgcaattgtaaacaagtaattcctgctaccttggagtggtgtgtagcccctctatagcagatactttttctgcagaatggtagggcataatttcagtgctcatgaataatgtttttcaaccatgatttagtatatgactgcggttcagtgtatgggttaaaatacaatgtgaagaaggaacacaaattagagaagcaatagggcccacagcttacctctttttctttctgagactgagaaatatatattgctttcacctatcatgttgctcatgataacttcatttagttaagcatgctgtaaggatattccacctcaaatttcagtagcgtgtgcatcaaagccaacgtgccatttggttgtatcctagatacactctcatttccttatggagctgctcagatgagtcaaatcccgtggctagctcacagggagaaggatgaagccaatgaagtgtatgcttgaaatagaactgtagtttgagctcatttgtatggaacatttttatcaccttagtcacaggcatagatgggagcctttgtaactcatcgatgagagaaaaagtcaaaacggtccctgattctgagctagagagctttaatttccagagatagtttacgattttaaagtttttgatggttatgagcaaatatcaccaatgatagcaacaacctgcgtttcagttcctcatgtgggtttgttcatttagtcttatatttccaagagataaatacttccatttccccactttgaaaatgacgaaacctaaaccgttaagtaacccactccaaatcacacagcggcgtgtggagaggctggaaacaggagctacagcagccatcggccggtgcctgactaaggctgtgtctgctgctctggtgggagctgctgctttgtcctgtttgccagaaggatgctggcaggagtttatacagagctgtgcatcttgtcattggaggaagcagcactgtgcagtccctcagttcttaggagcacgtctttctttcattctgataaatacctgaccaacccactcctttcccaggagatcaccgaggatggagggtggagggtgagggtgagggtgtagcccatcacttggctatgtgcatttggaggagaccccctccctgttttacatttgagaaatatagatcaattaagtcttgtccacattccttaagtgtaagcggtttttcttcttcacaaacttacatttcaagttaggtgatagagtaaataggacatttaaaccccaactgatagcctttctgatttctcaagggatttagtaatgaattgattctcttaccaagaagtcccttgtgttgggaaccacagctactgacttcatcactgtaagctgaacatgctactagctacttcccttaaccctgcccaaatacctgacaagtggaacttgggatggctggagaagtggctcaaggcgatgagcattggctgctcttgcataggactgcattttggttcctaacacattattggctttctccatctctactgggtcagatctcctcttctggcctctgcaggcactgcactcctgtacacataaacacacatacacagacacacacagacacacacacacacacacacacacatagcttttaaaaagccaagagaggagggtggattcgtttcggctcagtttcggctcagtttacgagtgctgtctcgtggtggggattcacagtggcaggagcgtgagggtgcctgctcacacctcagcagacctgaaagcagagctgggagaccctccccgtccacacttccctgagtttacacagcctgactcctgagaaagtcactcagcctccccaatgttgccatcagctgggtactggtcttccaactcaggagcctgtgaattacattttagatccaaaccataacaagaatctatacttagttatacaggctgaatagccaccaggttgtaaaatccctgctgtgtttgggttgaagcacttagcaggtttcttgacacacagtaaatacttcctcagtcttcactgcagttcctttggtgagcagtgtacttgcctgacagtggcctctcttaaaggtgcctcttggaagagtcacttagtctcataatgtacataaaggcgtcacacagtgaagctgtgttgttgccttcccaccaccctctcctcagctccctgctagaatgagtctgcggcaggaattgcttcttcattcttttgcctgttggttattttgcaattatcttcatcccagaattctctcttctccttaataggttagcagggatttctcagactttgcttccatagttttctttttaatgcatagccaacacaagctttttaccatgaacatcatacgatgtccaaagtgttctactgcctttaaaagcaaaacaaaacaaacaaccctgtgaggtttttacattctagcttctgatacagagatgacttgatttatctctgagttcattgtgctgcctcagttagctgccttgggatagtattacattttacctatcattagtcctttagagattctgaagacaaaactgagcaaccctcctctccttgctttttcgaattctaaatgaacatttgcatattttgattagctgtgcttttgatgagcagtgacatgtgtgtgaatgtttgtgtgtgtgtgtgtgtgtgtgtgtgtgtgcgcgcgtgtgtgtgtgtgtgtgtgcatagttgtcatcttgatggcagtaaccatttctgcctagcaattctccctgcctctccatcctatcaagttctaaacctctgctgtcctatgaatccttggcattttgctccagtttgttcctagctgtgtgtccagtatccgtgtgagagaagctgtattttaacaagtcacttttcactcttatggaaccccccccccccggggggggggtgcaatctagattactcatttgtttcactttggaagctcatgatttgacttttctaaatggataggaaagtaatagaaaactaagaaaatagacaattgattttagggctgtattagatgtcttaataacgaatatcataaattatggataataaaatattactattaagttagagttgtattaaaataatttcaaatcaaaatgatttttgccacaaaacattatggataaaattatgtacattttgtgtgattatatatcattattcgaaattcattgcgtgttcctttattgatatttgaaggatagtaacggaaacttggaattagcagtagccttcctcactgcaaagaatgccaagacccccccacaggaggagacaggctattaccagacagcgcttccaggcaacgacaggtacatcagcgtgggaagccaggcagatgcaagtaagtttttcttctcaatgttttattgatacgaattaaacttttttggttgtcaatgtattagttttattcactaagtgaggtgaagcataactacaaaaataaatgaatataaatttttattagtgtttttttctaggttaaagacaaataattttatttatgttatctattatgttttgaatatctcatatagtctacatgcctttgaaatatgaaagaactgtgtgaatcatattcatttaaagtatagaattttaggagggcagtcatttacatttttcagctttcagtagaagctgagtattgcgttgagactatgtttatattatatgagaatatgtttagtgtattataaaactttcctccctcactccacattaaaataaagatttgcagagaagctcatcatgttgtaatcaagatccttcattatccagaatgaaaggcacagtaaagcttgagcgagttgttgggagaccccatccactctgaagtgcaccttcagtgacttcagtgacgcatgaaagagtcaccctttcactttcacacttaagtcaaggtgcatgagagactttgcccaaggctctagcctatcccgatcatgtgcatattgtcatgtagcactcacagtttccagtgtatactcatattcccaaagccttgctattgttcaataactgtggtactggtggtatggttaaagtatgtgcttgactgtggttttattattaggctccccaaagcacaaagctggtgtatataaaatgtaggcatttattctcatgcgttctaggtttgagacacgagatcactagcatgtgtgaggagcacttctggtttcattctggggcagtaataattaggaacgcagcaggagagcccatctctcacttcctttccatgcagctaacaggcaataggagccgtactgcttgcatgagtgaggtgctctggcttatgtcaagttccggacagactttgccccacttcatctctggtctctgcttctccccttcctttacactctgacaatgactcaacctgagttgaagtcacagcacccacaccggagccactttgtctctcagggtaagctcttgctgtttccacagttaggaagcgtcttcaacctttctctctctataggttattttcatcttagagttcagcagctacctggtcgagaacgttttctcagtcctcttgcttggaacaactgtgtttcctgcatccagggtgtgcttcatttggaaaccacttggacgaacagtggtgctactacattttgtgtagaaaaatctcaagactaagaaaaggaataaacttgagaaacctatcaatgttagaagagacggggaggaggagagaagatagggttctaagtatgggaaggctgtgtggttgagactaatatccagttctatggggccaaaaggagctaattacttagtttttaaaaaagaaaaaaaaatggaaggaagagaaaaacatctggttttgactgaaggcaatagttagagatgcaaactggcaggtagtccagtttcgtgctgtaattggggaggtaaggttttttagaaggacacttgtgtactcttgctgttaatgttatgtttatgaaacaaagctcaatggacaaaggggcaaaagtggaatcctgagactgccataaataatggaaggcttatttgctgtgcaagaggagaaagtactacataagctgagcagtaacacctgttcaagacatttgtcaagggccagtgcaaacgctgtgggacaccaatggtgacctgcataggttcccttagagagaacacagcccacattcacaaggctgatgtctcctgataaagcacctactccaagccccactgtatatgtataaccctagaaaaatattgtgtgacttggagtaaaaggtaggtgattgaagtttctggttatcattttgaatgccttgtttgaactgtggtttcattataaaacgcaccgtgttaagttggaagctcaccgggtagtgtggccattgccnnnnnnnnnnnnnnnnnnnnnnnnnnnnnnnnnnnnnnnnnnnnnnnnnnnnnnnnnnnnnnnnnnnnnnnnnnnnnnnnnnnnnnnnnnnnnnnnnnnnnnnnnnnnnnnnnnnnnnnnnnnnnnnnnnnnnnnnnnnnnnnnnnnnnnnnnnnnnnnnnnnnnnnnnnnnnnnnnngtgcttgcacaatgaccctagtagtaatattcgtttgtactctgttttgtaaacttattgaaagcatagctcttattgaaagcatagctcttaattcagtgaacttagtgagatttttgagctatgtaaagatatacttatgtttgactctgaatttattgctgagaagtgaagggtctttgtgtgtgtgtctgtgtctgtttgtctatttatggagtggaagcttatgcatgaaagaaaagatacacgactggaaattgttccaaatgagagcctgagtgcagacttctctgagtgaggaatttctcaggcattgatgtggaccgaactgcttcactcttgagcatgttctcaattttctttgcagtacattggcatctgaaactctcccatagtttgttttaaatatggaagttttattttcagtaaattattactttcttccttctccttagccaaagcttgagtgtaaatgaagtcatgttcccagcctactggcctcagtactggcaaacattttttttttactctgtattaaatactcctatgttcaacgcacatgttactgccttgatacaagtgcacatataaccacttgtgctctatccctcctttagagaagaagaaacagtgatgctttctagccaggccacttggtgctacgattgagttttcagttatgcatcttttgacaaacaaaggcaattagaagttatgttccttgatatgaagaacaattatatttgggtccatttctgttatactgaagaattaatttaccttttcaattcttttaaaagtggacccatctcatagttctagttttactttttatatttgagtgaaaaaaattataatttcaaggacacttgtactctgaacttcagagttactgaactgggtgcccattggtagcatttgctattgtaatttaaaactgtggtgtattccgggagaaggctcaagttatttgccatataattagcaaaaactctagacctattcataacttggataatcctgacctacgttagcatgcacaatgtcaaaggaatgcctccagctttcagcttacattgggaatgaaattccatgagatcatggcagtatcatctactgctgcagagtatactgcccaggtatgggggtccgagtttgaaatccctaaatccacatagaaagcttgtgtaattccagtgctgtggaaggcagagacaagaggatcactggtccttgttggcttccagcctagatcagtttaatgatagaccctgtcttagggactagcctgggatggaattggcgagtatacctgacatgtgcctctgaccctcccacatagccaactaaattagactaaactacagtgcacagtattggctattataattgtacgtaagagtcaaaagagtaactgtcatggttttgggtcttggcacatactgttttagccatgacttttacaaagggttttgcccagcttgaaacttaatattaacacttttataccacacctattaaattgttttaaactttttcaaaataggacaaaatcagtatatgtccaccagagcaagatgcaccacagttgagcaatcaaaatgtggatcaaaagataagagggatttgggtaggtaatcattccgtagaaagtaatatggctttatttacctttagagaaactgacacaatgctttgacacaggttctaattaagtactatactagactcttcaaacacttgaattgctataggtgtcctccctttatgtaagcggaactgtgtaccctggaacttagggaactgtcggttgcttggccaaggttgcttatagcttagatggtggtgggagcagagtttgtgttctcacctctaaggatacttaccttttcccattcctcacagttgtaaaaaagcaactttaggtaggaaaacaagaaatcaattcaatggaagttacaactcttgtctagaagtttccgttgcatgaaactatattggctattcaccgacagccaaagttagagataggttaggatggtctgaagatgtagctgatgagatccaccagggcgtggagagccagttaggtaatagatgtggactgtggaatggcctggataactttctaaattcattgcattcttttgcaagtgcagcttctgttttctaggcctgtgcagtgctcaagcactacagtgcattaccgtaatacttacagtagcactacagtgcattaccgtaatacttacagtagggaggaactggagagtgtatgtctgtttatataaaagtagtttgtaaatgtgttgctttttctgtcctctttgtagaagatgggaacatatactcatatcttattaccgtcactacacatagcccacttttaaaattcagtttcatatttgggtgttaaatttcatatgttttggtacatacatacagattttcaataattttaggggcctttgtaagccgttgaaagatacaatgtctgcttgtggagggtagtgcggaaggggaatgcgaggtctcagaagttgacaaagaacagaattgccgggccaggatggcgacatgggtgtggctgtggttgggaccaggagctgctattttaggctctgtccttagagaaggcttcttgggtgaggtgacatttgaacagagacctgagggaggcgaggaagggagtcacagggctgtgtgaggaaagtgagtgccagcccagcctgtnnnnnnnnnnnnnnnnnnnntgccagcccagcctgtgacaagaatggggtttggctctcggcatgaccagtgacagcaggtgctgaagctggacttgggagattccccgaggtctcatctgtgccttcccgtcttagggggctccggtccttggggttccccgaaaacaagcggtgcaatgtacagttctggttttgcattccaacttgttgcttcaactctcctcggattcattatctccttctttcctctcagtcctggggatgaaaccccaggccttagtacatgtgaggcagccttctaacagcctttggatcacccaggtctcctcaagttcctgttcagggttttcctactcaactgtcccccttgagcctaggagtctttattggtgacaaatataaaattcatttatcacacaaaatacaacattcccctggacttaacttcatgtagataaagacataatgaaaacattcatttctcctttgcagattaaaatctttgcattgtcattcaactagactttgggttaaatgatgtacttgtaaacaaacttaattttttgttttgttttgttttttcgagacagggtttctctgtatagctcaggttgtcctggaactcactttgtagaccaggctggcctggaactcagaaatccgcctgcctctgcctccagagtgctgggattaaaggcatatgccaccacgcccggctacaaacttaaattttagaatgtattttcatgatgaagtgaattacaaaccattcaaggactgaaagtgtgtgtaaaaccccataggatacatgtatttgggatgcagagaaacatatatgtatatataatatgtatatcaatttcatggtagtttcttagagagtaaacatttataaatgagaggatcatgtgctgtacttctgacttatgaaattattttaatttagacaatcttacaaatgggtatacctgctcagaagatgatgtaatctactcaagtggtatccagccagcctgtctactaagtagccttgtcctcacagtggtagtacagggagagtaggtagctgaagagtttgcaatgtttttctgaaatcttagcatggcacacatataagggtataatgtactggtatttggatggatttttttccccaaggctatcaattttaaacttacttctgccaattaccaattgtttatagccaaattaattctgagctcttttttataaccatatggaaaatgctagttttcattctacaactgatagctctagcatttaatatactcgctgtgctattaattcctgaaaaggaagttcagtgaggcccgagactggatttctcagctgttcatcagtatatgccagaattcaaaagaagtaggcttcgatgccagtgaaggagtaggtgtgctagcaagggcaagagcaagagcaagcaggcagaggagtaggcttccttcttccatgtctgttataataggctgccggcagaaggtgtggcccagattaaagatgagtcattccatctcaaagtggatcttctcgattcaaatgatttaattaagaaaaataaaaatcctcacaggtgtcccagcctctttggtttgttttagttaattccagatgtagtaatattgataaccaaaaatagccatcacaaaagaaaaaaaaactatgcatgaattatagaaaaagttgtattttacttactaatttcttattaaataaaatgatacttaaaatctagataattcggtatgtacttaggtcataaaaaaattcattatgaccacagtgttggaaaaccatgggagaagacaagcggctttatggagagtcatgggaacaccatgaagaatattgtcattacagtggctttacaaatgagaacttttcctttgctggaagaaaatgtttcagcaaaggcctggtggtatctgatctcagctaaccctttccatcattaaaatgttctcttgcctaataccaggcgaggcaggctccagttcccgtctgggttacagttgttcctatttgtccaacccctggaggagtagagatgtggtgatagagaagggtagcaagaagcactgagcctggtcctgggagctcaggcaggttttgcctttgataccaatggaaggaacaagtgtcttttgtttgtgatgctgtcagggcaaggcagacagtatgcatgtgtgtagacaagaatgagaaagcaggacacactgggttgggccacagtgtggaggacatgagcgtcgatccagagctgctgcacacagggcacagaggtgactggcacagagggcttgtagcaacatttgctgacgttcaccaggtgactgcacttgatcttgtctcaactcagttgtaaaagccagattacaaaagctcccaccctatccagccaaaaatattggaggacatgtttgtatttaataacgcggcacacgtttgatctcaggactcctagaaactcacaaatttatggtgcacttccaagtgcttttgttgaaatagactattttctgagttaaaacttaaaattcagagaagcttaggaaattaatttttacccaaatagcaacctattatgtttctataaacattttgtataaagtatatttctgaaacaaattagtgggagggtacatgctttcctctgttgaaagtgtctctatgtatggtgttggagaagagctgggatctcaggccgggttggagggactgcattctgcattctttatgtgaggaaagcctggttttatgcagatgttcatttggaaaagggaagaggttttaactgattattcaaatagtaacggatattttgtttactatcccaaaactcggtggttcttaatttttgaagggtgagttgtggtgtgaatgattaattgctttccctctggtgctgttctatattacagtctacccctaccgtcctacttgaatggatctcttacccatacatgattctggaagactgaatggataattgcacgtctgtctgtattatgagagactactatgttaaaataccaaattgttagcaggttatgaactggccttagcagaaaagcctttagactctgagacactatcagaattatactaattgaaacatatttttgtttcaaaattctgagcttggatgaaagtttcttctcagttattgacaacagttaaagttactgtgtgtcacgggggaaattgaagtttggcattcataccttgtagtatgtcatttgttctttcagctaaaaatggtatgaagaatactaagtttgcaactccagccttggacaggctcttagagcaggctttcacatacatgctctgaatttttagtcattaacaatttaagaaccttgtaaattaagactcaatgtttagtaaaactacctttttttttggatcaaagttataactcgtaagagaagctgatttttttttaaaagaatcaactgtgtttatttataacccaataaagggaatttcgcattggttctggtgccgtgatttgtgctaagatgcaatcctttgctcctagcattctgcgtcagcaatgcacatatcaagagcagcagagggattgcacatccatattattatgatcatagtctttaccctcatctcttcttgaaagtctgttaggatgaatagatcaggcctgaagaattgattgtggggaaagagggatggaagaaatgaaagacttagaattggagcctgtgtaccactcttatccttacacttatggcataggtctaacggtgctgtcctttccgatggcttacttttgtgttaattcaactccaattcatagatcatgaagagagcacgtgtaagttagtgcctttctaagtagtcttctagtcagctagccatgaaaccgccaatatgctctataattttagagaaggaatttaatccaagtgacctaaaaacatctcgcatgcaattgagggaggggtcttgtgctcggctttaggcagggactgcagatcattgtaggactgaccctcgcagtgcttctaagtcctttgccacaccaggagaacaacctggagggtggctctgatcgagtgcatacttcttagtacatagctttggcttagtgaatagaaagctcgatgcttaacctccgagtggcttcaactggatattggaatgctaagaaaatactggtttcactctgtgagtgagctttatacagtaagacattggctactggagtgctactatagagcaacatctacacatccattaaagattggaaaaagcagcagcactaagatcatggtcactctgttgcttctacctccatagtctcctgttagtaatggtattgatgtgacctgaattctattcataatcttctttacaagtgaatatggaagacaggtttgtttgttttctgagggaaacacaatagaagtatgggggaatggaatccatgcactaattgatcctgttcctagagcttggctttctactttcctatttcaaatttatttcctccccatcactctccgggttctagccattttaattactgcgatggctcttgttttgtgatgcatttcataccacctacaaccttccccccaaccccatccctttgtctccattattgagtctggactgggaagcttgaccttcttatagctctggcctcttatagctccatcttctttatagcaccattctccacatagctcctctttacagccacagcctccttagctgtgtcctgaggaccatgtgctcagtcacatgaaaccatgtacttgatggcatgtgagaggtcccatcattccaggtactgtaccccgggactctgtactgtatgcttcacctatcttcccagctgtgattaaatacggtgtagcagaacttactgtcttttatgaggtttcattgtatatgaggtcatttaaagaaccctttctacagcaactatgtctaatattttaaaagttcttgtgtgctcctcttggagaaaaagtggtaggtaacaataaaaagagatttttgtaattgttaaaatgcagtgataaaattaaggcagcttttcccatttttttctcttctttttcttttttcttttctttttcttgtgtaatattttaaacatacttaaggtttaaggaatatgaatatatattatgtccaaaacatgaaaacaattctgattacccattctttttctcattggacggatttattttactgcttaaattgtaataacagtatccatcatcagcgtcgtctctgtcgaggaaactgaccagtacacatcacagaactgcactgagcatattctactgaagttgataaaagctgcaggttttagtcattggatgtagaagtagaacttgtaatgttcaagttctcttaagaaatgggggagacagccagggccacacagaggaaccctgtctcaaaaaaccaaaaaagaaaaaaaaaaaggaaaaaaaaaaaaagaaatgggggaaatatgttcatttgcatatgtctgtgtaagtaaaattcttgttttcaatgaaaggaaggatttatgtcctaatgtaatcacacggtactgaagtgtaaagaatgaagtggcagtgccttacagctccctctcctacatttctcactagagataacgacttttgagagtatagcttattctcagactaaagaacacacacactcacacacacacacacacacacacacacacacacacacacacacacacacacacgcgtgcgcgcgcgcacacacacactcctatgctgttctcagtcagtgtaataaatacatgaatcagagagcaccagtgtaaagttttctagtgcttgctctgctctttattgataagccatactcccagcagtctttctgcttatttgcttttaataagagattgcatagttaatcaacaaataccaaggcttttctagatttttctagaagaaactatgaagttaccgagagtagttaatagtagctatgtttggattattagatatatgcatacttacaaaattagacaattaccttgcttctggcttttagcctgccaaggtttattacgcatgacgtctctgtgataggggttcatttttatttgtttgacttaattttgagaaagatcattttcttttcagatgtaattgatctcactggagatgacaaagatgatcttcagagagcgattgccttgagtttggcggagtcaaacagggcattcagggagacgggcataaccgatgaagagcaggccatcagtaggtaaggacagtttgtgccaagcctgagtgtgtgactacttctatattccagaaaaaaagataaactttaactttaagatcaataagatatactttattctgaataaatcattaacatgtgcctgtgttctttctatgctttatataataaaacattatttggttatgaaactttaatttattttgtaattgtgaaacacataattttgtcacaaatttatttttttataatttttttcgttttcttctgtagttggttgaatctactttccagttcacttttagaaatgtagtaaatgagatgaggtttttgcttttttgtttttgcttttttttatttttttatgagccaatggtaaatattttgaacatatggtatgtaattatgttgggtagtgatactctttaatgcctctgtatgcatgtaagccatggtcatatgtatctgtgtgcggaggctaaaggccnnnnnnnnnnnnnnnnnnnnnnnnnnnnnnnnnnnnnnnnnnnnnnnnnnnnnnnnnnnnnnnnnnnnnnnnnnnnnnnnnnnnnnnnnnnnnnnnnnnnnnnnnnnnnnnnnnnnnnnnnnnnnnnnnnnnnnnnnnnnnnnnnnnnnnnnnnnnnnnnnnnnnnnnnnnnnnnnnnnnnnnnnnnnnnnnnnnnnnnnnnnnnnnnnnnnnnnnnnnnnnnnnnnnnnnnnnnatacgttataaaataaaaagttatacttgccaaaaaatgcaatgaaaagtgcacataaacttttgtttatattagcatatgaatatgaaactatctagaattttatatcccagatttttgtcctgaaaatgtctgcatgtttattgggttcatatttacattgcctccatgcaaatgcatattactaaggtatgctttttctttccacttggaatccctgctgcttctttacatgtttatttcatgaaaattttgagacagggtctgattgtgtatccaatgttgccttgaacttctccgacctctccttatgagtgtgtatatctgagtgacagtctctgtctgtctgtctgtctgtctatcacctatctatgtattggggaactgagggtgaaaaccatgtcactgagcatgtcagtacttcctcttaccaacgaaacgacgctatccttgcagcctctgtcagtgttttctaactaatacaatataatcttattgaagttacaaactgtttggctttgggatagttctaagaaaggggtgaatagacaatttcatcagaatgtgattacaaaaacctagatgtcatgtcttaggttaacaacagctccagcccttgatgcaggcaagagacaaacctgagacttccagtctgccagattactgtggcattcattttacagtatgccgtgtagtgagttgggatactttaaaatgatgggcatatagtagtagcatattgaaagtataaatgcggtgtcgtagatgctgagtgctgagagcatagttgctccagctgtctataattgcagttgctgtagttttaaggactggagtacagtaagtttgtttatactgtgtcatcacacaaacatgcctagtgttaggctgtaacacagtggttacaaggccactaggcaaaggaaatttcatctgcattgtactctcttagaaccacagtggcatatgtagactaatcttcaccacgtgtgtgtgtgtgtgtgtgtctgtgtctgtgtctgtgtttaggtaattgtgattatattgctagtctgattgagacattatatttgaatcttcttaggaaataatctttacttcacttgatgtattggttattgccactgccatgttcttaatcacgtccaacggctacttgagcaatgtcattatcacatatcacttcattgaacatattagagctgtgtaacaaatccatcgcatgctgctgctttgaggggtctgtaatagcatagctctttttcaacaccatgttttcatttcttaagagttcttgaagccagcatagcagaaaataaagcatgcttgaagagaacacctatagaagtttggagggattctcgaaacccctatgacagaaaaagacaagagaaagctccagtcggtctgaagaatgtcggcaacacctgctggtttagtgcagttattcaggtaagggtggagctctgactctcagtcagggggcctaaggagcgcctgaggggcggggtgggatgtttcttgttacatttcaagtagaaactcaggcagggttttcatagatgtggcataaagtagtttgattttagtatcccctagaccgtcttgtctttaaaattcccagtgtgtcttttgttgttgtcctttttttggtttgtgtttgtctttatttcctgttctttgttttagactggttcttgttctatagcgcagactagcctagaacataagacctgctacttcagctttggagtgccggggttataggtatgacatctggctaaagaaagatttcattgttttaaaaagatttttttttttaaatttaattttcaaacaagatctttctatttagcccaggctggcctcagtactgaggttacagggtgcatagcacaatacctgccatgaagtttccaatatgtacaacataagttatttccttccagttatataagattaatttctactggcttcttgctgttaggaattggtgcagttttattgattcccgaagaggtagaaagaagataatcttgttggtatatctattctgaaagtatagagaataattataaccaaggtaggaaattagagttaactttttgtgactcagatcagacttatttatatataagggaaatagtcatatttttacatgactacatatttacataattacaaattgattctttaaagagacattttgtttgaagctggtgttgatgtacaaatatatcactggacatatgcgagaattctaaaaagaataaacattgataaatcaagattaacacattttatttttaccttagaaaattcttgtggtatgttttattagctttctctaaaataggagatgtttgtaaatacacatacccattatcttctcaacaaggaataattttttgtaatatatttagtgtgatctctgatttccaactttttatgtagtaatgatgattgccataattctttcattctctgttggtataaatagtttaatttcaaatttaagtgactattctctagatattttgttaaatttcataagtttcataggagagttagaatggtttgatttactattcctaattagaatcattgggcctatgtgccctttggttttgatgctcaaaaagactattttgcagcttcctgagtctgttttgtttttatgattgcttcagcttgcacacggtgagtgtcagaagtatttcacatcgttcattttctgctagtttgtctgtcattgctaggcgactcatctgtgattttaatgtttgtttgtttgtttgtttgtttgtttgttttttcatttctacaaagtgtagtataggtttcatgccccaccccctttgcttgtggcacacgtgcaatttaggtagattccttttggttttctggacttaacgcctcattctcattgtgctggaatagacactgataaagaaaacggctcatcacttgcttttctaatgcattagcagtctaagaaatatctggatatctatgcatgtgtagcaattctttgaccgtaggctgcactctgaatttttcattcatgtgtgtccaaagcaatagttaacatttacttgatcctctggagtcctgtagacattacaagctgtttaggataagctagtctttagagatggcttctcttctcctgtctagcagtggcatagtttagaagaacagatgtaaagctgtggtctgagtgttcctgaaagtgctggcctgccggcatgccttctacacagcactgtgcgcactaatgctcgtgactccgtggtcaggccattttcactgagacggtcaaggagaggaagtcctccaagcagcattcgttagctagataaatgctgttcacttctgacaatattcatggaaatttccatttattcccatttgaagtaataaattaacagagacaaggaaactctatctttcctattctttttctatttcagtttaatgtgacaaagaaaccatccacctaccctaagttcactagatgaccaaggttatgtgtgtgtttaaaaagtgactcatttttccttcatagaaagtagtaattttattagttttaatattttatttaagtttagtagtgactatacccacgatagcaaatttagctacttaagaatatttgatttctctagcagaagcctaaactccccatacagataattttctaccttgagaaggttaggttgtcacaacctaataaaagtgacttttaggaaaaatataaatcttcacactggaaatctgtgtagggagttaattccacaagttcacataaagttgtatttttaactgtattttcaatgttcaccattattttgaggggctttttattttgatgtttaggaattttaatctttaatttttctttttctgatattgcttaattcttaggtgtgagctgagatgtaattccttacttataaatataactctcagttaaaattgcctccactgacattcaaagctctaattggaatttacaaagtccgtgggaattccttcaaactgataagtgctccgcagtttcagttcccaacatctcagggttggagctcactcagcttgcagttatgtgagaggatgaaggtggatgtgtccctgctgcagctcagcacacagcagccgctgcttcccgggtgataggccctttaacaggctaggagaaggaaccggccagcttcaagtctttccttaggaaatgtttataaaatggagagaacgcagtttcttttacacccactccaaaggaagttcaaagcacagcactggggttctcattgttctttggcagtgtcctcacaattccgcacgagtggttcatacctccaccttaagcttttccatagcgttcttcttctactgtttctcaagaccgccatcttggtgtccccttagacagagcgtgctatcattccaaatctctctactcttgaactgtcccagcaagttcctgtaccggtcttccactctgtttgcggaaggtcccgatgctcgatgctcgcccttttctccttggatgtcctgcacatctgaaagcttggctttcccgttttccccttgctgcttcattgccttactcttgctactacacccaaaacctttttatttgtttaaactctggcgttaaacttcttcctttctgcttcggttctgacctgaggctcttttcctttcctctctgatccatgcgcctcctgtcacccatttagtccacagttgcatggtgatccacctcatgtaagacgaggtgcccttccttctttgccctgtagcactcataaagccatgggtattctgtaagtatttattaaatgtatggaaaaacaacataggcacaatgctcctgggctcccatttttttcaatggtccactcagacgaatcattagagtttagtacttagagccatcctgggtggcatgcaagaccccttttcagaggaacaaaaataacaagaatagaaaatgaattattttatgtgctcataatatgtaattaaaacatcttggctggaagctgggggatggtggctcatgcccttaattctagcactgggaggcagaggcaggcagatctgttgaggtcaaggccactctcttggctataattagagttccaggacagctagggctatacagtaaaaaaaaaaaaaaaaaaaaaaaaaaaaaaatcaaaaccaaagcaaaacagaacagcaataaaccaaaaaaaccacacacaacaataacacaacttgcctgggcattggttgtacagggctttatctcagcactcaggaggcagaaacgcgtggatctctttgaattcaaatgcagcctgtctcagaccagcctgggctatgcagtacaaacttccacaaaacaaaaacaaacaaagaaccaaggaaagaggagtgaggttgcaagttgtgacagatccacagatcccgtctggtgtcccataggctctgctggaaagtgctttcggcccttcgtcccaggcttcccagggcttctatttgcccaactcctggtttttctttcattctgttgttgtttttgttgtgttttgttttatttttgtctttatgtttttacgcaagtggtgaaccaggtttaccaaaatttatctacttaaaataatttgtaatcattgatttgtgatgctacttttatgctctataaagtaatccaatttatatctcctaaaagttaatacattgttgctgatcgtgtcagtttatatgctgtatcaaatgtgactcagaaagaagtacacttacactgtattccctgaaactctcattcaaaattattttttaaatgagaatattattttagaatatataaagaagacttttctcatgaaaaaagacatccttgtgctaattgcaacagatctttttataagtagtagaattgtcaagaatgagccttgagaacattgatattcacaattccattaatagaatttttctcttaggtatcttaaattgttctttttcagtcattattcaatcttttggagtttagaagattagttctgaattacaagcctccatcaaatgctcaagatttaccccgaaaccaaaaggtaaaattataaaagattttaaaagctaagtgttacggtcctcatgctcttttctaagtattttggaagatcttctttattaaatctgaaactgttcacattttcatgttatgccatttatctccattacattaacttcctatccccttttctgtatcatgaatgtgaagcgtctcctcctgtgtgtcacagtagcacagcagttccagatgctcaggttaggaccccttcgctttcaggctgtcaaatgagaagacattcagaggtgacctgctccaatctaggtctttccttaattgactcctcagtcctctcatcagcatcagcgtttcttttcacctcatcatccagaaccatcctttgaaccggggttgtgtgctctttgccagggcacaggtatccctcgtgaatgggaaggtagtgttgagcagctgaggctgactaagagagcagactccagggtctgattgcttgggctttagctatggccctaaagcaagtcaggctacttttctgggagctccttctctgtagcgttgacagtaacaacagaggcgctgagcacattaatcaagaaacatgtgaagcacttacaatttgtcagccatttgttaagaaagttttaattttataaatttaattttaataaaaattggactgatttgtatgcatacattcctacttaatgagtaaaaaccttgtgtagggggttgatttagtttggtgcaggtatcaggtaacctccagtgaggagccttaacgacaccggctctagagacaaaggagatgaagttttaggtttcagtgatgtaatgaactttgtgtgacccgttgttacagtgataaattatttagttacattttccttttagtgtttaatttttaaaaccatttatttctgcaaatacatggaatatttataatgcacaccagaggacagaaagcctgaggtgaggccagctgttaagctgtaatttctgggtcggcgcaggccaaagaacaactgctttttaaaggggaaccagaacggtttgtcaggtccattctactagagaactgaagcaaagctcttcaagtgttaatagctttgaagggaactcttggactgctgcctgtccgtatcacgttagtctcatccattctcccttctcgagtcccggtagaaggcgtgcataatttatatatcattagttagaattacttgcaactgtagatgtgtgtgtgtgtgtgatgtttaccttttatttctttcattttactgtgatgtggaacttcagtctcttatttttcagtttgaataaaaccaagcacactaggtaacttgatttaaaagctaggcattcttagtgtttctatagcagaggtcttttgggccactcagcacatgctatgggcatgcggcctgagcacacgctacacgagtgtgaaggagcccatctgagagaagtttatttcttgcagtggaaggagagttacagtttccattctttgaaacacgcttatgcagaaaaccagtgtcaaaattatggtgaattgtcagtcatagatttatgttaacttaatttgagataatgaaagatatttttttgctttaaaggtttccatataacattagccattttctttaaatagtgaatttgcattgaccacatgacaggttgatattacattgaacctaaagaccaatttgttaaaatacagaatatacctgggattggtttaatcttattacagagatatcattaatatgcactggtaaaatgatctttttaagaaaataaagcttcctacaaactttgtgtacattttaaataagagacaggattcattaagagtcagttcatattttagataaaggttagaatagatttgtatactgttactttagctgttgataagtttccggtatagaatacttggtatctgaaaattgatggatcgtcgtctcacatagagaaagtctttgagctgacaatatcccaaggccccaaagttttttttataatagaatgaaagtgtgtgtcttcacaagaattttcacattattttaagcagcagctaaacagcatcttgggtaaaattgtatttaaacttcagagcaacaccactggcttgtgctagctcacacacaatacaagcctgtttacaaaagtaaataaaaagagtgttgaactttttatgtgtgcttggtttttcataatttagtcaattatattgtgtgatgtgatgccttttgatagtcagatttttctagctgcagttatgggctgagacaaatgtttcataatattttactttccaaataatcttggcaggatgtcttttgattaataaaatgttgcttccatccatatactttataagggttgccttcatttgtcataggtggaatgataatggagaagtcaagaaacagggtattctgggaaattattgggtagattaaattttatagtatttatacttttaaaagttaacttatatagtgcagttgttgaaagagttaaaagtaatacaggaagctggattaagttttcatgtgcgcgtgttgccttttattactgctgatggaacgaacatactatatttaagtacgtgttatttgcagttctttataggtcagaaatggtatttcagcattagtgattagcactatgtgagaatgcttcagtggtgtgtatagtttggagattaagtaaatctttgaatttctacttgtttctcaggactcccctcgtagtgcattgagagaacaatggtttctatgtaggttttattactctgactgtcagttatataaaattatctatgttgatattgttaaagaaataccaattatgcaaactaaaaaccttcccatatttaatagtattttaagatttatcctaaacttactgttataaaaactattattatgagagctgaatttctgccctgaagcattaataaaatcatttcaagaatggtttccttttttttgttttgctttaaaataaatactgactaaaagctttttgtcccagaaggtttgatgtaaccaaccagttagagttgggaacctgctttgtgtggaaaaaaaaaaaaaaaagaaaaggaaagaaaagatatattgaaatcatcgagaagtgtgtaatcataatgagaataaaattaagatttcaagttcgggtttgatctggctaatgcttttgctaacattatacgtgctaaacatttaaattgaaaaaaaatgcagtaattaaaatacatttactctaaatcttataatttccaaaataaatctataaaataattttattaataaatctaaaatagtatatataaataggtattcgtatttattaggacattacataaggactagacagagccttaacactagttcagtgatcagggtcattgtatgactagtggaggttggtcgtcctttttagagcactagttccatgcaatgtgtttggaggctctgctgcctggcgagtctggagcgctccagcatgagcagggtcctttgtttcagtgggattcctggagcccagagctcagggctcagatggtgcctggtgtgctgagctctctctgaacactgacacactcttcttgtccccttgtcagaagcagctgcaccctgatgaatggaagagtctaaagagcagacctaaatgaggtggatattcttggctgcgtagtgacataattcgctatgaatatgtgacatttatgcagaaattgtgaggctagcttgaggtcctctgtcatagctctttgaggtttgtcgctgatagtttttttttaatgagacagagggcctaataggtgccctttaacttcccgcctcctgttgaagtattggttgatgagtggagagtttgctgtttttattgggttgcttttcatttcttcttttttcttccttctgcaggaacatcggaatttgccttttatgcgggaactgaggtatctgtttgcacttcttgttggtaccaagaggaagtatgttgatccgtccagagcagttgagattctgaaggatgccttcaaatccaatgactcacagcaggtagcttcctggctcttcctgttttcacgtaaccttataaatcttcgtcctcttttccaagggtgtcggctgagttaggatggcattactaaactttaacttgaagccattgaatcattgttttattattgggggaaaaatctaaattaagcaaagagtgaacaaattggaggtaataagataagtgtatgggagccgggcagtggtggtgcacgcctttaatcctagcacctgggaggcagaggcaggcagatttctgagttcgaggccagcctggttcagagtgaagttccagaacagccaggactacacagagaaaccttgtctcgaaaaaataaataaataaataaataaataaataaataagtgcatgggtaatttgtagaatgatgggagttgatgaggaaaactaatgaacaaaattaagaatattcatataattaaaaattagttaaaattttatgtgacaggagtttgtgttgcatgtgttctgtgtgtctggaggctagaggtgcactgggtctcctggatccttacagatggttcagagccactgtgtaagtgttgggaatcgaatctgggtcctctgcaagagtagagagtactcaacttctgagtcatctctccagttccataagtagcaagttaaacaaacttgtaataatctagatgtaataatctacaattatatatgattttcttgaccctgatttagctaatagagagtagttttctttaattacctataaaagatttttctttgaaaatactgctttatttttcttgtttttaatggtaatatcatagtccctttttattaacatttggtataaacaatgtttgagatttttttcttctaaaatacaatcagtataaactagcattgctaattgaagagtctcagagaccaagaacacaagtaggagcacacatcgttgtagaaaagaataaatattgaaaaagatgatagcactcaagtgctccaatgagtaccgcgttctgcctggaagtagtgaggctcctctgtgcctgggggtagtgaggtcccgccctgcctgggggtagtgaggctccgccctgcctgagggtagtgaggccccgccctgcctgggggtagtgaggctccgccctgcctgggggtagtgaggctttgccctgcctgggggggagggggggggagagtagtgagctttgttacttgggttcatgaaatggaagtttagagcaggattcatgaaaaataatgtgtttattaccgttttcttttttgtttttaaatttttaccttgtatataaaatatatgcggacacagaacattttcaattgtgctgtttcctcttaaaaattttctccaaacagccaagtgctctaagtattttccaaaccctttggtaggaacaaacttatttcttcttactacagcaatactaacacaagctaaaataattagaatagtattccccgattcccaaactgccagttttagaacagtacttctgcttccagatgtcttgtcttcatttacccatttctaacttatttctctagccttctctttgggaatggatggcagtcctttctagttgctgctctgtgtacaaattaattttgcccaagctcactaccgttctttgccaggttttcttctatatgctttcgaaatttactttttttctgctttctacagaagcctcccatctttttgtcggttaccacttaaaggtggaacagaggtggagctctttctggataggcaaagtcctcaagaagatggcttgggctttgctgctctgtgcttgtaaatgctatagtgtgtgtgaatgcctttcctttgggtgtatagaatagttgtatggttgttgctttttttttttccctagaggtctttaaaagtagatgcttaccagttactttggtataggtgtgattttctgacattcacattagtgagtggataaaatatgtacttatattattaatattatgattagtttttaattaccttggacttgttttacattctcccagaatatgacatgtctggaatggtgacccagtcttaagggcgtgtctttgatgagtgggtttctgtgaattgtacccattgtcccttctctgcagctgacaatgctttatgacagcgaagacctcacttgtttatcagaaggaactttgctaaacctttgtaactgttactgtaattgtaaattttagattgattacataaaagtacagggaataattctttgcaagactcacaataaatagaaaatggtggttctttttagctacaatcttcaagattaaaattgtttaaaaaggtgaacatttacaaatcaatttaaatctctaggctcaggaacaatgggaaatgatttgcagacccagaggtcatgggcttggagttaaaatgcttaccagagccgtgctctcagacacagtgtcctccctgcctctggtcctgttctggtattcttggcccaaaaaggctagttttgatctctgtctatactcaagtgtgtccttgtttctcttgttctgtgccccacatagatggccatccttggattgggggtcacttaaatctgagcttaagtcaccatgaggtgaattttgcaaagccccataatcagttaaagtcactttttgaggttctaagtgagtaaaatgttcttttgctgccatttttctcaaggagatacaactagatttttgtcctgacattagtcttgtttgactatataacactagagtgttaagagcaacacttcctagaccttaagagcaacacttcctagaccttaagagcaacacttagtaggtgaaagaaagtgttcatttcattgattcatgtcagagtatataactaattatttttataaactcatttgttacatttgagtgtgtgtatttcctaaaacagaaccttgtggttataatactgtgtcctggttaaattatggaaatgcattgcattttatgagacagccacatgactttcctgaggcgtgactacctggaagtgttcatttacagcctctaggatctttgctagtaggatcaagtaccaatcaacctttttttctttccacagcaagatgtgagtgagtttacacacaagttattggactggttggaagatgccttccaaatgaaagctgaagaggaaacgtaagtcactgatgtttacggatggtgaagtgagtaagcgacagtcgttttcttctcttggtacggtacaaatgtgcaaccgagagagacttttgggagtcccagtattatctgtattattaaaaggctgtttagaagccgcggtaacaagtttcaggtggctgtcagtttctactgtcaggcttgatgtaagatttaaaactcaactcccgaaagtactaatcttgcagccttgtgtttttcctgcattcgggatttcttgagggagaaggggttagttgggcataaatttaaaaatattttacttcatattaagtcctttctgtgaccccgaggacaggatgaacaattccacctccagaatcctgttgttcattcgtcatgtaagcacaaagccttggctgttttgtgtgtgtggggactaggaccggtcagtgggatgttggtgctcaggtttgtgtgtgtatggggactaggaccggtcagtgggatgttggtgctcaggcgccattcacttactttcagaaaggaagatttctcatcagcttggagtttgctgagcctcctgcggccacactcctgatcttttatgtgtttttctatgatttttttcttttaagattttttatgcttatttaatgtgtatgagtgctttgtctgcatgtatgtatgtgtagcacatatgtctgcctgcctgtagaggccagaggaaggtatcagattccctggaattagagtctgaggtggtttgtagtagccgggtgcattctaggaactaaatctaggctctctgcaagggcagcaggcactgctatctctccagctccatctttgtgtattcgcttacacaaccacttagactgctactcaaaggctctctcatgagatctgcagcatgctttaaacaatacgtagaacgcaggtggaaatgctaggctcaaaatattaccttccttccattcttccgaaaataactgccttctattaatttgttttgtttaaactttttcagcctcatgttaccatggtttgcagtgaacttaaattgtttgaaatatctcattgatcttttaaggaaaaactcaaaggagttatacccggaaatttaagactgaataatttaaataatccatttagattacgttgccttgtgtatacaaatcaattaataatactaaaagcaaggtcccagccctttagtgtccgtgggctccatggtaacctcacctgcagcggtggacggccacttagacacctgtgatgctctagcggtgctgatgctgcgcggaggatgctttgttttcgatttcagaagttgacgagggcacatccacagtgagcaccagcacagagccttcgacatttactcaatttaatgtaattctaccttaagttgttttcagagtaatggcagaaatgtagggtgaagcataagctaaaaaaacccctaatggttttggttctgcagaatggcagcaagtaacagtgcgttgcttgcagaccactgtctgttaatggaaagcaagctcagagaaacttatccagagtttaattaaacttcagggccaagtttaatcagaagcttcctactgctgtaggtagtgattaactgggcagtgtgttaggacttagagataatgaagttctcagcactaagtgggagagctataccactcttcaaggttcatttcacagcatagaaggaagaggtccagagaatgagagatgctcagcacaaaaggcactttcttacacagcagagcctttgcacccaagaactcaaggtagctgtttatctgtacaaggttgggcccatcaacatttcattgtggatttgctgtgggaattgagggactttgggcacttaacatttgttagggacagggcatcattttcttcactgtagcatctgctaatttgctttcttcaataaataacctcttagtcatgctctggcaggaaactgtagttatccacaggggctcacacacagaaacatgccttgaatgttggaagtgacctaagtgagaagtgaaaaagtaaaattcattatataagtacataaaattataaaaaattgaaattaaaaaggaaatagtcaatatttgtatttctaataaaaacatacaaccaattaaaataaagaagtaaaattaacttaccaccaaatatgtagtatttgatggaaaaaattaaacattttgcaaactgtttcaggtataggcatttgaaagctgctttctttttggtgtgtgtagaagtgtaagacactgactaccctgtcgtcaggtgtccctttctgcccatccagactcttagtgtgcatttttcttctgaggtcatttgacgctgagatcatcagaacacagctgaacagattgtaagaacccctttctgactgagactgtctctcggaatgtgttctgctacgtaactgctaagacctgtagacagactcgtttctgttttagcttcatcttagctatgcatccaaatcttcctatgaaagttcagcactgaatctgctcttgatgtttctgagacctaagacctagcatccagtggagataatgcctttgcagtacgattctggacttactttggggtgtcccaagtcttgaatatatttcttaatgctgtatctttttttttctaagtgacttatgtgtatgaatgttttaaatgaatgtatgcatataccgtgtaaaggcccaatgcctgtgtaggccaaaagacattgttgaaatcctgaggcttgagttgcaggttgttgttagattctatgaggatgctgggaagcaaacctatggcttctataggaacagaagaagcattcttaaacactgagccatcttcagcctcttgatgttgcatcttttgaagtgtcatatacctgtgtgtgtgtgtttgtgtgtgtctgtcccattccttctcttaggaccttatgatggttagttttaaagttcaacccaaaacaacttagattctgctaaggagagcaccttgactgaagaagtatctagagcagttgctgtgtgagcaggtgtggggatctcttattcatcaaggtgggaaaatctaccctgaatgtgggcagcaccatagcatggactgagccctagttgtgtaacagtgaagaaagctagctaatgtaaacgggcacatgagggcagtaggttttctgtggatatgatgggagcagctatatgaagctcctgccttggtcactattctgaaatgttgggctgttactcaggattataagccaaatcaagtttttctcccattctcataagctgctttttggtctgggtattttatcacatcaacagaaatgaacataacataaaacagaaggcttgagttaaattgtagtgttttagatatcgtcttcctgtttgtttactctttgccttttacatttgctgtcgttcaaatgtcttcctctggtgacaccttgattggttccttgaagggaagattagtgaaagctgagttggcttctctgtattgtccctcattcttgtttcattctttgtccagtcatgtcctggaatagatgggctggtccatcagatcatggtgttcccaagtgtgagatcattccatgcccatgttccctcagagtttgtttctgtcttaggaaatcttatgtttcttgccctgtaagctagccttccaatgccccaaagtagttgaatataaagttaactgagttgagcagtcactgaacctcattgtaaaccattgctcttggaggttctctgtactatgatgcctaccctgaacgtcccagttttcctctcaggtaaccatcatagaacatatctgaaagcacgctgcttgatcacctttcatctattataaccttctaccttccactgtccagtttgcttaaccattcttttgcctactaaatttttattacatttttttgatcctactcatggtttctaaactaatgtccaagtttgtcttttttctaaaacgttcagaaaacaggtttttttcccctcccagtttcttgtttacatcttaaattttattggaaatatatcctcatttccttttgagtagtttaaaattctttctggtgatgttaacctgatttgagatgctttgctgtgcccatcatgaagaacattctctgtttttgccaataaagccagcttttaagtacatagaggagtgatcctgtttctcctttgatgagaaactaacctattctcccacaattctacatacattatctttgaggcagaggccacaaacacttagcaagatactcaccagagcttcccaaccattgactcacctgctctagaacatggtgttcttctgtggtagcctctctgttatagcgtcattcattctccaatgatagtcttagtgttttctccagccaagtttcttttccctttgcctttggtagtaagttttatttcctcgaccttcctactttgtattccttcttggtttcctttcagttgtgtttctcctgtttctactgaagtgagcacagtctgaggtcctttatctgaggcttagagtaaagagcatctgggaggatgtgacgaagaccacagtagagaatttctgaaatcccataccagggaaagccgtggaatccttcagtgcagagcatggcagaattcacacacacagtttggaacaagtaataagcattcagaattagtatagccattcactcctagctacttctgcaaaattatgaagtcaaagtcatcagataggtcattactctttctaagaggtaatttgtgtgactggaaaggagagaggcctagaatattgattttctacatgaaaatggctatgcatgttagtaattatatccaaagagtcagagttttttattttaaaatattttcttctgtgtcaaatcagtctccagaaactttgattgccacacttcaaatatttattataaaggtgtctagagagtaagtcattgtggtatataaacacctctagtttatcagctgttagctggtggggctatataattgtgtgggtgacaactaccaaactaatgacttctattattccctttcatgcccccagtatgtaagtcagagtccttactctacttattcagggctgcagagcaacagaaacctctgctaggcataagttcaccatgtcaacctggcagtgaaaattaacactaactctcaagatttctgcccagcaaggtctcttgccacatttgcctccattgtattggtgaaagcaagttatataacatgccttgttgtggattgcatcagaccacttctcacccttgtggcagctgaaataaatgataccaagcaatgtggcgtcagggtctttgtacaatgttgatataagaaatcgtatagcaggccaagagcatactgtgatagttctctaaaagattaaaagaagagtctaaatctgcatcttaacttgtaggcatgtgtactaataagttgaaaacagagtctgaagaagtatttgtatacccatgctacaaaagttgtttacccattggccaaatctccactgattaagtgaacaaaatggtgtattatccagcttccagtaaaaggaatattctgatgcttcacgggtgggccttgaagtcacattaagtgaagttaaattaatcatggaacagacaaataccaggtcatttacatatgaggcatcaagttgtcaccctcagacacagaagcacatagaggatgggattgcagtgaggcctgagggagtgagccttacatgggtctaaggatcttgtgatgacatgtgtcacacgtggagcaagaacctgatggttgtttctctcattgaaagtagagcttcacaagccagtttgattaatttaaacacaaatttaaaatttcatatagttgtgagtacatctcaatattttatatagaccaggaaaatagcgtcttttaaagatgcttactataggtactaaaagataatgtaaagactgctggtcttcaaacaagtagggaactatctcatgcggggcagcttgggacaactgtctgaccgtagaaagggacacccacactgtggtcctctgcttcagagtcacggcattaggttcctcactggtgacagttgctgctgcagtttctatgacttctctatgtaaatgtggggaaagacttagctccttttccagaaacctctttggattaagcaatctcttctcttcccagtacggccagtgccatagaggcctgaacgtctgagatggaaatagacagcgataacaggatgagcagagctggtttctcttctgtgctggtcccctgcagtaactcattcagctctcatatctatcctgtgccctcaatgactgtaattatccttagctgacaggtgaagacactgaagaatacatttaggagctgtgcccagggtgacacagtaaatagcagagctgtgtgcatgatagccatgcaaatgacatcatcttgccatatattgttccatgtaatggttactttgatgcattcccaattatttagagatctgaaagtgataagcatcgttctatcttttacacctgctttagggatgaagagaagccaaagaaccctatggtagagctgttctatggaagattcctagccatgggagtgcttgaaggtaaagtcacccgtttgctttcattacaagtcaggatgtttcctcttgggtcttctgtatttgcctgtgtgtactgctgctctttatctttaactgggtctactctcctagtagctgctgcttcattaacatccctgcaaagcatccttggcacttgggcatttggaggatgtcactcctggtgacctgacttttgctcctctcaggccttttccgttcgcactccccttacctcctgctgtccattaagatcactcgtacagacccctaattctgcctttcgcccacctctctgactgttgtgaaactcttccctgcccctctcctgatactgagtacctgagtgttgctgagttcacaaaaggatagttgtaatgctttgtgtgtaagaactctgaaccatgaggagaaggaaggagctctatgtacctgcgctacaaaactgcaaaactatagtctgttctccagttctctctctctctctctctctctctctctctctctcagagggattttcatggaattattttgaagcctgcaatgtctacccaacactctgtattgaattccaacatcttaatttctttttagaagaatgtaattccctctgtatgtgagcagcagatttcattagctctatccatgcactccttcaccacattctttccatctttccctttaggacctaagaatgcggaagggccatcccttcctgctcttagagtctgggcctcatggtcttacgtagctttagttcattcccttccctttctgagcccttaacttctttctctcccttgtagtccacctcagtgtttctatgtgttctgctacttcatattacagaaagtaaaaagataagcactaattcattcctaataaaaagtgtgtatgccccttgtagtgaggacatggtttcacttgattgctctatatattttacacaccttggtttagtagctggctccatgattcagacaaaggtagatcttgagaagttattgatttttctacctatgagcaaactcattaaatccagtttagttcttatcgatctattaatgcattagggattgactctttctcctcttatttatcttgcctcttcctgaaaaagaaagttctctggcctcaatacattcattttagaaagtgtgtgtgtgtgtgtgtgtgtgtgtgtgtgtgtgtgtgtgtgtgtgtgtgtatacacagccatgcatgcttgtgcatgtttcttattgtatgtgaaggtgggtttctcagggcttcatctgatctccctttcttttctacagttccctaggcagtcatattccccactgggatattgcactactaggaagcaaggagttagggaagagtcatcctcaactcttgaaatggaaatctcctgatcactctgaatcagtgacttttactgctgcacaacagtgagggaaagtagtcctagactcatgtgttcagtccctagaaaccatgcattgtccatgggagccatatggaactctctaatcttcaatttcatgttacgctgtttgcatcctgcatataacccagctacgtagccctgtccatgctccattttatgtgtgtctgtgtgtgtgtatgtatgtatatatattatatagtgtgtttgtgtgtgtgtgtgtgtgtgtgtgtgtgtgtgtgtttctaccaaagccagcttccgggcttctgagtccataccttcatggatatgattgttctgtaagaaaatataagcaagactgaaagacattataaatcttgccctccccacctgactacatcacatctccaagatgtgcttagctttctttggttccttaaacatgccaagttttggagtcttaatattatgactttgctgttccttagccaagaagagtccacagcccaacaacctggcctagttaccttctactcactcttcaagttcaaatctccgtttaaatgtcaacttcctgtgggagtttttactgccctactgtctgttcctaacagtatgttagctcttttattctctcatccataaccattgtcgtactgaatcatcagttggcttatggcaaatggatgttgtgatgtcttcccgtgaggctcaactacacacctacccacacacccatgcacatacacacatttatgtgtgcatataaacacacatacagtgttagcacaatgtcttatctttagagcttatatacatatgagttataattactgtctgtggctaggtttgaaggaatccacatacattatatgttatgccagtggaaagctctactaacccattatcacacatgcataaaaatgcatgcatgttactctctctctctctctctccctctccctgtgtgtgtggaggtaggaaagttttactcacccattattctctggagcaccatcactggtactctttcaggtttgggaaagaatccatatatctcatatatatacatttactttttgtaattgaaaagctaagttgaagaacattaattaacttctcccaccatcttataggaaaaaaatttgagaacactgaaatgttcggtcagtatccacttcaggtgaacgggttcaaagacctgcatgagtgcctggaggccgccatgatcgaaggggagatcgaatccttacactccgataactcaggaaagtcaggccaggaggtgagtgctccgtgtctatcctcctcctccttcctgttctcttttccatggcctaatgcaagtataaggttctgatcacatagctgggaatgacggacagaatactcaaaaatgtatttgcatttaattatagtaatctaagacatatttgtgaaacttgtatagaatatctgatatataatttatgttagattttaatctcaaaatttttaatctcctctttactctttgtctctttgtctatcttcaggacatcgtttcatgttttatgatttcccattaaggtagtggtcattagcagcatggtagttaacttaaaatggaaataacctggttagtttttacctaagcacatgttcgctcgcaatcacatgttcctgggatttgtctgcttctgtagagcaagccaggctcctacaaagcacacatgtctgttcttaggagattgctatttgattgcataaggtacaatggaagatcctactttttttgtgaaagaactgactttaatacaccccaaacctgtttatctacattgctgatttaatttccaaagccaagagtttccttctctctttgatagcatccatgtatcaatccatgtgcatccagctgttggagaaggcgcacactactgtagagaccagcacagatcattgtcttccaaatcagtcactgtgaagcgattgctgactgacatctggacatacgctccatgtagcaggatatataaatcttcagtgttatttcctgttacatttttagtggataggacagggacaactgcaaattgaatgacatagtttatataagatttctcagactctagcaaaacaatttgcagtgattgatcagccgcttaagaagtacaaagtgatactgagctgttggtgcatgcttttaatccccatattacaaaggatgaggcagaaagatcactagttcaaggctagcttggggtccatgcagggttcaagacagcctggtctttgagaccttttgaccacttctccttcccatacccaacccccaaagaagcattacatgataatgttaatttatattaatgagaaattgacacttgtttctttgggaataaattaatatattgtgctgaaaaatattctatttatatgctactatacttaaaatactaatagttcagggctaggtacacaactaatgattccttaaagtgaatttaggaaatgtctttatatattattttattattattattattattattattaattatttaatcttgtccccatgagctgtagacagagataatgaaatcttttcacctaatagtagaacagaagtggctgttgctgatagagaaaatgcattcccaatgcaggcctgctacctaatgttctgtgagcatcctttcgtgagttacagaaactgtgcggaagactccttatcatagttcgggtcacctcacttttctcagccactgtaggttctcatcaattaaaatgtgtctcacattagttgtaaagatgatatttaacgtattgaggtaaaataaggaagtaactcttctaaaactctttttgcctgtttgattatcacaaaatggtgcagggactattatcctaaggaatcaatcagaggtttgtttatgagatatcagagacaatgttttaatttttatctaactttagatatggtaaagaagtatagggtaggggcgggagagatgtctgaaaagaaaggagcatgcgcccctcttccagttgtgagttcagtgccaggctcccacgtcaggagactccatctccagggactcaatccaggattttctgatggaccataggccccatgtcagacacagacatggacaaagacatgaacagggtcaaagacacagacacacgcacataattaaaaatgaaaataagtcttgaaaaagaactatgccacatgctatcatgtgacttttctcgtttgcatctttagatgcttattatattaggttttgttgactcttataaatcatgtttcttatagtttaactgggacaatcttactcatgttcaatttaacccctgcttagccagtaatccttagtgtttggggaggaataaagagccacacctcagcacttagctttagcagcttcactggaagacaggtgccatcgtcaagattccagcccatcccattttcctcagcctgcaatgtttattcctggttttggttcaggttacgtttgtgcgcagtcactgagggatgtgtggtaccagtttttggcactgaaagctatgatacctgtaacatgggattaatagtatcttgttgcaggacttataaatacttaaaaatatttatgattttacacctctgaacttgttggcttttgaatgtatatattcaacctttaaaacaaatagcatccttttgtaaaacttgaacttgttacataaaaacaagctttttgaaaatgttaaatttcgtggttcactaaacaactgtgtgtgtggcgtgagtgggtaggacacactcagagcaataagaaatttaactcattgattgctagtttatatttgaaagcttttacaagtataaactttgttgctgagaaatctttatcatacattaatataatatatagttgtaagattcaaggtaaaagtaggaagaaaaaagagagagaaagggaagataacattttccaattttaggatgagaacagtgcgcatttgttccagacaaagatttgtttccctttgagtcaagtcttcggtttgacaatctgtttggtttcagtaagtgtcactcagcctgcgacagaaggtgaaggagctctgaagtccttccctcctagggagaatttggaatgttacaactgtggacgattagcagtgtgtagataaggtttccctctgtcctctgatgtggacaaaggctatggggacgtcaggctgaagttcagctgtaaggaaaccatcatagtccctctgcttgctgtagtacagtaacgtcagcaccaggatcatttaccgaccttaaaattgtgatggtgaaatctaacaggctgaccaagtgtctgttattgtttctttcagcattggttcactgaattgccgccggtattaacatttgaactgtcaagatttgaatttaaccaggcattgggaagaccagaaaaaattcacaataaactagaatttccccaagttttatatctggacaggtacggtttgtacaagtagtaggtttgtgaaaattgttatttccttgaagctaaggtttattgatgcttgatatttccatcttattatctgttaagggagtatattcattttatcttataaatatatagtaataaatattaagtattaaaatatttttgtgttttatacctgatatcttaaaaaacttcagttgaccttttgtagtaatagttagatttattatcatactagtttccaagatatttggtaacactaatgatggccttttttttttccttaataggtatatgcacagaaatagagaaataacaagaattaaacgtgaagagatcaagagacttaaagattacctcacagtattacaacaaagattagagaggtaattcagccttcatgggcttaagacaggaaggcatgtgcctggtggctaactcgattattaattttcaacatgctttgggtaacttataatgtaacctattataagcatatactatattataatattataagcttataattcattccggattgaattttgattaattacattagactctagattgcatccctactaggctgtagatgattatcttagaaattgaaatgaaagacgtgattatcaccagcttgttttcctggtgcggtaagtggaagtcaggaggctagcgcagagcacggggtgaactggaccgagaggattcgaactcttcccgcccaagcctcccaagcttcacacagtgaatccttcaggaagaagccgggcagcaaagggaggttgcgcagctcatagaagtgtgcatggcgtgagtgggtgctatcacataccagaagggaggggctgagtgtgcctatgctctcacaagtcacagctccatcagatgtggaatgtgatgccatgcaggccggataagcctacaggctgcaatgcagtttgactaaccccagttgtcgacctacaactttctgagttacgtttaatttgctcattaataacatacaatgttgagtgtgaacatgtacttccagggagcttacatcttaataagttccagtacatgtatggaaagtgttcacggggtaaaagatgataaaagtgaggaccttaaccatgaggctagtgcaggattcagagatgagaatgtttgcacatggtcctgggtttgttttcccacgggggcagtttagaacaccgtcttaggtgcggccatacataggacttgcaattttcatcagctttgccgtccttccatttctcaagtgtatattcagtttcaccttctttattagaaaagcaaagtcttattttataaggcttcaagccacaaattattttgacaatataggtaaaacgtgtatattttattaatagatatttaagctatggttccggtcccaaaagattcccattggtagatgttctacagtatgcattggagtttgcctccagtaaacctgtgtgcacttcccccgttgatgacatcgatgctagttcctcagcaagtggccccctaccatcacagtccttaccaaggtaagtgagtcacccttgctccttattcctcatcaattcaggaggtcttgtctatctgttggaatctttatatatttttcgctggtcagaattatacttttcaatgttttggtttgtagtttctgaacgtcatataatatgttgatgatgcttttagagtagaatttgtttctgataatgcaagttggtattagagagagaaagagagacagagagagagagagagagagagagatctttagttagaatatgcattagattttccattacaaagaagaaggcagtcttactttaaagccacgatttcgtccttataagattttagtcctcttgtactaaacgtctcgtctgatatttgatcagtttgtgtgtttcttaagatcatttcctcttgagattgtgaggggcttggatgctatcatctatagagctggcttcagtttggaagtttaaccagtcgcatgtgtgctttgaaaccacagcacaacagaacagcagggaccctgtgcttcagatctgcccggctcctcctcacccgcatcaggtgccgccctgcccttgaggtcagtgattcacaaacccttcactcagtctcggatacctccagatttgcccatgcatccggcaccaaggcacatcacagaggaagaactgtgcgtgctggagagctgtttacatcgctggaggacggaaatagaaaatgacacgcgaggtaagaagctcgctgagtgtggctgctgtcgcttcagatgatgttgtactctgagaaggaaaaatggcttggatttcatttttaaacatgtgtagtttttccttgaaaaaaaaaatcttttctgaaaagattttgtggaagacactgttttttggctgtcccattttttaatttttttatgttcttgcccttcgtgtcagattcacagggaccacaagggtttccccagcttacttagctgattaatgatgtaacagatggtctgatttgccagtttagtgttctaaatttatatcaaactggtattcacagctactccagtggggaaatgtcatagagcctcagaatttgtacttactggttctggactccgtctgatgcttgcataatgaagaggggaaaactgtttttctctaggtataaccatttaaaaagtgaagttttaatttctgtttctacctggacattgaatcatgctagagatgctgaaccccatgtacagcctcattgtttaatctagtctaagagacttacagatccgatccatggacccagtgccagtctataggaaattttcaggaggtatacagcaacataaggatttggtgtgtgggagtgcgtgtggatgaacacatgcattgctgagctatctttctttcttgaaagacactttattttgaattcatttctaactgttaaaatgaactttttcattttaaaaagatacttcacagtagattatattataattatctttacatgtcaaaatatacgttactaactctaaacttcagctatcaggaaaatagaaattgtaattttatattaaaaggttgaggttacattaaatagcactagctgtcttcttttagatagttaagttgccactttatggataagtatgaataaagtccagtttaatagagtagatagttgcattgttagtcttagtaactagagagtttgtgttactattgtgcatatttaaataactttacttatattaattaaacatagtttaatggctaataatagtttattgaatgctgtgtggagtattgaataattcccttctggacatgacagactgtatttgtaattcagaagagtagatgctgataaacttttgacattcaggtactgcacaaagtgagaaaacaaatgaaagtgtttgaaataatatttaaagaaaacagacacatggaggttaatgaccacaggcccgagagaggaatcaagtgggccactgaatttacagtagcacgaatactaaataaaatgtacttcaaatggacaaacgtgtgagtccctgcctggaagacaaagacagcatgatgagatcacagtggtcatttgtgatagatgaacctggggagcattcatgccttaagattctgtgcacatcatactggagatcaggaaagacttacttgggattcttgttttctgtctttaactcctatggatacaacaaactagcattgatttttttttttttatatgattgtgtagtattccaaagcccggataatgtatttaatattcatgtattaactgcagaaaatgttggtctattacatatatatgtatatacattacatatatacatatatgtatagaatattcttaaataaatagagtaggcttcttaagattccatttctcggctaaagtatatagattttaaaatttgaatgttttaaaatagttctgtttggaagagaatactctcaggagactctcagaccctgagtgtattttatttactctggagtagtctggtaggcgataaataacatctcagtgtcttgatttgcctaccattatgatgatagtatttttaaaaatgtcttatttatcttatttttctcttttgtaaacattttgggacagtttaatatataccataaaacaaatatatattacatattccctgtaacaacttgtaaagcgggtctttaacctatttttttttatagtaagcaatttttctagtttttatttcttccaagaaaatgccctcatttagacatgagtctttttgtctatagtgcatgctatcggtattactcttctagtttgtcatttggcctttgtgctggttttttatttgcttttgttagttttttaacttaatttctgtgtgggtgacttgcttccatatatgatggtaatcattgtgtgcagtgcctgtggaggccagaagtgagcatcagaccccctctcagattatgtttaggggagcaatcatgtgtgtgctgggaattgaacctctggaagagcaaccagtgctcttaaccactgagccatctctgcagcacctggcttttgtgttctgatgttgattaaagttttagatgtttgtactcttacatttatttatctcttatggtttcttaattttgtatcagcctaaaattaatctttccagagtttgaagttacttttttgtagtagccttttctggcttcttccagattctttcaactgattaacagaacgttacaattctgtgatattttaatgtatcgataccaacacttaccttattcagatttaaaaattatgaaataatgtagctgtgaacacccagtctttgaagacttttataaaattcttttctactgtaagtagaaataataggaaatggaagttccgttataaatttcacttggctattttagtgtcccagttgcatgcatagttgatttttcctattatctctacatgtatagggaggtgagcgttaacattccttgaaacctttctgtacaaacttgaatgcagtttgattttcttggccctgcatatttcctgagttgttttgttttgttgtatttttaactctctttgttctgaacatctcatttcacatagactgcaataatagcatcttaaagaatagtttagaaaacttttcttcctcaatagtgtgattataaaaaacaaaaaacaaaaaaacaaaaccaaaaaccccttcgtccctctgttactagtctcagtagaaacccaggtgaccgtgtcctccattaagtcccgtcttctatccaggtgaccgtgtcctccattaagtcccgtcttctatccgtagatctgcaggaaagcatatccagaatccatcgaacaattgaactcatgtactcggacaaatccatgatccaagtaagtgagcgctgggctgccggcccctgtcactctgttgccacaccgtgtgctatttgtaaggatttctttttaattctgtgtatgtttgtgtgtgcattggtgccctgggaggccaacgctgtagggtgactttagagccagagttacaggcagttgtggactgctggacatgtgtgccgagaatgttgagttatccttccatcttcaccttcatcctatttatctcacaccaattcttggtacatgttttgtcatacaacttgaatacattttattctaataagcaatatatttggtattatagtataaactaaggagaaaaacattctgataaaattttataacagatttccttcatgttatacctaagttactccttttaaaaaatcttacaataaaatttacaagcagttttccaaacatattcattaagaaaaaaatatgtccatagggaaaatgcatatgaccatttaaaggcaaataattggggtagaaaccctgaagccccgttcaactctaacttctttctgggtgtgggagcaatgcctgtaaccccagcgctcgcgatgctgaggcagggagatatgtttgggaggcaggccaacaggcttgcatagttagaaactgtcttcagagagcaacaagcatgcaagcctactttggatatacattgatcatgcagtctggtgtttttgtcactacaactgtgaagacagagagaaactgtgtgtataaatgtccactgtaactcctttgttcagtacaaagaagtactgggccagccaccaacacgtacaatctattttcagttttgaaaattactttctcttatatgtttgtatatttttagtttaataacttccatagattttctccctgaataattttgcatgttttgtttatttgttctgttgttttcctcaaaacctttaatcccagcgacttttattctatttagaaaatgtgccccagctttccttaaataggtagtttgcagatggccttgggaaatggtttagtagacagtataattcaactttgcatttctttccacgccaggtcccttaccgcctccatgccgtcctagttcatgagggccaggctaatgccggccactactgggcgtacatctttgaccaccgggagagccggtggatgaagtataatgatattgctgtgaccaagtcttcatgggaagagctagtgagggactctttcggtggttatcgaaatgccagtgcatactgcttaatgtacatagacgacaaggcacagttcctaatacaaggtaagacgatgccctgccatcactgctatttccatatctgagtgttttacctgcatgtatgcaagggcactgtgtaagagcctagtgcctgcccccaagaagataggtgtgaacccagagtcagagatggttgttgtgagccatcatgtgggtgttggaaactgaacccaggtattcaagagcagcaaactgctgagctgtgtctccaaccccacagtgtggcatttttgagtaaggatttttctgtcatgatttggctgtgtgatgaattcactgagggtggagaattgcattgagaagtgttcatgaaaagctggaatggggaggtgatacaacctaagctggactccaggaacgggacccacaccaggcagtcacactgtactcagagctaataaccaacataaatccgactgtgctccccatagtgagagctccttagctcctgcagccagccggacactggctgacggttgaccccttagtctagcacagagggcctttgtttctggcctctaagatttgctccagcctcatggcccagtttgaactttatatacttcactgacatttgagcttcatgccatctcctcttgcacagtttttttttgtatacttcccaaaacatcagttcaggttttctcaaaacatatttcggggctggagagatggctcagtggttaataacactgactgctcttccaagatcttgagttcaattgccagcaaccacatggtgactcacaaccatgtttaatgggatccaatgccctcttctggtatatctgaagacggctacggtgtactcacatacataaaataaataaatctttaaaaaaaaccaaaagcatttcttccatcagacaattgtgtggttaggtttgaacactgtaatctctttggctcaaagcccaaatccctgtgaaaatatactgtagtctttttatttctgttgtcctaatgtagtctttgcataaagaaaacacccagtatatcccttctgtctgtagccgtgtaagcttaactaggctgttcatttataactaaagtttaatgttgtaagaaatctttaatctcagtggggtttctatccctgcttttgatcatttagttcccagataaaagacacagacttttatatttctaataagccttcaatgcactacagctgggcaaatctaccttctgatctattagaatccacctctccatcaataactccgagttataactttccatgttccatctaggcagccctcatggccatgtttctgatctacttgtgccatggagtcttctcccctcccccctcctgctcccccctctcccatgctcaaccaggtaactgaaaaacctgcctacccaaatccctccagtaattggctgtagccattttgatttaaccaatagttttaaattaaggaacaaggtttgcataacaaaagcttgtaaacatgattacttactcataagcctagacctttgggtacagaatttagcattacaataaatagccacagagcaaacttcaacagctcactttgactattgaagtactagttgcacattgtttcagaacaccttgctgcattgataagcttcacagtttatgtgattttatgttgtatttaatcccttaacataaaaaacggttttagttctactttgagcttaacatagtcagagattgcttctgactttggtgaaacagttatttcctgcataatcagactttggatattttcttataatagcaaagtgaggttaggctcatgttagaatcaccagacattttaattaattctgtattgcctctccttgctactcttcagactctaggaacttatcagaaaccttcgactcatttttctaatagttatgtctttgtttttctgagcacttttagactttttaagaaaatgtaggtaatgtttgctatggtgactgtatgtaataatgaatagtatatagtttatatgccacttgaaatgcattctattttgaactttgcatttttccgtgacttcttaattttatactagtttttgaaatatgattttcagaggagtttaataaagagactgggcaggcccttgttggaatggaaaccttacctccagacttgagagactttgttgaggaggacaaccagcgctttgagaaggaactggaagaatgggacacgcagcttgcccaacgatcactgcaagaaaagctgctagctgcgccgaaactgcgggaagcagaggcttcggccaccacaggtttgtctgcttattaagttatagtttatagtagggtaatagcatttatttttattgtgttttattataaattgtgctcactgttatacacagtggtaggaccttgtgttctacacccatttaaaaaaaaaaaaggaaagaataatgttagtcaaagtaaacatttaaaactcttccaagcaaatggtatataggccattaatgttggcacatgtaagaaatcaaagcatgaagtttaactacagtcaagtatgaagaagaagtagaagttagcaaacatctaactctcaggatgaccgcaggccacagtttccttaatcactgtagacactaagactcctctctgtgcttggagtcgtctattctccttttgacaggaagctgtaataactgtgattaggaaagacacaaattggcttttctgagtctattaggaaacagctctcaacagacaatattaatatactcacagttattgcataatactggaattaacaattcagttggttttttaaaaaatttgagtttagttcagtatagttagggccatgtgatcaatacctaatgtttaaaaactatagaaggattttagtcaaaaataaacatttaaaataacgtccaagttaaaaattatatatagaccaataaaagtggcaaatgtataaaaagtataaatactagaaaatgtaattcttaaatattacctgataaaaccattaaaatattcaacataagtgataaattcaacacggtgagattttaggaaaattgaagttaaaatatcttttaaccatttttataaaaattaattacaaatttatcttagggccatacattcattgctgtgaaagttccatttttctgaactggatagggaattgaggaagtaaaaagtacacttagataaactctgcaaactaggggggaaaaaagggatacatatgtctgtctgtctgtctctctcgactctgactacaagtttatccctaactcatgccctttgcccaggatctgcgtgctctggtctttgttttaaaggaatcatttggggaaggttgcttgcttaccttcatctttcacagaggtatttcatcgtagnnnnnnnnnnnnnnnnnnnntttgaaataagttgatcagttaatttattgatactgaagaaatatataagttagaggctctaaaagacaaagataaaaatattataccaacaaaaagtccagtatttaggtatgtaagtatcggatgctctgtgtgaccatatagtgctattagtggccagtgagctttgtcatggtgcaggatggtgtctcaatggcttccttgtagaacatatgagcaaggtggatttgcagcattatagtttcagtaactaccaagggatgtcttggctccaatcttttttttttttttttttttttgccagttctattcctttaatttcttccttggtcttttgtataaatcattctaatcatttcctagaacttagccaatttgatttatgcacactccatccacatgtgattattcttcttactattaggaggcaagggctgcatcattgacccaagtgataggatctaagtgtgcaggcacagcgaccctccatttattgacctccaatgtttttcttgattaacctacattttgtgatatcaagacataacatttcagacattttctgcctctgtaaaattagactctaaatttaagggtagcattttattttcatggcaaactatacacatcctgtgttcatcctccagcccacccaccttatacattgtcaccttatctttctccatgacaaacgtcatgtctctgtgatccacgcactgtctttgtgatctttctttcctactaagaacttttgtgtgttttgaaattttagaaattccattttaatttttgaatatgtttctttttaatgtgtaaaatcaacttgataatagtggaggcatattgtttgaggggagtcaaaataacgaatatataaagaatataaatctttagttcacatacatctctgcaggatggggctgaggtttgagaacagctatactgtgagaacaagctttgcatcctgtttaagaagtgtgcattttgtcggagtacaagcaaaatgtgctgcatctataaatgtgaagaataagactgaaaagtttaaacacacacacacacacacacacacacacacacacacacacacacacacacactgatgtttctttttttgagacaaggttttcctcaagtccaggctgatttggaactcagagcaatgagttcacctcatcctctcagggctgggatttactggttttaggcaaatctgtggtgacattattttaatactgtaggagcttattctctgctgcagaggagttcacatataattaaataaggctagtatctcatgccaacttttatctcatcactagttcagaaaatgtaacactgtggccaccttctttttctctttatagttttcaatgtaaataatttgtttagtcctctatgttatttctagaatcggtgtgccctaggattgtgtgtgactaggaggaacaatgacgaaaaagctgtccagataatttacagtgtgatttttctcttccttccttgtgaacttttctcaataaagattcaagacaggagccaattaaaacccatacctacttaaggatattaggatatacaacattaatcaaactactgtttgttgtttcctaaatctagtggtgttatttttccactactattcattgcccacggaagggaaaatgccggacaagcaatgggaaagtgtttcccccataatcctgccactgcagagcaggccaacccaaacactctgctttgattcctaaaagttccttaagtctggaaggaatttcagggaggatctagagtatgcattgtaaaaagccacaggttaattggaagtatagtcttaagcatccgcaggtaactctagtggtccttgtgggtccttcttagcagcctggcataagaaatgggaaggttgaatgtgctcaaagccgagaatctcagaagtgagaaagacaggagtggagccattccctgcccgcctctgcctgctctggagcgcataaccatgacacccactgaggagcatgggtgagggcattgggtcacacggcataacacctggagttccgcactcatgaagtatctagataaccctgcgccttcagccaaggagcttctcttcctgagtatttcttcccaaaataggcttttactcttaagcatccacaggtaactctgaggtgttcctcttaagcatcatagttatatgcggttgtcatctgacccaggattctactgcagagagaaatagttcctgaactaatattcacttattttaatcctcatccagaaaagcatgtcataccttacatgggtaattccgaaattagtattttacttgttttaatccttatcaagaaaagtatttgattccttagaacatgggtaatatacttcaattcaaagcaaagcagaaaaagaaacaaaattacaggtagaaaatgatgcaaaactgtgtcggaagtgtatctcagaggttcataaatgtatgtaaatgtaacagacagagccctctctgggtcatttccataaactcaggcttacaggttcaaaatacaggaagtagaataaggcttgttagaatccaaatgtccctagcattgtcctgttcccatatagcaggatctgggtgttattcattttatatctgcatcattaatttaataaacactacataccagatgggctttgaatcctttctaaattgtatctttcctcgtggaaatttcattaatgtcattgtcagtgctcatccttagtgaaggctttttaacaatttaaaaaaattaccctttcataatttctgacatggatgtaatgtatgtagatcatgtccaacccattcctcacctcttcctccctacactatgtcttcttgttttcataatccactgtgccattagtacttttcatagttgcatgagcgttgagctccatcctctagatattgggcagaataccatgggctgttaaatgttaaactataaccatagagaagtaagctttaaagtacgccaaggggatggagagatggctcagtggttaagaacactaactacttccagaggtcctgagtttaattcccagcaaccacatggtggctcacaaccatttgtaatggaactctttacagaaacaaattatgttagatgaaatatcttaagggagaaaagattgatttcctggcttccttccttgtgtgcctgtggcttgctctaacatcttggtgcatagtacacagggagtacatagctacttattttctgttgatcaggaaaaagaaaagggctcctcactgtagcttttaaaggtgtgctcctgtgagctacttgctgttagaggaccacttcctggactaccagcccaaagcaccatcctcctgtgaacacatctccaacacgggagctgttgggaaacttaacaactaaacaatgatagaaatcaaggaagatttccaagaataaagaaagcaaacccaatcactccaggcccaacaaattgcatcctgaaggatgcattatttttgcccattagattctttgtatttataaggacctacagtagtgtgagtttatgtggtggcatggttaccgacattacgttggaacgtgctatggggtaaagtcaagctttcatcttcttgattgcatgacctgatacagaaattgttcatgtttggcaacatgtggatttcttgaacctttcattattagcaacttagtaaaagaaacaccactgaaaatgtctcttcttatttaagttttaaaatgtgtataaaaccattctttttcttttcattaaaacaaaattattagaatggttatgtcttgaaatagaaaatgccaaaggaaaaaaaatcttagtagtgcctacatttgggtattagaaaacacatttctctttgtctctctctctgtttctgtgtctttctgtctgtctctctctctgagtaccttgtgcattgagtgattctctggtttctattctatggctacaagacactagttagtcccttcttttactgtaactctatcccccaaagctctcacctagaggggactttccgacaacagtgacactgttaacgtgatttatgactttggatgttttaagatactttaaatatcacaaactctctatgaatcctttcaggatcacttcaatttgttttcactgcgatgtttttttattacccttcttaggttgtacttaattttgatttgcttattaccttatttatccttaaaatggtttctataaactatttcttctgcctggatgccccttatttccaaaacaatcttgcctaaaagtctttcaagacacacatcagctgccatatctttcaaaaaaaatctttaataatcaacaccatccgaagagtatatattgagtccataatttattcataggaggctatgaatatcactatatttaatatattataatatacttagattcatcttaatttgtagaaaattaaaatagttggaatatataaatatttatcttagtttttttctagctagagaaagtagttctgtgtgatacttagtcaaaatcatttaatattacccataaagttttttagaatcacatttctatatagaggcacatcttggccttcatgaattatagtggatacttattctcactcttaggcaacttactattcctaagtcttcgactgatagttagaccagtgtctgatcagattttcttttttttttttttttgctcatattgtgttaagctcattattctatcagccattatttttgccatatggtgaaaagaaactgtgccaaacacaggaaaatatggtcctaagctccaagcatgaagcttaaggttcctgcaggaagctatccagagggagatgcctctccagtagactccactatctacaccctctcctcagtagggaaactgaacatatcagtaccaatcaggaaatagttatacatgtagggaaaaaacgtctttcaacttccctccttccttaatacacatcctttaagcggtcttcacttctagtttttcttatagtaaaattcacctctattttcacaattgcccctgataaaacttggaattacctttgtgttcaagttctgattcctaatatggcttacaaactactctttgtatctcatcgcgtctgtgtgcctttgttgctgcctgttattgacagtgtaatcatctcactcagtattcaagtaacttagaatacttggcctcagttccactttctttaattcattattcaaaatgcaacagtataattttctgtatgtgctagagctagatctgagagacttttttttgcatatcagccacactttgcatagcccgtgattttcttctgacagacttgccctgctgctattgtgttagaaccttttcaacctcttggtcaactaaaaacatttatagcattcaagacggttaacgctttgcccactcaccttcttctgttagtacctttgctgtttgctgtgctgtgtgtgatctagctgactctttgtgttttctttgagagaagggagggggagagagaggaaataaagggtaaagagagaagagagagagacacacatacagagagacacatacacacacacacagagagagagagagagagagagagagagagagagagagagaggagagtgcttttaaaacttaaagtctatctaaaatgcctctaaatcttttccaaacagttgcaaaaactgaggatcaaacactcaaatgtatgaatttatgaaggttctcagtcaaattaccctttgttacaatttttacaaattcttcaatttttcatcagtgactttgtccacaatttattctaagagacgacattactgtttattttgtttctccttgagacttactacctagccttgtacccagggcacatgagtttaattaaaatgtattggtgaaatgaatgtccattcgtgtattttgaagttatagtactacattttgaatggaaaacattttaatgataacaataaaatgtccccatatcttcgaggctctttcaacatgtaataaggacacatgctccactatgttcatagcaaccttatttataatagacagaagctggaaagaacccagatgtccctcaacagaggaatggatacagaaaatgtggtacatttacacaatggagtactactcagctattaaaaacaatgaatttatgaaattcttagacaaatggatggatctggaggataccatcttgagtgaggaaacccaatcacaaaagaacacagatgatatgcactcactgataactggatattagcccagaagctcagaatccttcttagaatggggaacaaaataccattggaaggagttacagagacaaagttcagagcagagactgaaggaatgaccatccagagattgtcccacttggggatccatcccatatacaaccaccaaacccagacactatggcagatgccaacaagagcctgctgacaggagtctgatatagctgtctcctgagtgtctctgccagtgcctggcaaatagaagtggatgctcacaatcatccattggacagaacacaaggttcccattaaagagctagagaaagtacccaaggagttgaagaggtctgacgccccataggaacaacaatatgaactaaccagtacccccagagctccatggaactaaaccactaatcaaagaaaacacatggtgggactcatggctctagctgcatatgtagcagaggatggcctagtcggtcatcaatgagaggagagaccctaggtcctgtgaaggttctatgccccagtataggggaaggccaggactgggaatgggagtgggtgggttggggataagggggaggcagggaaggggtaggggattttctgaggggaaacttggaaaggggataacatttgaaatgtaaataaagaaaatacctaataatatatataaaagaaaaaaaaatgttaagtgggggctgcctgtagctctggtctgtctcatggggtagttcttcaatgactcattccttccagtagcagtttggagaatttaccttgtcactcctcatgctcattctttatcagaactgcagattcctttgttgtattaaattatgttcctattcgtgctgggccttggagaattagcaatgcagaagggaaatagcatgcttgctcatgagacttttgcaggtggcaggggatatgagcttcaaataaagtaatcattaagctataattgaggtaaagtcatctttaaaaggcaagtttgtgtgtctgtagaattgggattctcctctgttagtgattttctctttgagcaagagtcatttgcctctatggagccctctgcattttcatattttgggaggggacaaagggattacatcaaggagggatacagtgggtttacaagacaccccctcccccacacatactatagacttattaatactaacaggtaaataatattaattacatgaggtcttaggaactctgctctaaaactgatacttaaataaataagcaagtttccagaaagtgttagaacacataggcggagtatgcaaagctagggcaagcgtctcttagtgtatgcagaagtggtagtgtgcaaagctagggcaagcgtctcttagtgtgtgcagaagtggtagtgtgcaaagctagggcaagcgtctcttagtgtatgcagaagtggtagtgtgctagccattttgagccgaggacacaggatgacataggaggaaaatgctgaaacccagtaaggaaaagctttgcttggatattcagagtagtgttggaactgttaggtggagctcaaaagataggttgagttggaagtgtactttgaattcttttcctgaatgatatttgaagtcacaaattcatattggcatcagtgtgccaacgtggtgtcatttccattcagagagcttacaaggggcggaatcaaaatggagatggtaggattgactcacggttaggatttgttaaatgggaaaacaagcaaacaaccaaccaacttgtactcattgtggaaccctgtaccaaagctgttgtgtcaatacagttctccttttaggcaaaaactagataacttttcaaaaagagactggtccttttcatgtagaaaagtttccttacataaaacatactgtgagtatgttctttagtagttgtatactcttggttctgtttgtcctgtttgggatactgtttgttggtcacttcttggattcatgcagtatttcatgcatttttcattgaaggatgtgttttgacagcaccgaacttagcttggttcctgtataacttcagaattagacataagctcccggtttctgtatagtgccttgtggtttatgttagatacacattgattcttttctctgcagcacaagcaggaggcgcagactatctagagcagccatcaagaagtgacttgtcaaagcactggaaagaagaaacgctccgagtgattgccaaggcgtcacatgatcttgaagataaagggccagagacagttttgcagtcggtaagaacttttcttctggctctcggaacatagccattgcagcgttcccactgtaatggagaagcagcctggctggcagtcagtggacactgggatttggccatgagcatgatctgggagtgcgggctgtcatttcctcagtgtgtgattttaaataaaaccctctcatatgtttcttgtcagaggactaaaaagactcagactacagactaatttttttcatttggctgggaatttaaagagaagcacaaagttcaacagtattttttcccttggtctgtgatgtgtcaatactggagtaactgagaaagtaaggcacagttgccaatgttccatggaaagtctttaacaaaaagtgagaatattaatagaaaagaaatattacgtgaagtttgcgtgtgtcctggagagaaattgtcattatcattttactgtaagtgggcttttcagtttgttttataagaacaaattgaccagagatgtagggttgagtcagtacctgaagaattctgtactgcaccccccacccccatttttgtagttaatacaaacagccccatggaggctgactggagatggaggctgactggagatggaggctgactggagatggaggctgactgaggctccctcaggatgtgaagagtctctccctggagaactgaagatcattggatagttcagacatttacatgacaaaagttgtactttgcaagtgatgctggtctcaacaatagcctcctgttaccttaaactacccattaagcgaagtttccagcaaataaggcatcctacaagttatatctaatgacctaagtaataaccagaaattcttttacttctagcttgaaaaatattattacagtcttcttaatatgaaaattaatttaaatatattttatggttataaatcctgcaaatgtcttagattctataaatacatttaagaacctatgctaatatctataaaccttttgggtaaatactttgtttcatgagtctgaaaactctgtcttgggggccttgggaacaggaaagctcgggaaacaaggactgacagttggcatggggagagagtacttttaccagtacaaaattttaacttgggctcttcataaattggtgctgtgagtcattaaagcctaaaatatatcatgcttttatctgggctcagaaaaccaaaatcataacttgtaatatagaatcatgtttcatctcagttcaactacttaaatgttttaattcatgcagtcatcacataaatttacattccccagattcactggtttgtgtacctttttataaatagcgcaggggactaccgtgggaaggctcttctcctcgttccttgtctcctgaaataatacctgtattgttgcccctgaagtctggacttgtggaagagttgtgagcttctaccatctgatgagtttgtggctcttggtctcaggaccactgcttaggcctctacaaccacttcctgttatcttttttccagttatacttagcatatatgagaaactacagtgagaatcttcagacttcagataccatttccgtgactttggcgtattcacttcatttcttactagaaatgcaatcttgaggaaacttcttacttgactttcaggtttcttcttctttttttttttttttttttctgcaaaattgaagtgcctctgaggttaacgctgaagattttatctggtttgttttattttgatagtgggtgtcagtgtgggggttccttgcttgccctcagccctgggcttctcacagcaccttacgttccagctgtagagtaggcatgacatcccataatacttagacttacagaagatatgagcagccttcaagtgttgaggcagcttgctttcctagagagttgtttaatttctaagtgaacactttaggatatttgtgagtatggaaagcagatggcaagaggaagatgctgtgcctggcttcagttgctggccagtgcataggcactggcaacttggcctacccgttttctatggttttttagaatagagtccctgtatttacttattaaacagggttccatatcagtgccctggtgacatgaaagtgacacctgatgtcaaaataaaacacaaacatactcattaacttcatggttacttcagttttactgaaagaaacagtttaccctggaagggatttctagtcagacgtaagttctgtagtcctgtgactcatgttctcaatcccttccatgagaacattttacaaaatcatacagccagtgagtttcaggctattttaattttttctatcatgctaacggaaaaccttcctaattttgtagcctttgttttatttgtgttaatttgttcactatgcttgaaataataggacattaaaaataagtgtttactttagtacaccttcagctagtttatatgaaaaatatcctgcatgagtttgagttcttttgtgcttccaggattgccagaaccaacatcatgcttttgagactgaacagtagcacaaagggcttgttattaaagggtgtctagggccacctccagacagttcttttacagtgtccctgtagctattttcatgaaggtttttcttttatttcacctttagttctatgtatgtgagtctttgcatgtaggtttgtgcacatgtgagtgcaagtgcctacagaatccagaaaaggacattgggtccctgtgagttggagttggaggttagtgtgagatgcctgatgtgggtgctggaaattgagctcagtttcgctgcaagagcaggatgtgttcttcatcagggagccatgtctccaggcccccctttctgtctttacaataatagattgagctgctagtaagtcaatatcgaagtctcaacatggattgcaacttacgagcttacagttcacttttgttaatggagatcttgcacgttgtctcaaatgctagaagtattaacaattcttaattgtaacaaattcatctctataaaatatgtgagatagtaagattggtttaaaataattacagtataatttttttaatgatttggcaatatctaccagttttacagctgataaacacaagatacttaaatattagctcaagatcacaacaacaaagcagggaatttcctttggagatgatgaaaattgagataagtagagcaccctaaatgtgttacaaaataacactcttaagataaacctttcttttaaaagacaaaatactgttcttgaccattacttctgattccattgtcaaagtctatttggatacgtatttctagagtggaagaaaatgtgcacaacattaaaattcacttatatttcaaataggaataaaacttgtaagtgtccttattcatattttgtatttgaactcatgtctatttttgatgaagaaagttctggtccacattgcaacgactgaagcaagctgcccagatacgccctgcgcttctgccgcctgctgactgagacattgggggcattcaagctctaagcctattggttaaacaagactatgtgaaagccttacccttgcaaactgctgggattagagtaggtcataatcttaacttcatagagttgcaacaaaaagctttctggagtaactaggactgtttgcctcaaatactaccattcaatgtgactctggtctttagtatttttatatacccttaagtctaaaatgctttggtgaaagctacctgaagtatctggtatgcaaaaagaaaggctacagttttgtattacaatttgattaattaacctgcgtctaatatttactttaaagtggtttcattttatatgtagtgaatagagatagtatataaagagattataaacctctgtgtgtaaagagatcgcttccattgttgtctttctaatctgcttgccaatggttttctcctacagaaacctgcaaacaccacgagccaaccaccttctagccagcaaggtgtagaggtggagattccccacttagggaaatttgtgattgaggcaaaagagggagggtacgatgacgaggtaccttggttgcagtgctcggcacggtttgctctcactctttgcagatatgtacaaacaccgtaggcatgactgtacccacacgcttcatgtctgttgctgcataacctacagctttgcctctgatggtgtgaagccttgccagttactaacagaacctggatattaaatataagatgaaagcagcaagcttagagaatagatgaaaagaatgattttttttaacatcagtttactctcaggctgataattagagtaagatttgcttaattatataatgcccatattactttaaaaataactgatattttcctagcagactactaaattacttgtatacttcactttagactttgtccatcatcccctaccaccagaaagccctacagaatggctgcaagatgggtaattgatagtcttgctgctgttgactcatgctgtaacaacaaacaggatgcctggtgggcatcactgaatgcctggcagcgccttcttctctatgggcatcccgtcttcctccttctctgctgattgtcttagctactgagttgttccaccagcctccagctttgttctttctcatggtaaagttctcttccacccagtagtctgcttcatcggactatttatctatcattacttgggatgtattttccccttgaaattctttaggtggttcttttctgtgtttgagagaggacagataagcaattttttaagtaagcgatggggaagcttggatgatttgtggtcagagagataccacagctttttagtggttgtatctttggataagaactgaatgtgtgtgaaatatatttaattcctgaaaaatgtattcctgaattttaattatgattatgtaaaaattaatcatcaaatttggaagtattgtaagacatagtatcactgtgccgttatgagaaagcatgcctactgacaggctagatttaagagagaaggaatgatcaaaggacttcggtaagcagacaatgaatggtggacacgtgcaaccttacatgtatgatccagaataaactatgagggacagtttcagggaactcgagggagtgaccacagactcttaactgcactgagacagcgtcgtgctacttatttctaagacattggaaaggcaagcagctaaggatgagccattttctagaactgtctatagtatatgtaatactgccttacattgttccgtgtttgctctcatacaaactgatccaatttaatgaaagtactcacgtattacaaagcatccagttgcttgttttcagtgtgagctggttttggcatttgtgaaagaattgtgactactctctttattgaatatactacctttggtggggaaatttctgcccttagacctgtatgttttgatgtactctgttggcgtccttgcctaacagtgcatgtgccttgagactcttggttgcttacagatacactggttgcacagttgtacgaagggcctttgcctgggagcaggaatgagattcaactggagttttcaggctattcatttatttactaagtgttggtgccagttttgaaatggttctcttggagaagtattcactttctgctttgtccagaagggggcgccttcttacaattctgcactttagagagaatgctttctgatctttgaacagacaggggcatcctgcaagccagctgggccactgcccagaggactgaatggtgctttgactcatacatcagaaaccatttgctcttttataaacgcatgagtggtagaaaacaaaggcttttaagttgcatgcaagcagcttgtttcattttgttaaaggttttttgcttttgtttctgcattttcctgttaaccgttcagcaagcttcctttcaacccccgtggcaggtcatgatgacccccagtatgcaaggcgttatcatggcgataggtaaatccaggagtgtgtatgacaggtgtggccctgaagcagggttctttaaggtactattaccactttctttttttttttttttttaatgtattgtcttctagcaccttatctctttaaataaatttctcttttcctgtctgaattatgacaatctggtattctaggagctgcttgtgtgtaagaatccaacatttcttttgtttttttttaatgcaaataattaaaaaacaatgagaatatttcacctgagttattgcagtagcgtgtctctccctcgttgccagtaatgtaatcaagacattaagggtacgggaaaacaatgacatgggctgtggaattgcctctggtcacggtttatttcttgtgtagaggtcacactgcaggtcagtattgcaatatgctccctttaattttcccgttgactcaaaactagttctgtttctcaaaattattgattccattcttaggttttgcttcatcttccttgctttgcatctattctgagttttaaatattctcctcaactcaagaaatgggagagcgtcccgttgcttcctttcaccgtcccacgcattcattcccttttaagtgtgtgcactctccagagccttattgtgtgtccttttcattggaaagagaagaaacatcatgtccaaggcattactttctgagatttaccaaagacctcgtgtgtgcatgtgagcgcacacacactcgtttaccaataccctaaagctttcccttcaccttctataggttgtcatcacctctacattgtcatcacctctacattgtcatcacctgctctcttcctcagaagccagaccctctgaacagtgtacagaacagaagcagtgtactaatttgccttctcaataagtccttatggatttgttagaaattatcaattttactgatattccctggcctttttgaatatccaacttgaagtgttaagttgcaactttctgttactatggttaaaggagaaattgagcagccttttaagatcaaatgtaagaacttaaaaaaaaatctcttctttaaaaaaaaaaaagaagaagaaagatgacaaggccaccagaaaaaaagtaaagaaaggagattggagtagcttctgcatgtgttgctagctgtgctccttatgggtggcattatttccttccctccgttggacctttcatttccctctagttgcccccacccatacacttaatatatttgacatcagttcctccctctaccagttgcttgagtcttctcttactttctttttaccaattttaaatgctttttaacttttattttctgtcattcggtattttgcatacatttctgttacattgcattacttcaattgcagctttttattcagtgctcacagaggccagaaaaggacatcagattctcttggaacaggagtcccagatgatggtgacccaacatgtgggtgctgggaattgatcccaggtcctctggaagaacagccagtgctttaaccacggagacctctccagcctgctgttacaattttgtattctcagagcaatagaaacctaggttacctttagccaggcatagctcattgatttgaaacctgttattgttgttaccgtggatattcacttgatgcgttttctatatttcatccattcctcgcctcctcgagtaccaggtacttatgtacaatgaaaggaagagctaagaaagggaatgagaagtgaggttctgaaacagggattggttagacagattgttcgataagttctacctttttaaatacaataaatctgcctttcaaaatatagtgaataccacacttaataatctttgaatcgcagattagtaagaattttcaggaatcattacagaaaactggcagtttgaagactcactagtggctattaacatatgagcctgtgacctttattacatttagaatcctccggtgtctccttcccaacccatgcatccacctctccacaattccctgggactccttaccagctctgcgtgcacacatcacttgtaaggatgagccggcacgtaccaggatgaaaacctagtattggcccatgatggcgtctccaccctacctgtgctccttgaactatatactctacatgttattcttttcagggcctaatagctaataacttgggaggaaaggttattttctctgtatcttaacattatcagaaaaactttaagttgactttatagaacttttttattgtgagagaaataaaatttaactctgagcttgattaagtactttcagctctacttattaatgcgttatcatcagaccaatttttatgttatttactgttagaatgcatgtgtgcgtggcagggtacacacaccttaactcgcatgtagaagtcagaagtcaactttgtggagtctgtcctctctttgtgcctttatgtgggctctgaatggaacccaggatgccaggcttacagcacaagtgcctttatctggtgagacatctcaccacacacattagttttcaaatgatatatttgattggtagtggttaccttatgaattacaggataataggaaattatcctgtgggaatgtcatcttacaagaaataggcttgagtaagtgaactggtatgatttaaccttgacttagagtcacacaaaggccttcccactaaggagtctactgtatgtacgtagtatgaaagagttaataggcaggcagactgggctaaggtattctaccaaatcctttcccaagctgtcttcttttgttaagaccggtttccattttaagaataaaacaaaacacccatggaaggagttacagagacaaagtttggagctgagacataaggatggaccatctagagactgccatacccggggatagatcccattatcagcctccaaacgctgacaccattgcatacactagcaagattttgctataaggacccagattagctgtctcttgtgagactatgccggggcctagcaaacacagaagtggatgctcacagtcagctattggatggatcacagggcccccaatggaggagctagagaaagtaaccaaggagctaaaggggtcttcaaccctataggttgaacaacaatatgaactaaccagtaccccggagctcttgtctctagctgcatatgtatcaaaagatggcctagtcggccatcactggaaagagaggcccattggtcttgcaaactttatatgcctcagtacaggggaacaccagggctaagaagtaggagtagtgggtaggggagtggtggtggggggagggtatgggggacttttgggatagcattggaaatgtaaatgaagaaaatacctaataaaaaattaaaaaccaaaaacaaaacaaacaaataaaaccaaacactgtctggaagaaaatcagtagataagtgtttggtgtgcaagcatgagactctagtgtgatcccgaggaccccatgaaaagtgtagacataaaggtacatacttgtaatgctagcttacaagaatcacaatggggaggcacagacaagtggatccctggagctcatgggccagacaacatagtgaatgaattctagtgaaagatcttgtctcaaaaaaatcaagtagtggtgagggagacaactgggttaatgtctggcttccatacatttgtatacacacacacacacacacacacacacacacacacacacacacacgtgcacaatcacacatgctgcatggaaatgcactcacaaacatacacatgcacatacaaacaaacaaacaaaaaagaataaaacctttaagtgaaatggtttaaagagaaagttccctgaaaaggcaaattaaaattgctccaatgagaaaaattaaaatttaagagatataaaaatcaaagaacagttgtaaaggactggttattattaagtatttgtacatgctggaagcaaagaccatacggtaatatgagaatagctttttattttccttgaaagacataaaacttcttttgtttgtttgtttgtttgtttaaatgaaacagctgtctgtagctcgtacagtcgtatactcagggttttgtgagataagtggacttctgtattatgaaataaggttcttgatagggtatcattgcctcacagtaattattccaagctgataccttccaagctgaaggtcacttccttctacaccttagtacctattaccactgctgcacctttctttaactttgatatggaaagtaaacttattttcatttataaaatgacttaaaagtacagtggtagtaggttacaacccaatagattatcacagaagggacagatgcccatgtaactatcaatcaggccgtgaagtggaactctgaggtgctcctgggtcactcacctgtgctcctccctgtaagcttcttgaccaattgcagccgtgcccttctgttggtagtgttcctgttggtgtgacactgtaccttatatacttgtaatgctttgttcttcattcttcttagtgtgtctcagtagcatgtttagaattctgtatcattgaatgtacctgtagtttgtagtataccatgtggacataatggtattccattgtaaggcacttgattgatttaacggtttataaggcacggcccccaatggaggagctagagaaaagactcaaggaactgaagggctttacagccgcataggaggagcaacaatatgaaccaaccagtacccccagagctctcagggactaaaccaccaatacatggaaagacttcatggctccaactgcagatgtagcagaggatagccttgtgggacatcaataagaggagaggcccttggccttgtgaagactcaatgccacagtgtaggggaatgctcggacagggaagcggaagtgggtgggctagtgagcagggggatgggggtaggatagtaggatttttggaggggaaatgaggaaaggggataacatttgaaatgtaaataaagaaaatatctaataaagcattttgttaaaggaaaaaaaaaaaagacatggccctaaacccagtggataccgttagtatagttttgggttggacttcttcctgagtgaatcttgatttctagtggggaagcaaacatttattaaattgcaatatatgataaaggaaaacggaattaagaagggattacataaaataaaagactgagttggtatctagaaatcttcttagaggaagtaatatttaaacaactaatacatccatggaagtataaactttgaataattttctctgacagctgtttcctccgaatcctttaaatgactgtcgtattactttactttattggaatttagctcattgacagttctatttggtttgtcttaagcatcagtgtctttgcagaaatattttgtgtgctggtatttaacataactgtcgtcgttcattttatattgtggaaatatataaatataaatatatgaataaaaatttattcatgttaagtgagatttgataactcaacagtagatttccagttgtattttgtggtttataatctgtattttatgcttctttgtggtaagaactttaataagtaccttttttataaatataaaagtcttgatgactgctaaaactactgaaatcattcattcctatgatttcatgctttgaaccttgacttagtttataggatttcaactttcttcaaatggaaaactatctaacacttccaaagaactttgtctaatccatcttttaatactgatttaaaatcccacgtttatcatataataattctccattggcaactaggattgtacgtgtttctgtattctactcgtgtattttctaagcaatgaacatattgcctcatgtgttattagtatatttgatgttttatataaaaacacctcatttttattttttataaatgaaatacttcaagaacctttttaagtttttatgattttttagcattaattgttacttccccccccccccgaactcttaatgaatttgagttcatgtgttaatttaagatgaagttggaaattatgttttaataattggattatttttttaaagttacacagatatgacttttcaatctgtcatcctttgctatgtctttttataagttttcatcattttgttaggtaaattgcttatattttacattgttcttaggtgcataaatgttttgttacaaaattgtacatgcaagttaggatgaacaaggataatacattttagaatatttattttattataatcctatgctttttaacaaatttacagtgtagtctcttgattataccattaaactgttctcccaaaagtatctcattactttcataatatctgtttatgtgatataaaaatatctggttttatcatgttgactatagactttagtacatattcttaatgttagagtcatggtaagaaattcatttatttagtaacacattatcaagttcatagtagaaggctttattctattataattagtactagaatgtagacattgggccttttagagtcaaccaggtttattgactactttaatatttcacattataatatgttatattcttgcaatatctgtagtaattatcctaaaatatttctcaatgtagacagctaaaataatgaaaaatataatcagaaacacgatagagactcatttgagacagtttatcatgttcgctttaatccagtggcagttagactctgctagaagaaacagcacagaaatctgtccatttctgttactagttgagaaagtatacatggaaagtgatgtgactggagtcaccttggaaaattaggagactcactgagtaaatccaggagataagcatattaaaatgcaggggcatataactttaatggtgattaggatacattggtttttaaaagtacatgtagctctccttaccaaaaattgaaaaataagatttttaaaagaaatcattgtgaaaactttatatgtgctacttaaatatgcagtaaccctgataatcttaaatgtcaaaatacattttatttttattgtgatctttaagcacagcaataagacttgacagtatatctggagggggaaagtcatttttccccacagggaaagtatttttgaaaatcttattactataaaaaatgaacatcatcttctatttgtaatgctttgttgtgtaggagggactgactaaccttaagtattatttaccataaataaaatatttcaacccatggttttagttattttccctctaaaatatagcaacatagcttataggattacttgaagttataaacaaaaagaaagtgaagggaagaaactaataaacctttttaattgaatgaaatttttgtaatgtgtgttgtatgcaagtatttttatgactagcagagctacaacttagacacaaaaataaagggaaaatttgaatgtgttatttttaatcatgtgggcttcatgggattaattcatcagtattagatatgtgagtctacaaatattcagttatatatcatctagattgtgctcatatgtggaaaaatatattaatattttgtgttattagttctcaagtttgaagcatcttatggttaaagaaacaagtgatactatagcatgtatcatcactattactatcgtcataaaatctaaatactgtaatagcagtcatagtcccttgtggtgactaggccccaaagcaccttcctgtgactgcctgtgaaatagttgtattaatgtaacttctcgcaagagcccgctttcttgtacaggtctgggtgttctaggaatgttcaactcctggaactcttggtatgtaatctagtgtggcaaatgcacacagatgcacaacacagctagtgatgtcccaagagagactttggcaaagctctttcacaaaagtctgaatttcacaaagtgatccacaccatatgcagatacactgcgtcatcgcttctgtgtgtagaaacataaggacatttggaagatgatgggatagtgaagggcctatgtagttgatcattcagaaaattcttttaaagtatggaatttggggacacttaaatgaaccagtttacttacacattaaaagtaaaaatgaacatttaaataattaccattaaaacagtgatgaagtttaagttaattaataataattaataaattctttgctcttgttttctaggcaattaaattagagtattctaggctggttaagttggcccaagaagatactccaccagaaacagattatcgtttacatcatgtcctggtctactttatccagaaccaggcgccaaagaaaatcattgagaaaacattactcgaacaatttggagatagaaatttgagttttgatgaaaggtaacctaaaatcccaaagcatctacttcatgtgttcatacttgtcttattctggtttggtttggatttgctaatctcaagtgtaaatcttttgtttgcacaaaaactataacaaatatagcacaaacctaccttccattaatttgattgtttgcttttccatttctcttaaagtttctatctatggccttttaaagttttacctaaaagtaatttggataattcaaattatgaaagaaaatgtgatttttcaccgtctatactgtggagattttaggctaagtaattttattgtcaggcttccatgtggcttatcagatacagcagcaactctaaccaatactgagagaagccagtcccttgggttagaaagacccaagcatctcccatatattcccagtagccactggaagctggaggtgagtttgcttctctgagacaatccatgaagaaagtcgagtgtatacagaaattttgacataaaatagttaattttttcacttgcaactatattttgtcagaatctgttataaaactaatgttattttttttcttgttagtctgaatatcatttaaaaaagactccaagtatagaatttcaagatactaaatgttactttttttttttttctgaaacactttataaccatgatttgtcttttggaactcattgtatagaccaggatacactcaaactcacagagatcttaaatctgatttctgagtgctggaattaagggtgtgcaccactgtatccagcccttttttaaatctttaaaatttttgttcatgtttgtgtgcattgttgggggttgggagtaagacatgcttgacatggtatatgtgtgaagttatttgtgtgtgttgctggggtggtgaagggggtgagacatgcctcctgtggtatatgtgtgaagatcagaggaccactctaggcacttgtgagaactgctgattgacagtgatcaggccaccaaacctttgcgtcatcccactggcaattgtgaagattttgtttttatgtgtttggaaatttagttttatgcaacatgcttttatggtttttatggattttgtttttaatttagaaatgcctttcttatatttgaaggtgtcacaacataatgaaagttgcccaagccaaactggaaatgatcaaacctgaagaagtgaacttggaagaatatgaggtagtgtgcttttgggaaatactgacctctagtagacacattgcatacgtcataatggagaatggaacaaaatgttttaaatggctaaagtgttttaaagaaaacctttggtttttatgtttataagtgctcttgtatttcataaaccagttttcaattacttctatacatagtttttctctttaataagagcaatttactgcattaatgttgaaattgcaaataaagagcctgctgaatgttcttctaagcactgcgggtgtattgactaatttaatccagatattatcctccaattccatgggacaatggcacagagaggtcctcttacctccacacaattaccctgggaagcgtgcctctctcttccccacagccaacacacacacacacacacacacacacacacacacacacataaatttgtaagagaatgtttaaaaacagccagatgtggtggtacatgctttttatttattatttgttttattattactggtctgtacatgaactcaggaggtatagggataggagctgaacgggctgaaggtttcacaggtaggaatttacagctctctgactgcacacagaacctacaagtctaactgcccttctgtctatcctgattatttgctatgttttctgctttcccgttgatccatcctacatgttagaaagacattaaacagtcattttagccatcacgtggcatctgacatggtgatcctcagacagtgctgtctctgagtgtgtacatgcacacttgtctcatggctaatgagatttgtctgggtgtatagacaaaatcctttgttgacattggtttgaaaatatattttaacttaccaaatttgaaatgtagtgtctatttgtgcttttaaaattaagtttgaaaaatttacttttacgtatgtctttcattaatctttggtcttatttacaaacttttaactttgctgcttagagtttctaagggcaacttcagaataggtaacaggatcttgtaggattttacctttttatggttatcaactcatagtatcaaaattatgacttgcaagaattgaaattgtgtgtttggggaagggcgacgtagagaagaatgccctcctctgcatttgcccgtcagaacggagtcggagcaagtttacaaggtttggtggaactatctcaagataaaccttatattgagttttttattttttaactaatttttattaagcatcctttaaaaagcaggggctcttgctgttgctgtggcttgttggccctgagtgccctgcctaccattgcttgtgggagagggagtcttacttttcaccgtaggtcagcagagtgcttggcaacacgattgaaatcccccatatttcataataaataagtgaactatggcattttttatttccttaaaattctatatcaagcaacaagttggagctctggacagaactgcatcaatagaatgttcctgtctggactcttctaatattagtacattttatactgaagaatgtcttctgggaaaaaaaaacatttggtcatcctgccatttcattattttatgccttatattcttaaccttctagtaatattaatttctaacccctgactaaatgcctgataagtattgttactactataattattataattattataattaaactaaaaagtagtgtgctaagttatttaaattttaaattcatttctctttgtttgcaaaactatcagaacaatacattgttttatattcttaccatagttttattcttttcatttttactattttatatacaggagtggcatgcagattataagaaattccgagaaacaactatgtatctcataactggactagaaaactttcagagagaaaggtaaggcagagaggacgaatatgggaaaaatgtttgttcttatcattaatgctattcagtaattcacatctgatgcaaaatatccatagaatacacgttagggaaagttttagctcaaaacaactttaaatgatagaatatttcaaatttagtacaatgttaaatatcctcactataaagtgtattttgtttttactctaaatccaaaaggttgccatttgtgtttttgtttttcattagttacttttttgtttcgttaaagtttgatcaatagtttcccacatgtacacattgcatgttcacagtcatattgacccttgaccctctcccatctccctccctgacctctgcaactctgccccaccaagttcccacaagcattcatgtctgctcttgtctggttttctttttctttttctttttctttttctttttctttttctttttctttttctttttctttttctttttcttcttttccttgcccattgagttgaccagggctgagttaaaacatggtttattgtgaccatgagcttggatacgccttttagagcctagtggactataatggaaagttttgtatgaaacccatccataaaatatgggaacaaaggggcccagcatatgtaactagttgcattccctacagtgaacctggggcgtcactggttactatattcttcctcatctaagcttgacttacatcagaggccagtctttgtcttcatctgaatccccaggtaccataaacagagcatctgtggttgaaaggtattcagtgatagtatccttgcctggtatgcacaaggcctaaggtttagtcccattgcacaccaacaaaaaaaaaaaaacccaaacaaacaagtttttctgtaaaaacttctaaatgatacttttaaattgaagataattttaaattttcaatgtataaacttgttattttacttttttctttttctaattgaaagtagatttttaaatataattattttgttcccctcccccataccctccacactctcccacccacccaaatccataccttttctttctgttatataatacagtcatcttaaaataataaaaacatcagtattttaacttgtattatgaaaacatttcatgtactttttgtttctgttatttgctagcttatattcatttttccatatattatataatttctaactgagtatcaaaatacttaacctagtcatttttttaaaagtgactgctttattttcaatgcagtgtctttctgaagccaagcaaaatgactactgacctattccttcgtttgtgttaataaactgtaggaaattcccactaaggcaatggcgtgtttttaatgacaagtaggcacttatttctaggatgtaactgtccaactgtccaaggtactactaaccttgagtgacaagttcagattctgtaggtatagattcagtttcttagtagtactggccacattctttgatccatttatgaccagtgcccactctatagagtagagtttctgctgaggacctacccccgtctagccacagccccttagcctactgacgctgcctgtcgtttatgaggttggtcttgtacctgggtatgtaaatactatccgagtggtcagccactcccacaatgcttgtgctgctgttgtcagtagtcatttttgtagttgtgctgttttcagcagtaggagcttgccctcaagtcaagtgttactaaagacagtgcagcttgtaatgtttgggggtctgtggaaaactcagtggtcaacagttccaaaagaaataactcagacagggcactcagcttttcatttattctcttctggtgtctagtagaggcattgttgacctgttatagtgtaactctattttaaggtgtgtgtgtgtgtgtgtgtgtgtgtgtagatgtatctatgtatgtatgcatgcatgcatgtatgtattaagcttatttagtatatatctttttaaaatgatctttggtagtgtttacccctccccataccagctcctatgtcctcccttcactcgcccttcccaatttaaccattcttaatttatgctaatacgtttccaaattggaagtatgttttctgctttctacctcaccatctcctttgggcatttttctttgatgtttttctcagaggccagaaatttttctcttcatacaaaaacctggcttacatagtcactgcatgagccaaatgatccatgtaactataaagtaaacaaaaacaatctgtttacagaaaaatattgtgttaaaaacattgttggtctcacatcaggcttaaattttggtcctaagtggaaaccatcaaacccccatatacaaagacagcaggaggactcctgagtgctgtagctgaggccattcccatgttctttcttcttttgtcttactcttctaccttcatgctttgctcttgttgaaaggtgtgtttgttcatttgatgcgccgaacttattgtgttgtagaaaatagacatttaaacgtacacttagattgttttataattggagattataatattgaaatactaatactgtgtgtttatttcaagttatatagactccttgctgttccttctctgtgcttatcagaataacaaagagctcttgtctaagggtccgtacagaggccacgatggggagctgatatcacattacagaagagagtgcttactggtgagtataaattgcaggtgtgtgcattttcctatgttagacacagtttacaggcttgcacataggtaattgactgtaaacactgttggataaaaatcatgatatctgcataaaagtatttttaatgataaaacactttccttgatttaatgcaacactgcgttccttgtagtagcagatttttatcatcatattgccactccccttttgctcaaacgggaggactagtcatgaagaaagatattctctacagcaaacaattagtttcctgagagtagtaaatcatgctggactgaagttgcaaactttccttgaacacactagcttctatttgcagtgggaggctgatagtttttcttcagatatttttgtctctctaaattattattattattattattattattattgtcgtttttcaagttactttaaaaatgtttttagtctacattacctaactttacatatgtagagactttgattaatgcatactaaatcagctagctctcccatatggaattacaaattcccccaaaatgtatttgattacgtttaactcactatttcctgccagtattgctcccatctataatgtaagccactgagtaataattgttttccctgtttaagaaagatgagaaaaaacctctctagtgttgttatatgtattaaatgtaggaaaagaatttttaagtgactcttttcatgaaatattttctcttagatattagaacgactcagtttacatcaattttagtgtgacgtgttgtctttacaggtttcaatcagacaactgaaagactctgattttcttttctttctctattgtctttgttatctacatagctttttctgagagaggtgtgtgtttggtgtgtatattagtagcgttatacctgatggctgtttgttctgctactcgttgaacatattgatgaggttgtctgcagtatcatcatgttcaggttctcctttcttaacttacgatgaagcaaaatgtgttctcttctcttgttccattaagaaattaaacgagcaagcggccgagctgtttgagtctggagaggacggagacgtgaacaatggcttaattattatgaatgagtttatcgttccctttctgcccttgttgctggtggatgacatggaagagaaagatatccttgctgtggaagacatgaggaatcgctggtgttcatacctggggcaagaaatggaaggtaagtttgagcagtgccgttaggccccagggaggggctcggcagcagaagagggctttgtcatcttctgcctggtttgatattctggagtcctgcctccttcactctatggccacgcccctccctccgttacaagctagcaagtgcacatttccgttgccatgtatgtaaaaatcaacaaaagccaaactcagatccccaaatgaaggaaatttcatgtgtttgccgttgtctcctctcccataagaagcctgcagaggtgcccctttcacctctctctgtgctgagaaaaatctatttgtatttgcagcaaacctccaagaaaagctcacggattttctgccaaaactgcttgattgttctacagagattaaaggtttccacgagccaccaaagttaccttcctactctgcgcacgaactctgtgagcgattcgcccggatcatgttgtccctcagtcgtacgcctgctgatggaagataaactgcccggacttcccagggtcaccatagaaactctgttctcaccccggctacctgccgcggggattgcttgctgctgctagagtttttaactttttattttaataactgcaaaagacaaaacgactatgccgaccttagccaagactgcaaacaataaacccgagaatcgcatggcactcaccttgttttatccgaaaccaatgtataattacaaatgaattgatttcttgtggcaaaagtatgcttttgctgccttctattgcagtattgcctctcagttttctttacaaacagctttccatttagtctgggacctccaagactaagccattaagtgtttagcactgtctatgatacataatatttggtagcttgtaaatgaaatcaaagaataaagttttatttatggctacctaagtgtttgtaagcaggtatattgtataatggtgtgtattttagttatatacatgagtttagccatggggtggacattggatgatgcatacaataatagcccttttgtgttagtataatggaaccatattggaaatgtactgagtgtttagcacttcactgtgtctatatccactgagttcttggacctaaacatgttatgttcagtcagatttcactaaagtgagcgactgggttttaagtcaaactgcactgaaacttttaacctttacttagattaaacgtttgttcttttctgtatgtataaataatacaaggtgattatttcaagagaaacctgaaaaagtacttgaataagggctattgtgaaatttaaaaagaaaaaaaatgtgcacatatacacacatacatgcacatacatgtattcttcataatggagggcaatgtttttcattatataattattctatttttgtaaattatatactactttaattgagaaatgtcctctactaatcaatgctgtgaaatgaaattgatactgttcaactaggaattataagaatcttaactttttatttgcctccttttttttttccaaaaaaaaaaaaaaaaaaaaaaccgtaaaagacgtagactattttatgaatggaactactgttttaagatcaatgaagtgatgttgtgaatgaaaatttagattcatgctttaaaggtaatcatgttaccaccgatctatttttgaatttataaaaattctttataactgatactttgttagcatagtaaaatatatccttatgctgtgtgtctattgcttcttgtagcgtcaccatacactctacaagtgcctgtcactaagaatccaacagcccagccagccagggcttctcaatgttcctgctgctcggaccctttagctcagttcctcatgttgtggtgaccctcagccataaaattcttttgttgctacttcataactgctactgctatgaattgtaatctctgatatgaaggatatcagattatgactgcaaagggggtcgtgacccacagattgacagccaatgcactagagaaagctaacacagccacttgtgtgatcatttggccaagggaattttgtgcagtgaggcagccaggaggaatcctggggacccgacctgtgtaaaatgaggtgttgcatatcgtgggcatcaaagtgtgtttgggtttagagtccttgtccttttaaaggtctagaaacttgtcactgtggttgccactttgctagttattacacatgttatgatatcctattaaaatggcgaactgctttatattgatgtatgcagttgcctgccagggcacaaaaggagtcaaataccaggtggacattattctgtcaagaagcacatccaaggaattgcatggttcttaggcatgaggtaagcagtatatttagttcgtaagaaactagctcttgatcctgtgggacagctcagtgggcaaaggaatttgccaccgagcctggcaatcgagttcagtgcgggaacccccccagggtagctggagggcattgactctcacaggctgtcctgtgaacacacacggacatgctgacactaaacaataacgaaacagaatcatataagcaagtgtattcatccctaggattgaatctgaaatagcttagttataatataaatgaaatttacccacacctagacattcaacatgttttcctgaggctgtttcccctgttctcaaggtttaggtctttggaatttatgttacttgttgagttttaagtgtaacttgtagcttgtgacttgagagatggagcttcataaaacagttatccatgacggggtcaacattcaaacagggtcattttggttcctgtaagtattcctattccccttttacattttgaaatattcaggatatacgtcagttaagaaagaacctaagacttaaatattcatggcttaaggggaccagaaaccatgaatagacctaagatattctggcagtatctcatccttttaaatcccgagtttgcagacactgcatttaagggtattagttctcaagaggttggctccagagcactgtttaacctgactggtatcatgttagcacagggagttcttgaccctgcattcatgcagaccccatcttcgtgaccttgtacatctttattcatctctatcgaggcttcaaaaatatgcttgctctttggcagaagcaattcactttgttccaccccagagttgtctcagatctttgggtttgcctttaaaaatatcttttgttctcgaattgtttactgcttctccggtagtattaacttgtgcatcaggaatgtgtaagccactattttttaattactaagtgctgatgtcatattagttgagacaggctctcctatttaaccagctctagcactcttctatatagcccaggatgtcctagcattcaataagcctcttccctcagctgagcatctttgtattattaaaatgcttcttaggtgagaactgactcaatacacaagattacatagttgttccactttttttgttgttgttttttgttgctgttgttgattttaatcctactttgacagactgggtaattaaggagcgtggacgagttaggtttttattactgcctttcagtgacgacagggcctgaaagtgttgtacttcccctagacaggaagcacccccattttgccatgtgttccattgatgctgcacgtagagggttcgcacacttaatttattgtcctccatctttttttttccagtttgttggtgttagttactcttgctctgctttccaaggtctgtgacttcctaaaacatttcttcaattgacttttcctacttgtattctttattattcataagccagtgatttctgactgaaaacacctcttggtgttagaccggtgtattcctattgtctgtctcctcagaagtgggtgtttcagacaagctaggcatgttcatggccataaagctgtagatattcctggatatttcaaaggtgctttaaccaggcagctttaatccaaattaaactcctcattgttccatggatctgatgctcttctctgcttcagtgaaggatataagtctagaaatccagtatatatatatattctatcttcactaatgccaagtgttgtcgagggagctcctgaatctcatggctatcacccaactctgcctttggacgattggatttattgaagagtagcctcctgtcctggctctttcccctgcaatccacctttcacactgtgactcggtgaccttcctatggagctggtttcatgtgtgtgttttccatggcaggactggactcctctaaagcgagatgatgctttttttttttaatagctcaagtacctgctaaactatctgggaacttttctgattcacttttgcaacttttctaaccctcaagacattgaatctgtaatgtgtttgcctttagctactttaaaagaataccacttagtcactcgggccgtatttcagatactcagtagtatcagatgacttgtggccacttataatttttttactatgttctcatttaaatgatgaagcatcagttccttagtatcactggactgtctctgacccacctgtcccaataacaactcagagacttattattatttattagagcttaggtcttagctggctagcccatagctagctctaacctgactaattctagtccttgtcttgccatatggcctcttgcctctcattcagaactggtttctgtcttttgcatctctgtgtcgcaatagccaaatcccccatgcctaattcttccccagagttcctatgtcagcccagaagtcttgcctttcctctttgcccagcagttgtccatcagatcattatgaagccaatcagaagttgatggaggtgggaggtgtatgtttacaaaatactcaggcagttgattatccataaaaataataccaaaatccagtcagcattcagctctctgcctgtacagaaatcaacatttgaataatacaaagacctttacaagactatcccaacaccttacttatgtggacttttcatctttgaaataatatccctttgtcaagcatgtttagaaatcctaattagaacacattaggtttcagtattgatttctatctcaggtctgccataaactagtttactgtctgtgtaggtagcacctctaaccacacgtgtgatgaaggaatgccagactggctgtgaagtagctgtaaggaccttgacttgagaatggaatcagaaatttaaatgcaggatacatctcatagtcctaagagcagggaagcacaaatgatgtcagaacgacggagcttcaacaagtcagctggacactgatgttcagttctgctgggaaactcacaactgggctgtttggacacatcatttggctagttctggaagtcctgagagttgttcaaaactacaatgaactaactatgttcttagttcaacattgatagaatcagcaatgacgagaagaaaatagccttggttttcctaccttccaactttcctgtagcactaattgtcaaaacctgaaatgaaatgaaggcaacgttgaaataagttgaggagttgaggacagaagcttagaggtctagcctcagcacccagagcctagagcagaaggacacagttacagctcagataaatgaggtaaagagctgtacactcatttcctgtaaggatccctttttatactgaaactgattccaaaacttgtatgcagggatttgtgtattatctctgggtcttaaagtgtgcttgtgattgaaattttctgtataagtctatgtggttcccacccttgatctctaactgagaaaatgccttacagctgtatctcatggaggcatttcctccagggaggctcctctctctgtgataactccagcttgtgtcaagttggcacacaaaccagccagtatggttgtctatgtatttgcattcagctctatgtttatatttgtggcagaaaggcttcttagaaatatgttccatgatggctaaatcatagaaatcttttagatggcagtgtactagtaagatcttagagtaccatgaatttctccacaatcaaaattgatccagaatgatatctttaaaagatgctatttttgatttgtgtatatcctgcaagtacacacatattccagaagatggtgtaagatcccctggagctgaagttgcaggcagttttctggcaagtgtgttatttctgcaagaacagcatttatggttatctgctgaagcatctcatcagcttcaggcaaaaagtccctcgagctgggggtgtgactcagtagagatggtgtatgcttctgggaacgaagcactgaactcaatctgcaggactgcagagcagctacaaaaagactccctacagatcaggaacgcagaaagtatgcactcgacagagatatctgcaaggtgcaagaggactgtgtccaggtaacaagactgtgaaagctagagttggctaagatcattatgctatgttccttgagatattcccaagttgtgacttagcagagtcaataaactgattatagaaacacagagcccagaaagtatgaaagagtacagtgccaaactgcaagcagcaatggtggttttgaaagactttgtaagtcacagaagacaaaggggcatcaaaggaagtaagttgcaaaggagaaaaatgcatatatgatttgaaatgcattaaaatctctgaaaatacctgatcattaaaaataaagtatatgcaatatgtgtatatatatatatatatatatatatatatatatatatatgcacatgggcagcatttcaccaaatcagaaatactcaaccaatgataatcctggaagatagtcaacttcattagcaatcagggttcagttagaccaagggagaaactacaaacacattaagactgacgtcaggctttgtccctgccagaggctgcagaaggatgtaacacagggtaaactcaccatataatgtaggtgaatgtctaaagtagtgcaaccacttcgcaaccaaaatatttcaagttgatagtacatcattcagcagatcctatgtatcttctgtatcctatatattgaatatatttgagacacacatgcctcagtttatatgtccgaagaattcttagaaataacattcaaatctgggcacaacctacatctgtcagcagtcaactgacaaattgcaccatatgcatgcagtggattattacatagaattaaaagcatgctcactgaagccacttatatcaatgggaagaaaccatgaatgaacgccgccgcacaattgtgcacccagtagagtttcatgtattaaatgttccaaaacccaagttaaagccaagttacaagaaggcgctcacagatggttaaactaaattaaaaatggaaggtgcataaagatggccagccatttcaggaaatggttccatttgagggtgatatgtgatttgaaagggatatctggagtccttcgggattgcttccagtatgggatttcatttttaaagtttattttgcacgctttcaatgggcactgccaatttggggagtggaaaagaaggctcagctctgcgatgcactaagcatattttctgtaacttaatatgatgacacagagaagtgcagggccagaactgagctctgagggcatttgaaggctgcagccctacaccaagaatgacaggcaaacaaggaatgctcagagtgggagaaacagtctccctcagaaaagaacacaccgattggttatccaataccaaattgtaatccctgaaaatgtacacacaagtaacactatacagattgagcagtttgtatttgggtgtatatattatgtatatacatacatgcacgtaatatctattaatgaaaaaaaaagccaatggatttgaaagccaggagaggagggtttttttaaatatttttattaggtattttcctcatttacatttccaatgctatcccaaaagtcccccatacccttccctccccccaatcccctacccacccactcccactttttggccctggcgttcccctgtactggggcatataaagtttgcctgaccaatgggcctctctttccagtgatggccgactaggccatcttttgatacatatgcagctagagtcaagagctccagggtactggttagttcatattgttgttccacctatagggttgcagatctctttagctccttgggtactttctctagctgagaggagggtcttatgggtaggaaaggaaagggagagatgattatattaacccccaaaagaaaaagaacaggcctatgtttgaaggaaacccacagaatagagtgtcaaatgaagtaggtaagttctgatgtttactttaagggacaagttttttgtttgtttgtttgtttgtatgttgttgttgttgttgtttttaaaattaggaacagacatccttgagtaagagcactgaggtgagaggtgctaagacaacagaggcaggaagcacgcagtggcttcagcagttcaggaggtgtaagagagttagttacaacaggacttcgggccacacagccagaaggcaagacgcctcagacgccagagaaaaatgttaaaacagtgtcagtccatcactgtacgagggaaaaaagcaaacttttctcaatgtcagaagaaaaacctggctgtgttctaattaataaacactgctaagagaactaaaacgcttttttctctccatgaaacaacagaagagaaaaccaaaataagggggcagcaagacctgtgaggggtttagttaatgatggcaatctgttgctatttgtcatctctggctatttgtcaccatgtatgttggccgttccttaaatttctctatgctaactgttaaaatgcttctagtttgaggaagagatctttagatagctgagctgttttcttctcgcttcccagtaggtggtgttataataccgcatttgagaacttaaatagtaaaataaaatcggaagagagaatgcctatctttgctgaaatgtgtgtgcttttattttcaaaagtcgttctgtttttatgttgtgaaatccatgagcattttcattccatgtgtatttatttaatttacattccaatcatatttatatatatttgtgtgtatttttgttcctttattctcaagagttataaaaaaaatgagttacttagttaatagaacaagatgagcaagagagttaacagagacaattttccatgatccttttgtacccatgcctcttagctgtagctgaaaagatactgtgcctgtcctggaaataaaacaggagaatcgaacctgccgttcttactagcatcacttctattttgcttgcagaatgcttttcatttgtggctttgtttttcaactgtcttcagaaaaaaaatggttgaccatgctgcaatgccactctttgtaattcagctgaatatagatataaaattcgacctaatattgccgaagcccatttgattccatttggcaatccattgcttggactcacgtagctgttctcacaatctctgtccaaggatggctcccaatacttcatgagacatcccagtgttttagcatccccaggactgtaatatacaacctttcatggtaagatcagtgccttagtatacttttgtggcctgaacataggcttgtcttcaactcagcaaacacgtatagtaaatattgaataaatgtgatacaatttaaataattatcttcttatactacagacatgaagtagctgccttgggagagctattgttagttaatttagtgcttgtgaccagtcaggaatccagaaccagaaagggcatgctctctgtctatgcattgatctttagtgggacactgtacgttcttgtggcaaaattatatttcccttatggataagctcagcagggaagtaaaagccctgttccctttgtattttttcctctgataactaaaaattaagctgggataacactaaataaaagttatgtctattttaaaattgctgagacatcttaccaaacttgagcagatgttgaacatgtctgtccttgagaaagacagagaaagtcagcagtgcgacagacagagtgcaggaagattgcagtgtcctaggaacattgtccctttattgcatcagtgaataaagtcaccattttcttaagacagtctgcactttattctaaattctggcgttctctgatatataaaaatatcaacactcctttttaaaattctttcttttatttattgagattataaaatagtatcatttctccatccttttcctccatacagacccatctctccctagtacttctctccccctcccacttctctttcaaatacctggcctcttttcattaattgttgatacatgcatacatatatacatacatacatatgtatatacacacacacacacatatatgtgatcctaaatacataaacacaaatatctcaggctatgaaatgttactttatgtatgttttgggggttctccatttgttatttaaaaaacagttggtatacccttccctgggctatttctcctgctctcaacattcattagcagatggtgggggcttgtgtagtgctgaaagatcctgggctttctctctgcatgataccaaatctttcgtaactctctttataacacctcaaagctaaaatccattgtccctggttatttcattaattgtactacatctgactgattttgaggacttaccctgagtacctacaaggtactgattatgaaaaaaaaaatcagttgtttgaaagaaccaagattgtgattatttgcacaaaaccacaaaaccccaatcactcagatagtgagttatcaagtttttgagtgtataaagtggttaaaggatagaaccagacatcaggacctcctctcctcttatgctggaaaagggggtggggtgggtcatttagtagaaggtggcacatcgctgtgtctgatagttttggtatgatggtgtactggctggttttatgtgtcaacttgacacaagctggagttatcacagagaaaggagcctcccttgaggaaatgcctccgtgagatccagctgtaaggcattttctcaattagtgatcaagtgtgggagggctcattataggtggtgtcatcccttggctggtagtcttgggttctataagaaagcgagctgagcaagccaggggaagtaatccagtaagcagcattcctccaaggcctccaaattcctcctgcatcagctcctgcctccaaattcctgccctgccctgcgtgagttcctgtcctgacttcctttggtgatgaacagcagtgtggaagtgtaagctgaataaacccttttgtcctcaacttgcttcctggtcatgatgttttgtgcaagaatacaaaccttaagacagatggcaacagtgtaaatagtagtctttcatgaaaaactaagaagaatgttagtcaaaatgggtctttttggtctttgggggaggttgtgcattccttttttaaaacataca

SEQ ID NO: 30 - DNA, 4247 bp, Mus musculus
cgggccgtccgcgtcgctgccccgggcccggtagagcgcgacaggcggggccgccgcgggggccatgaccgtggagcagaatgtgctgcagcagagcgcggcgcagaagcaccagcagacatttttgaatcagctgagagaaattactgggattaatgacgcccagatactccaacaagccctgaaggatagtaacggaaacttggaattagcagtagccttcctcactgcaaagaatgccaagacccccccacaggaggagacaggctattaccagacagcgcttccaggcaacgacaggtacatcagcgtgggaagccaggcagatgcaaatgtaattgatctcactggagatgacaaagatgatcttcagagagcgattgccttgagtttggcggagtcaaacagggcattcagggagacgggcataaccgatgaagagcaggccatcagtagagttcttgaagccagcatagcagaaaataaagcatgcttgaagagaacacctatagaagtttggagggattctcgaaacccctatgacagaaaaagacaagagaaagctccagtcggtctgaagaatgtcggcaacacctgctggtttagtgcagttattcagtcattattcaatcttttggagtttagaagattagttctgaattacaagcctccatcaaatgctcaagatttaccccgaaaccaaaaggaacatcggaatttgccttttatgcgggaactgaggtatctgtttgcacttcttgttggtaccaagaggaagtatgttgatccgtccagagcagttgagattctgaaggatgccttcaaatccaatgactcacagcagcaagatgtgagtgagtttacacacaagttattggactggttggaagatgccttccaaatgaaagctgaagaggaaacggatgaagagaagccaaagaaccctatggtagagctgttctatggaagattcctagccatgggagtgcttgaaggaaaaaaatttgagaacactgaaatgttcggtcagtatccacttcaggtgaacgggttcaaagacctgcatgagtgcctggaggccgccatgatcgaaggggagatcgaatccttacactccgataactcaggaaagtcaggccaggagcattggttcactgaattgccgccggtattaacatttgaactgtcaagatttgaatttaaccaggcattgggaagaccagaaaaaattcacaataaactagaatttccccaagttttatatctggacaggtatatgcacagaaatagagaaataacaagaattaaacgtgaagagatcaagagacttaaagattacctcacagtattacaacaaagattagagagatatttaagctatggttccggtcccaaaagattcccattggtagatgttctacagtatgcattggagtttgcctccagtaaacctgtgtgcacttcccccgttgatgacatcgatgctagttcctcagcaagtggccccctaccatcacagtccttaccaagcacaacagaacagcagggaccctgtgcttcagatctgcccggctcctcctcacccgcatcaggtgccgccctgcccttgaggtcagtgattcacaaacccttcactcagtctcggatacctccagatttgcccatgcatccggcaccaaggcacatcacagaggaagaactgtgcgtgctggagagctgtttacatcgctggaggacggaaatagaaaatgacacgcgagatctgcaggaaagcatatccagaatccatcgaacaattgaactcatgtactcggacaaatccatgatccaagtcccttaccgcctccatgccgtcctagttcatgagggccaggctaatgccggccactactgggcgtacatctttgaccaccgggagagccggtggatgaagtataatgatattgctgtgaccaagtcttcatgggaagagctagtgagggactctttcggtggttatcgaaatgccagtgcatactgcttaatgtacatagacgacaaggcacagttcctaatacaagaggagtttaataaagagactgggcaggcccttgttggaatggaaaccttacctccagacttgagagactttgttgaggaggacaaccagcgctttgagaaggaactggaagaatgggacacgcagcttgcccaacgatcactgcaagaaaagctgctagctgcgccgaaactgcgggaagcagaggcttcggccaccacagcacaagcaggaggcgcagactatctagagcagccatcaagaagtgacttgtcaaagcactggaaagaagaaacgctccgagtgattgccaaggcgtcacatgatcttgaagataaagggccagagacagttttgcagtcggcaattaaattagagtattctaggctggttaagttggcccaagaagatactccaccagaaacagattatcgtttacatcatgtcctggtctactttatccagaaccaggcgccaaagaaaatcattgagaaaacattactcgaacaatttggagatagaaatttgagttttgatgaaaggtgtcacaacataatgaaagttgcccaagccaaactggaaatgatcaaacctgaagaagtgaacttggaagaatatgaggagtggcatgcagattataagaaattccgagaaacaactatgtatctcataactggactagaaaactttcagagagaaagttatatagactccttgctgttccttctctgtgcttatcagaataacaaagagctcttgtctaagggtccgtacagaggccacgatggggagctgatatcacattacagaagagagtgcttactgaaattaaacgagcaagcggccgagctgtttgagtctggagaggacggagacgtgaacaatggcttaattattatgaatgagtttatcgttccctttctgcccttgttgctggtggatgacatggaagagaaagatatccttgctgtggaagacatgaggaatcgctggtgttcatacctggggcaagaaatggaagcaaacctccaagaaaagctcacggattttctgccaaaactgcttgattgttctacagagattaaaggtttccacgagccaccaaagttaccttcctactctgcgcacgaactctgtgagcgattcgcccggatcatgttgtccctcagtcgtacgcctgctgatggaagataaactgcccggacttcccagggtcaccatagaaactctgttctcaccccggctacctgccgcggggattgcttgctgctgctagagtttttaactttttattttaataactgcaaaagacaaaacgactatgccgaccttagccaagactgcaaacaataaacccgagaatcgcatggcactcaccttgttttatccgaaaccaatgtataattacaaatgaattgatttcttgtggcaaaagtatgcttttgctgccttctattgcagtattgcctctcagttttctttacaaacagctttccatttagtctgggacctccaagactaagccattaagtgtttagcactgtctatgatacataatatttggtagcttgtaaatgaaatcaaagaataaagttttatttatggctacctaagtgtttgtaagcaggtatattgtataatggtgtgtattttagttatatacatgagtttagccatggggtggacattggatgatgcatacaataatagcccttttgtgttagtataatggaaccatattggaaatgtactgagtgtttagcacttcactgtgtctatatccactgagttcttggacctaaacatgttatgttcagtcagatttcactaaagtgagcgactgggttttaagtcaaactgcactgaaacttttaacctttacttagattaaacgtttgttcttttctgtatgtataaataatacaaggtgattatttcaagagaaacctgaaaaagtacttgaataagggctattgtgaaatttaaaaagaaaaaaaatgtgcacatatacacacatacatgcacatacatgtattcttcataatggagggcaatgtttttcattatataattattctatttttgtaaattatatactactttaattgagaaatgtcctctactaatcaatgctgtgaaatgaaattgatactgttcaactaggaattataagaatcttaactttttatttgcctccttttttttttcc

SEQ ID NO: 31 - protein, 1063 aa, Mus musculus
SATGGAAAGAMTVEQNVLQQSAAQKHQQTFLNQLREITGINDAQILQQALKDSNGNLELAVAFLTAKNAKTPPQEETGYYQTALPGNDRYISVGSQADANVIDLTGDDKDDLQRAIALSLAESNRAFRETGITDEEQAISRVLEASIAENKACLKRTPIEVWRDSRNPYDRKRQEKAPVGLKNVGNTCWFSAVIQSLFNLLEFRRLVLNYKPPSNAQDLPRNQKEHRNLPFMRELRYLFALLVGTKRKYVDPSRAVEILKDAFKSNDSQQQDVSEFTHKLLDWLEDAFQMKAEEETDEEKPKNPMVELFYGRFLAMGVLEGKKFENTEMFGQYPLQVNGFKDLHECLEAAMIEGEIESLHSDNSGKSGQEHWFTELPPVLTFELSRFEFNQALGRPEKIHNKLEFPQVLYLDRYMHRNREITRIKREEIKRLKDYLTVLQQRLERYLSYGSGPKRFPLVDVLQYALEFASSKPVCTSPVDDIDASSSASGPLPSQSLPSTTEQQGPCASDLPGSSSPASGAALPLRSVIHKPFTQSRIPPDLPMHPAPRHITEEELCVLESCLHRWRTEIENDTRDLQESISRIHRTIELMYSDKSMIQVPYRLHAVLVHEGQANAGHYWAYIFDHRESRWMKYNDIAVTKSSWEELVRDSFGGYRNASAYCLMYIDDKAQFLIQEEFNKETGQALVGMLPPDLRDFVEEDNQRFEKELEEWDTQLAQRSLQEKLLAAPKLREAEASATTAQAGGADYLEQPSRSDLSKHWKEETLRVIAKASHDLEDKGPETVLQSAIKLEYSRLVKLAQEDTPPETDYRLHHVLVYFIQNQAPKKIIEKTLLEQFGDRNLSFDERCHNIMKVAQAKLEMIKPEEVNLEEYEEWHADYKKFRETTMYLITGLENFQRESYIDSLLFLLCAYQNNKELLSKGPYRGHDGELISHYRRECLLKLNEQAAELFESGEDGDVNNGLIIMNEFIVPFLPLLLVDDMEEKDILAVEDMRNRWCSYLGQEMEANLQEKLTDFLPKLLDCSTEIKGFHEPPKLPSYSAHELCERFARIMLSLSRTPADGR

SEQ ID NO: 32 - DNA, 169865 bp, Homo sapiens
taagtacttcctcaattagttcccctgaaaattgttttttgttttgttttgtttttgtttttgtttttgtttgagacagagtcttgctctgttgcccaggctgaagtgcactggccagatctcggctcactgcaagttctgcctcccaggtttacaccattctcttgcctcagcctcccgagtagctgggactacaggtgcccgccaccatgcccggctagttttttgtattttagtacagacggggtttcaccatgttagccaggatggtctcgatctcctgacctcgtgatccgcctgcctcagtctcccaaagtgctgggattactttgggagcgtgagccaccacgcccggccgaaaattggttttaaaagaagtgtgacacctctttcccctctctccttgttttcctctcccaccatgtgatttctgtgtagtcggctccttttcccctttcatcattagtggaagcagcctaaagccctcactagaagcagatgctggtattatgcttcttacacagcctgcagaatcatgagccaaataaaccatttttctttataaattatccagcctcagttattcctttatagaaacataaacagactaagacaactatagtatattagtgcaataaaattatatttattaaaaagcactgtggttatctattggagccaattcctaactttcacaatttcagtacttccaaaatactgtaataactcatagcaatgtcatacatttgaattgttctttaccatttcagagtgcctgcaaataattcatctttgatctttccaacattaaaaagtgaaacaacattctttgctttatttcttcatgcacatatttctaggattatattttctatatagttacataattgtttctaacctagagctcaagtagcttttgaatggtacttggataaagatgaaattttgatccaatttatttctactccaatttcttgaaggttcactataatgataaatgagacgtgagagacataaagagctgtcagatcagttttatttctagttcttgcaaaatgcccaatgacagtagaaatctatagcagtggatctcaatttttttggtcctaaggctgttttactcttaaaatttattgaataccacattgagatttcatgtctgtaggttatatctattattatttattgaatttttaaagatgtatttattacttcattaaaaataacaagatacccattatattttaatataaataataatgttattaaaataaccatattttccaaaacaaaaaacagtgagaactatgactgtgttgtttttgatttttgcatctaaaacacctgttaaactaaggtctggttcaacagaagacaatgaaatcatctaatccgccttcactgtcaatctgataccatacattgtttgaagtatatgaaaaatatctagcctcacacagatacatggttggaagcagttgtatcttgccaagcctctgaaaaggttttgactacctccacaaatccatcaaccaaattttaaaatggccactgtctgagtccatatttacattgcaatatataatcatggctttcttttatacatgctgatttctctagcaagctactgctccacagcaatcttggatttctctcctgaaaattcgctttccttctctatcacacggccaggctgtgcattttccaaatttttatgctctgcttctctttcagtcataaatcccaactttagttcactcctttgctctcatatctgatcataagctgttaaaatcagccatgcaacttctttaatgctttgcttagaagtttcttctgccagattcattaaggttatcattcttaagttcagtgtcccacaaagccctagggaagggacaccatgcaggctaattctttgctactgtgtaacaatgtgacctttgttccagttcccaataagttccacatttccatatgaggcctagttagcctagccttcactattcatatctctatcggcattttggttacaaccacttaaccagtttctaagaagttttaaagttttcctcatcatcctggattcttctgagccctccaaactcttccatcgtctgctctttacccagttataaagccacttccacattttccggtatctttatagaaatatgtctctgctcagtaccaattttctgtcttagcccatttgtattgctataaaggaatacctgagattggataatccataaagaaaagaggtttatttggctcacatttttgcaggctgtataggaagcatggcaccagcatctgcttctggtgagggcctcaggaagttgccaatcatggtggaaggagaaggggagccagtgtgtatagattacatggcaagagacaagcaagagggaggtgccaggctctttttaacaaccagttcttatgggaactaagagtgagaactcactcccaagagaatgacaccaagccatttataagggatctgccctcacgatccaaaaacctcccgccaggccctaccttcaacattggggatcaaatttcaacaagagacttggtgagggccaaagaaaccgtatccaaaccataccagctcgtttgcagtgtagggggtgtaagtgcaaaagctttgaagtcacacaaaactcctaccttggttcaaactggtttaacaggtttgggttgtgtgcccttgatctgtttacttcaactataagccacagcttctgtttctgtaaaaagagggtaattattccaactttactggattattataaaaattaaatgataagtgtaaagtgcctagcacaggtactggcacatagcaagaatataaaaaatagtgtctgtccctaaatgtatcatattttcccacatctccctcaaaatagaaggcctggaatagccatctcagctcacctgagagtaagaccaaccttagagagaaggttctgaaattaaaactcatgggatctaattttaaaatatgctattctatttttatatatacaggatttattcagtcatcattcccatacatttaatggtatttatagtatcatagtccaacctgaaagctatggtagatttgaacagaattatccaatgaaccttcatattaaagaaatttcatgagttgttcttgatgacaaacagaccaaactaataagctaaggcagtggtagattattctattcatatctcattttataaactgatattaaatatactaaacatactgaaaatgttttcttaaagcctagaaagtagttattcatttcaaattatctcacattataaattcttttcaaattagttcaaattaaaagttcatttcaaattgcaaatgagttattcatttcaaactgaaatttatttcaattatacttagtgagcacccatgctgttaaatgtcattgtgcagaatccaaaaatgatagcatttttgcctaacatttaagtttttttcttttctttctatttgctaatagcatggtttgcctagaaataaatttctgatttcctatatcgctgatatgtgttttttaaaattaaagacattgacacctgagctttgtgtcttttctactattcaagagagaatacaaataagtatcaagagtctgaaactaaagtagctgcctaggaattactaaacaaattcttttgcacatgatctgatattttaaatcatacagaaatatcactggaatagtccccttcttagactggcagatttttgacctgacctcgcttaaccctgcttcttgtcttgtcttcctagactcagaacattcaatcccaactactttttcttgctgctcatctaacaattttaatttctcaacttacaggtcacaaggaagtcttaataaaatagcaagtatgtgctaacatttatttagtaccttgtgccttaaagtattccaggaactttatgtgtactaaatcatttagtcatcaaaataactgtatattattcttttcattttatagatgatggaaccaacacagagaaaataggtcagaaagggttatgtcagaaaaacagaatactctctaggtggtgttggggccgagaaaccaatatcccaaatatggcactctgacatgctgaactaaagaagaaacctcaatgtctctgtgaccactcccttcccccatctctcattctctgtgtcttccaaagcacagaatgaagttgttctctgaagtttccttctctctctaaagtctggacccacataagaagaaaaaaaaaccctatgaacccttttctgagttttcatgaactgaattcatatcacagaaagacaggctgaagtttgtcaacacacttgaacagacatatatcccaagccattgtcttctctgtggacccaacaggctttgtactggccattgtacatgctctaagtccactgacttcctctaaaaatcattttctatccccttaaaaatatcgatacttcctggactcccttttccctaagagcaagggtatataactctctggacctcatatggttgggaagtaatcgctgtgattttcctctgtgtgtagtgatacaaattcgtatgcctttttaaaattaatttgatttttgtcagttgattttcagccaaccttcaaaagatgaaggggaaggtttccctttacccctacagtggttaaaacaaggaatatctatccaaagaatttgttatataggcaatgcagagctgaaaagccgaacaaggggagtgagttaagccagagtttagcaacatcaaaaaggcattactacccttaatttggagagagaagtgaggatgcacagcttctaaatctcagggacctacctcacctcactggggagacctagaatcaggcaagggcagtctggtgagatgggaaaccatccaagagatacatacagcccaaagagatgccatcagaggagagggaggagaaagagaaatagcctggctataccctttctcttgccctccagtacctttcctttgcctgttagccaaatctgtttcaaacccatctgacttacgagcgtgaaacatgcagggatagtcctctctgtgatttacagcagaacaacagacgctcaaggaatcaatctcgtagcaaataggaactaaggcttaagtaacttgcccacgatcacagagctagaagtccctgggttgttcttcagggatcatgtgcgctgaacatgggagataggtcttggaaagtgacattagtcacattctgacatgtggttttctctgcccatatatatcataggataatttcagggaaatgtgtgcccaccaatatggtgggagagactttgtcttttgagtataggtgaatggactaaaaagtgatgagaaaaggtctgaggcctccaagccattttcagtgtgcaagtataacttcgggcctgttcaaggtaagtgaaagcaagtgatgcaggcaagaaataacacacttttgcactggctctccgttgataaattctagctgtttctccatagtccttactttctaggtggaccttgcaaagcacattagactagattgcttttcaatgcacaaaacttgtttcccccaaaatgattctaattggaagtgccaatactggcagaaaatgtgtgcaggtactagcctttaaagtgctaatgcatctcttaccaatctacgaagttacaggatggggcatgaaaaaatatatttgacggcacaaaagtatgaagcataggattaagtaaagcagattgaatatgactgttacgggctgaattttgtctctctaaaattcataacctctctaaaaagtcctaacccctagcacttcagaatgtaactgtatttgaaaacaaagtctttaaaggggttattaagttaaaatgatgccatctgggtgcggctgaaatcaagtatgatttatgtcctcagcagaagatgaagagatactgtgggcacacacggaccatggaaagaggcagtgagagggtggccatctgcaaggcaaacagagagggtgcaggagaaatcaaccctgctggcaccttaatcttgaattcccagtgtccagagctgtgaaaaaatacatttctgtatttttaagacacccaatctgtggcattttgttatggcagaacagacaactaatacaataccaaagaagcaacatctagaatccctcaaaatgtgaggcactattgagggctggagaaactaataatgacacattttgtcatatagaataatatggctgggctgccaggaccacaaagctatccacttggaatgagaagttagagttagatgtgcaccacaaaagcacaaatacatttgttttctccccttcatggctgcccacttaattcaataagcattttattgtgcatgtattaggcaggcagtactcttgcaggttgtaatctatgaacacctgattgctaaatagtaccattatgacatcatagaagactcctctttaaatgattgcttattgttttctttttgctcttttacatggagtcttgctctgtcaccctggctggagtgcaatggcacatctcggctcactgcaacatccgactcctaggttcaagcaattctccctgcctcaggctccgagtagctgggattacaggtgcctgccaccacatccggctaatttttgtattttttagtggagacagtgttttgccatgttggccaggctgggcttgaacccctgacctgaggtgatccgcccaccttggcctcccaaagtgctgggattacagaggggagccaccgtgcccagcctgcttattgttttcttattggtggaaataaaattatcccagaatgccaacactcctaaaggaggaaaataattcagatcctcattgcagtagatttaaaaccactcttttgtaatggaaattgtctaaatctgctccatggattcaacaattctttgctgacatgcctgtaatccaggtagctacttcagaggctgaggcaggaggatcccttgagaccaggagctcaacaccagctaggggggaaacaaagaaaagtcctacaaatgtgttttggcaatatggtaaacttttggtatccggaaatggatttttaacccctttctaaagatacctaaggcggaagaataccaattttcttagttgacatataaaatacaatactgagtattgctagaaataacgttttgacccaaaacagaaaaatagtcttgcagtttgtctttgtctattttatgctgctacaacataatacctatgaatgggtaattgataatgatcagaaatttgttggctcacagttctggaggcagggaaggtcaagatggatgggccgtcatttggtgaaggccttcctcctgtatcattgcatggtggaagagctaagagaaggggagaaagagagagagggaaggaaaggaaaagggaaagaggcaagaaggagccaaactcgtccttttataaggaaactgtccttttgatagggactgcacatttgtgatagcaccattaattaattcatgaggtcagagctctcataactgaatcacctcttattagggcccacctccacactgttgcattggggattaagtttccatcacaccgtttttggggggatacattcaaaccacagcattgttacacacaaaatatttcatattatatgaaatatgtcacttaacatttttacctgaatgtcaacaacatagagtaatgcagcagtttagaagttattaaataatatcttgaggatatataattccgacacacatgcatattaaagctgactcatacaacacaattgtcacggcgcaaatttaaaaaatgagttaggaaatcccagcgatgggttttgtgtgccaatttatctcaattgctcaaatttctctaattattcatcccaattgtaagccttctaaaaaggaatgcctatgaggaaacttgaaattttcttctcaatgttcttcagtacaacagttaaaaatatttaaagaaatgctgagtaagtaggaaaccctcagaagtaagctgaaaatgaacagtctcagtgggcaaataggtctaccatataaaagctctatttgatgattatctattgtaagatcatctttttttttctgtatggaagtaacaaatttaactcagagaaaagttgtattgccaaattcttgaaattaaaccttagtatctggcaacatttttcctcccatggtactagattactagatttttatgttaaatttaattttcttgaattcaaatgtatgagcttgatttctaaaaaacaaacaaacaaaccaaaaaaccaaaaccctcatatggagaaacatgaagttagcatataaacaagaaaagaagaaactttgatctataaatgaagaaaaatgggttttgataagctctctttgacaggtcaccctccttgggcttcagagttataaaaaaatcgatacgtgagattagagatgtgacagtatttctaaatttctgtttccaaccgtttcatgacttttcatttcctctagaaaagacataggatattaatataataagatttgcaatttgttaaatatcaaatgagtcaacaaatatgaagcttcaaggaaaaggtgacaacaggtggtacaagacatctgagctgcagaacaaagatggttgtaaagtgcacagaactgttacaaagccttaagagctactataatccatgattattaaataacaccacatactatttcaattagcatttgccaagcttgctttccttgtcattggattaaaaattatacccggattttcaagtgtattctatttgtgacaatatgcattgataatttctctcctcacactgctgcactctcacctccgttcccagattagctcctggaactcgagatatttttgtggctagagattgctttcttaatgttagattttccttacaattccatatatagtcaagcattccatgcatggtagttaattgtttgcttaatttggcaactgggatattagaattatgtatcattaggcagtgatatttttgtaaggttgtttgctagatagatcctatttcatttatattaagtcttgggaagataaactttatttttccagagcctagcagtgactgacacatattcgaatgaatgaaggtagatagaaaatgtctatattcatttacgtaatgattagttaaggagaaaagtacttcccagcataaagatttctggcaaccctttgcttatttgacttttcccttcaggcaagttcaaggcttgtgaaattcctagaaaggcgaggggagagaacgcgtgacacagaaaggggccggagttcgggaccctacgcagttttgggacgttatgggcatggagggaaatgtttgctttggaggctttgggtaagctagggatccgacaagccctgggcgcagggaggaacgctgccctccggcctccagtcgcgctccccgaagcccagcgccagcgtcgcgcaacctgccgcaggggcggctcccgggccaggcagccaggcgcgccctcgccccacccgggaacgccaggcccgcgcagggaggggcggggctccatggcggccccgccccgccgcccggagggtcacaatgtagggttagggcggccggcgggcggggctctgcgggggaggagccgccgggcgggggcggggatggcgcgtgggggaggggagggaggaggactcgcggagggaggaggacaacgccattccgggcggccgctccctccgtcccctctctcccttccccaaagcagcccgcggaccggcagcaaaggaacgtgcgaacgcgtgacgccgcccgactggctcgcgctctcccgtgccccggcgtcctccgcccgctcatggcccgggccgccgcggacgagcggcgctgaggcgggccgcgtggagacgtgaggcggccgccgtggccctcacagtcggcgtttcgccgcctgcccgcggtgcccgcgcacgccggccgccatcgccttcgcgcctggctggcgggggcgctgtcctcccaggccgtccgcgccgctccctggagctcggcggagcgcggcagccagggccggcggaggcgcgaggagccgggcgccaccgccgccgccgccgccgccgccgcgggggccatgaccgtggagcagaacgtgctgcagcagagcgcggcgcagaaggtgaggcgagtccgccagccggcgggccccacttctccttccgacgggctgtcctctcccgctgcggccgggcgccccggcctcgccgccgccgccttcccgggcttcctccccggtcacccccggcccctgcccatcgcctcgggggcgtcgcgcccagagcccagctgcgtgtgggaagcagagtgtagtttgcgggcttcaatccacttccttctgccgattgttttcccgtagcagacggtgccaggtattgagagcgaccctcacattcctacagtgctctgtgtggcatcttaatgaaactttattctctccccttaaatgagaaagaatagctagttgtcatcctttctgaaccgattttgtctttcaaaggtagtagtgtaccaggcctgctattttgcaaaacggtctccaccaaaatcgaattacctgcctcgcggggcaggcgtgttgaccaggtggactctagaagtaggtggtttgcttggtttcttttccttttaaggtttccctttcttcttcttcttttctgtttttttttttttttttttttttttcaatatagaaactgtccctaagagaggaaacctttctggccatgttattccaggaatcttttgtcccctaagtttgaccttgttctttcgttcaccctttactcttgcatcagtcacacattcaaatggtcactcactaaagaaaacaattaaaaaactgtttgtgaaactttatatctttaaagtgaatagagatcattctgctattttagattttgctttcagaatcttaagtgcactatcatggcttgcaccatgttctgaagagtagttggccatgatttaacttctttttttaatttttaatttgcgtgaaaagcattttgggcaaaagagtaaaccgtgccttagttgtgttggtattacggggacagttagggtttactgtgatcaaccaccagagttatgtttggtttatctgggtgagtaatgaatgccccaccctgttgtagatttggtgtagattgcaatattctacctgtgcttgactttagaataagacctgttctaaaatgggctgtctacatacagcctgctaaatttttgctttgagattatttttagaattttatgatactgctttaaagtaatcgaagatactcaagtttggaaagcaaggatagtgcattgttattttaggcacgttgggaaagttgtttttgagacttgtatgttagttgatattattggtaaagttagaaggatattgcacactgcactttatttacagtgaaataattcaagatttaataatgagaatttaaaagagtttccttcctaatcctccctattctattttgaataccttcaagttcaatttttaaagacttaaggcttaggaaagagcacatggtcatgtgaacgctaagcaatatttaatatgtatggtaccatttgtttataattgtcttcagtgttgaatattaaagtctgtttcaaagtgagaaataccaatttttcacttcctaagtttgaacaatgggaagaactttgtaagtttaggatttttttattttcatttgattttgactaaactgtattaaataactatgcaggctctattgtatggttcagaggttatgcataaaattgtagaatcaagaatcaagttaacgaaagtgatcttggctgtcgagtccaatttcctactttaatgaatcccctccacacacaaagggagtagtagttaattcaaaatattatcattatgatgctacttttagtatggctgtgttttagatcatttcattgttattggggattttttttagagaaacttttatacttccataatatttagattgttttacagaagaaacacttaaatgtgtttgctttccgtattaatacacgattactttgttactcatattagaactatttaaaaatatttatatggatacaagtaaaccatctacctcgataagttgacagatttaaatccgtcaagctagtaaccaggaagcggacttaaagctggtaactaggaagtgaacttcacacttagaagaaacaaaagtgaaagtctgtttttactcagacactttatgggttatctaaaaggagaggtgtgtagtgtatattgcatagccaacattttagccagttttcttctcaccttaaaaaactgtgtgtacatatgtgtttttaaattttaagtatttactatttaaaatttaagtatttactatttagctatattattttcaagatttttaaaacttttattttgcagatggatgtaagtttttttgttgtttgcagcaccacactacacaaaactttcatgattttttggttcgcctatagaattcattagtctttgtcacaatgtagtatgatgaggcaagaggctgcctttcccttttgatgtgttctttgcttgattgctggagtttggccaacccagggacttatgagatgtagtaaaactgcagaaagctgcttttctgaggtttaggtatttcaggtgaggtgcagttggcagcagatgagttaaattctgtgataattttggttttggacatatatcttcagcctttgtgcttcatgtttaccaaagtgtaggagccttagatctcagaaatttgatacatagattcaagttccaaatgaggatactccacggcgccccccccccccccccccaatctatctaacccgatgaaccaagctaggattctttagggcagttattattgggaggagttttgctcccagggaccaaattaatttacagagtgaaatgaacaggatactatttaattaaatgtatccttctgagttgaataaaatatattgtttcactctagggcttagaacagttctttacacatagtaggactcagcaaatatgtgatgaatgaaataagtgactggtttccaaaaggagtgtagtactttgtttcctaactgaatcttggaatttaaaaattattgagaaacaatgaggctgggcatggtggctcatgctttaatcccagcactttgggaggctgaggtgggaggatcacttgaagccaggagttcaaaaccagcctgggcaacaaaatgacacctgccaggagtggtgtctcaagcctgtaatcccagtactttgggaaggtgaggcaggcggatcacgaggtcaggagttcgagaccagcctgaccaacatggtgaaacccagtctctactactaaaaatacaaaaattagccaggcgtggtggcacatgcctgtaatcccagctactcaggagactgaggcaggagaatcgcttgaactcgggaggcggaggttgcagtgagccgagatcgcgccattgcactccagcctgggcgacagagcaagactccatgtcaaaaaaacaaaaaaccaaaacaaaacaatgaaagcttgaaaaactgtgcgtgctcatgctaggagaataggcagtggtactgaaagacaggatgtgggatagatctcaaccacctttttgtcaccttgggcaagtcattaagtgcttctgaaggttctttcaaagcagtaatattagtatgttaacagtagtatgttaaggctttaaactttagcaacttctttagattagattgtttaatggtcctaagcaagtgttctgtatagggagaataaaaaagaaacagtatagaatggaagcagaggaatctaacagatctacagtcaactttcactgaattcctccaaagatgagggttaggtgggaaggttgtcatagattagccaagttcaagagttaaaacttgaaaaacaatgcagactggattcagggtaaatttcttacttaaaataacatgtattttccaatttaggattatctaaggttataaaactataccatgcagcatttgatagttaacattacttaaatcactttaaatgttacttaaaggaggcattctttattaggaatcagttgattatcttattattagtataagacttgatttgggcagagaggtttccagctgtttattccttttcttattctttccttttcacacctacttttgacttgtagactcacattgtatccagtcttttaaatgaattcacatcatttctaataaatattctgttgattttcttcaatattatatgtatacagtccatatcctttacaaatacttaatattctgacctctttcttgtcattatttttaccacttattactttaagatgacagaatgctactacaatttatgttagtttctattatatattgtttccttataatatggaaattttcttacattcctaagttttataaatgtttcaaaactagatttagatgttgactgtcatgtctttttctttgcagtgaatgatattttatgtcagtaacataagaaccatttgtacatacgatatatgaatatttactatataatccgtgtaaggcgctgtgctgagccttcttacaaacttttttcatttaatctttccaaccaccttatgaagtgagtgctatttttctcctttcttattgaagctgaagaaacagtattggagaactaaagcaacatttcatctctagtatgtattaagggttggataaactcaaaagtcatgtgatacacaagcccctgctcttaaccacaatgttgtatcgttttggctgtccttgaattcctgataaaaccccatttggtcatgttgctttactattttaaatatgtttctatatttaatataataaatttaaacctagaatttggtatacaattggccttctgtatccacaggttctgaatccatagattcaaccagctgtggattgaaaatattctggaaaaaaaaagcattgttgcatctgtactgaacatgtacagtctcattttggtcattattccctaacaatacagtataacaactatttatgtagcatttacattgtgttaggtattataagtaatctagaaatgatttaaagtatgctggaggatgtgtggatgtgtaagttacatgcaagtattataccattttatataagggactttgacattcgcagattttggcctctgggggtcctggaaccagttctccttggattctttaatgagattgcttacaaggtttggtgtgcccatgagggctattaagataaggttagctcataaaatgattagaaggctttctgtgttttcctgtgcttttggaattgtttagtgtaggattatgttgagtcattcaaaattggtggtgtatgatcttttttgatttgaaaaattagatagcgttcaactgaggtacttgttactttgaagatttggtgaacatgactgtatcagggctgagctgctcatttagagcaaattttaggtaaagtttccaaattttgcttattgtcttttaaattttctatcttttctagggtcaaattttaaatttttttagttctagaaaattctaaatttcatttaggtttctgtatttattggtctaaagttttgtcctaaatctgtgtgtgtgtgtgtgtatgtgtgtgtgtgtgtgtgtgtatgtatgtacatatatatatatgtatgtagacatgccattttttttatccctgcttgttttgtcgtcagtagtgtttgccagatgctgatcttatttcctgcttttttttttgagacggggttttgctctctcacccaagctggagtgcaatggtgcaatctcagctcactgcaacttctgcctcccaggttcaagcaattctcctgcctcagccttctgagtagctgggactacaggtgtacaccaccacgcccagctactttttgtaattttactagagagagggtttcatcgtgttggccaggctggtcttaaactcctgaccccgagtgatcagcctgccttgggctcccgaagtactgggcagtttctctttgtatttctaatggattcaatccaaacttgtgtttttgtcttttagaatttaaccatgcacatgtggtgataactgataaatttaatctttttattgtcatctgattatccatttattagtcttgttttctccattcagttttgatggatagaccaaattttcattgtatcaccacccccacccttgtctttaacgttttcttttcaattttggctcttttaattttaaacaaatatatttttataatataaaattttgataatataaaacattaatagcttttttcggtaacataaaaaattaacttttttctccacccatttgccccaaattaggtaagacattttagcatgttttttcttatggtattcctagttttgttgggataatatagaattgtaattctaggtgatgaattttcttagtgttgcagatgcattattagtagctagttttttttaattaactatttaattttaactgtgttttttggtctgttgtataatgctttttgatggtttgatgccactctgctttttttttttttccagataagttaactctctgtgttaccttgtaagattttactctttgtttttaagagttcagaaatttcacttgcgtgtgtttatgtatgtatctttttaatggtcctgcctaggatttttcgtctgaaatctgtgttctcaggaatttttcttccactcttttcctcatcttcatttaaaactacattatttggattttatacgtcacttatctttcttcctggcttcaaatgtttcttctctcccattttgtcctgtatgctgtggtaactttttagtttgattatctagattattatttttgtaatgccagttctgtatttactacccttatatgtggtcagatagtttacaaagagtttgtttttaataatatatatttttagtttggttctgaagtacacataattgaattaattttgccaattttctcatgatcagctcttcctgcaaatatattttcatttatttgttaaattgcttattttaaataataaacacacacgaaccccctatttaaaacaaaagctggaacttcgataataacctatatcccttatcctatccctttactttcatttgagtgtatcatcttgaatcctctgttcatcttcctgttgatttattgcatctatatcaatggctgaaggtattttttttaatgttagttgttttaacttaaaaattttaagaacttttccctgctacaatatctagaaggtagtcgtctgtatttttaaccaagagttttaaagttatatttgcaacattttatactctttttcatctgtgcttgagttttgtatatggtgcgaggtagggatacagttttattttcatcatatacagattgaatctctcatatccaaaatgcttgggaccagaagtgttttggattttggacttttttttttttcccttcagattttggaatatttgtattttgcttacctgggttgggtaaatatccgaaatttgaaaatctgaaatctgaaataagccagtgagcatttcctttcaacatcttgttggttctcagaaaatatggagttttcaaattgtggagcatttcttatttctggcttggagttttgggatgtgcaacctgtaaatgattttaaaaagttcttttgttatccttgctttattgaaaagttaatgctctcttctactgaattgataggccatctttgtcatatatgcaaaagtttaatgcaaaatttttttccctttccttgactttcatcattcattttgtgaatatcatcctgtgttcattgttgttgctttaaaataatctctcatactggaaaagaaagttctttgcctttgttcctttttttcagaagtaacacttgacttttccttagaaattttagaatgatcataccaagctctctcaaatcctctgtctttttgattaatttgattgaatctgtagatccatttgggattattaagatctttatgatacaggatgagcaggatatactatttttattaggtcgtgtttaatatctcttgtatggtttataatttaacacaaaactattgtacatcttttgtttcaggtagttgataatttctgataactgttatatggcagtgcttttaaaaatttgttattggtgtatgcaaatgcagtggtcttttgtatgttaattttatacctagccaccttgctaaatgtttctaataccttttccagagacaattttgtactttctgtgtaaaagatcatatcattaagggaggagaccacgcctcatattgtcttatgcccaatttctgccctcaaagaaagaaaaagtaaaaactaaaaggcagaaatgaaatccacaagcagacagcccagggccacaccctgggcctggtagttaaagatcgacccctgacctaatcagttatgttatctatagattacagacattgcacagacactgtgaaaatcccgatactgttttgttcagatctaattaccggtgcatgcagcccccagtcacataccccctgcttgctcatttgatcatgaccctctcacacgcaccctcttagagttgtgagcccttaaaagggacaggaattgctcaccccgggagctcggctcttgagacaggagtcttgctgatgcccccagccgaataaaccccttcctcctttaactcggttctgaggagttttgtctgcggctcgtcctgctacatcatgattaaaaagttttatgtataatttcagtttttgtgcctgtactttcattttttttcctgtactagcaaatacttccaataaatattgattagaagtgataacaatgagtatttttttgttcttgctgatctaaaaaggcagttacctacttttgtacctcatgcatttctgaaatatttacatgtgttagttgtgcagatttacaaagtaggttctgtttaactaaaagatattgtagtattttcagtcgtgatgcttgcaggtattttttctttgggtactggtgacctttgtttaagctttcaccctaggtatcctgggtgtggtggtggaggggtgctggtagtttgtcagtctcttctctgtcatcctaggaactgtgaagtcaggcagggcactttttttttgtattagtggccctcactaatttccttctccaggggccactccacaattgatttctgccctgatgtgcttagagtaaggtgtctacagggtctttcttcccctgacactggcataattttactctctaatgtcatagaattgctttaagcactgacctgcagcagtggcctgcctttttcctacaatataatcactgatttttgttatgtttgaaggaccaaatttggcttgtgaaagtgagtttaggaatgtcactatataatgtgagcaagtagatgatgtgaaagttgaatttataaaaggatgaggccttgcatttattttggcagactttaattaatttccaaggacatcatccttgtcatgacatcttgttttatgtatgtagtaagtaatttttcagtttttctcttttttgccccttgattaactctgcttcagtacagaccatctgctttatttttagtttttggttctctgaactgctggatattttaaatgcccagcaatattttccttagtcttgttactataggtttagatcagtttcgtataatatggtttttatggactgtcttaattatctgtagtgcttgctaaaagtgcagacttctgtgcctcaccctagacgtattgtttcaagatgttgagggttgggctaaagcctgcttaataagaatcgcagattattcttctgcacttaatgtttgaggatcactggttgaagttaattagtattcttaaaggtaaaagtgccttgagcactgtgtaaattgactgcaggggtcctttagggattgaattatcacaatacaccaaatttaatatggaagcagggtctttgaacggacattgtttttttttgtttcaggtgtttctctccatcagtgcagcaacatgtttccttgtagaggagctgtctcctccctcaggcttttctggccaacatctctatggaaacccaaagcttcaggtggctaggtgggatacttgcccctcttactcctggaggcacaaataagttgaatcgatggattaaggagttggaaagtgattgtacatgctaaagttgtaatcttcctgtttctttctggctgtttttttttttttttttttttttttttttttttggtatgtgcgtgtgtatttgtgtatgaataattcctataggatttttttgtgggggctaaccatagcatatgaaaacttatgtacaacttaaatatattaagattagtattctttgtacaattttagacatgaaatagaatatcttattgtcctggaaatttcctttgttcctcattcatactgtccctcttttctacaccaccccccacccccacactactgctatcttgacttttttcaagttaatgttatcgtggtatgatttacactgaaagtgtgtaatttgatgaatttggccatacagaacatttctgtcactccacaaaatttgtcctgtatcacctttctcattaattatcaacaccgtcattatttcaggcaactgttgatctgatttttattactgtagatcagttttggctgttctgggtcttcacatcgatttgtttataccaaattttttttttttctcgcatctgactgcttttgctcagcaaaaagcttttgagattcacccatgttttattgcatgtatcaatatgtttctttttactatggagtaatattatataaatattctcacatctgtgtattcatgtaccttttgatgtacttttttttttttttccagttttttgacccatatataatgttatgtgtacatttgtaagcaggtctttgagacgtatttctatttctcttgggcaaatacataggtgtagaattgttatagtactaaattgttatccaaattgattgtatcattgtacattctcattagcaatataggagaatttcaggtggtctacatttttgccaacacctggcatttttaatcttttatgttttagccatttggtgaatatgtggtgtacctcattgtggtagtaattgtatatttccctaatgactaatgattttggatgtctttcaagtgcttgttggccagtttgaggatgattttttttaacattgcttctcatacattatccagttttaacactcctacacgataggaatcacagtagctgcattcttccaagtcttaaaatggcaaaaatgtcagagatgtagctaaaggtagaacactccaggaccaagtgctaatatgttcacaaaacaaattgagattgcacaattttttttgtttgcttgtttaaactaacacctgataaaaaggtacattgctgaaaaatgggaactcatttcttcatcatgcctcaaagtaaatattaaatttatctctttaacaattaattgcacacatacatgagaaatctttatgatacatattttattacaccgtgtacaaaaataatttcacattttagttgggttggaagtttgaaaagaacatagtgcagttgcaggggtgggatgaactgtggtgaggtaagtaaattggacagaaattgggcagaaagatacttcctttttttttttttttaacagttttttatctgtctgaagacagggaagaagaggaatctgaattggaaaacccccactatatctgttgggtttttgttgttgctgttcagtctggaaatgggtggtgtgtggtgagaggtcattaggtcatcagggcagaattgtttgcagagctgggagctacatcctcacggaagtgggatagatgtgctggggaggggtgtgcagagaggagccaggaatgatgtaccattagtggccagggcttgttatggtaacaccaatgttgaaaccaactgtgcattcacatatacaaaagttttgtgtcttaattcatgccagaatacatgcataatcaaatgtctcagttaaggtggagctacagaaacactgggctgaatgaagttctggggttttctttgtcttcgtgtgaggcctctgggctgggtctgggtgtctgatcaagaatgccctgaagttttcccatggggctttggagaacggctttggagctgggcagagctgaggatgagcacagaagaaaggaaacgagaaatggtccactacctgaggtttaaaatcctcaatttttggagggaagaagtgacacaagattttatcggtgccacttcaccagcaagaaacctctaaggccagcagtgcctctgcccaggctttgcttacactcactgggctcgctctgcctgctcggcccagcagggtgctctcagctgatccccagcccagatcccacgaccactgccactccgtgctcagcccatggcgggactgggtataccgcatgtggcttccacagctggactccagcattcagatgaggggaacgtggtggaacccagaaactcggagacggcagcaaccgtggagccccaagggggtgtcatagcttctgcctggggagtcccgaggtctgagccaccagggaatgccacagccctctcttgttcctgccgctcacagctccctgaatgggggtgtgttagagcttgtttattcctgctgcgcatggctttgtgaatgggggtgtattatggttctagttcgaggggtcctgatgtttgggcccccagaggggtcgcggctcatcactcccatattccagcaattgggagtgtgtaacagctcttttcatgcccactgcccacagctccaggagccagccaggtgcgtgttacagccgttctttgttcccaccgtttggcgagttctgggtttttgtccagtgaccaagaataatgaggtacgtggacaccagagagtgaggaaggcagagaagaatgttattgagcaacagaaaagctcttgacaatgagaggggacgtgaagtggatagccctctgtgtgagggggccccaaaagctggtagccatctttgcagttgagtccagggtttttttaggtttggaatgaggagatgtgggctggaggtagccttggaaaaggcaacattcaattggtttaaaagcattattcggaaagaaccaattgggaaagagtaggcaaaaagaaaagttttcactccagctgtggactctatctatatctagaacaggcagcttggtaggctttaaactgtctttggtttgaaggtcaggtttcaccagggacctgtccctgcctgcctaggagttggtctactgtggcgcctgcctaggaattggtctactgtggcgcctgcctaggaatttgtctactgtccctgcctgcctgggaatttgtctactgtggctatcagaaacagctctgcgcaggcctcctggggtcagtggacactctctttaccaattttggtagcatcatgcagatttgcagaactggcttctaggcttcttcccaagtgaggcaggaattgaagtcacttagaacagtggaacttacagaactgacagtgtttccattcttgctgggtggcgccaggaggagagcaccagtgtacctgagcatgtcgaactgtagcagagtagctgaaagcagcatataagatgaccctggtcagctctgtggtttctatggtgtaaagtgggtaggggtttcaggcctttggggttacagagatcagagccactccctcaggtcatggggtcctgtgctaggaggtgtggtcctagggctgtgtgaacattggtggggtttgccattactttatttttgtccatcttggtgttggcttaggcaaaccttagggtctgcgtttttttgttgttgttgttatttttgagacaaaggtctcaccgtgtcacccaggctggagtgcagtggtgcaatctggctcactgcaacctctgcctcctgggttcaagtgattgtcatgcctcagcatcccacatagctgggactacaggtacacgccaccaggcctggctaatttttatgacggggttttgccatgttggccaggctggtcttgaactcctgacctcaagtgatcttcctgtctcggcctcctagggtctgcagttttgttgttgttgttgttttggggcagagcttcgttcttgttgcccaggctggagtgcagtggtgtgatctcagctcacggcagcccccacctcccaggttcaagcgattctcctgccccaacctcctgagtagctgggactacaggtgcctgccaccacacccgtctaatttttgtatttttactagagatggggttttccatgttgtccaggcgagtcttgaactcctgacctcaggtgatccacctgcctcagcctcccaaagtgctgggattacaggcgtgagccaccgcaccccgccgggtctgccgcttttgaatgaaagtaaatgctcttccaagcatttcttgcatgagcagaagagtgtgtagaattctctcggtttgctgtctaaagcaagagggctgactgaccactttagggccacggcctccatccccgccacttcccctcccttcccctcccttcccactccttcttttcctgagtgctgatgttgttctgccttaagcttctaagcaggggcatcttttatggtcggggggagggaggtgtgggaggcaggcaggggatgttgcaggagagctactgataacccagggcctctgtcttttccttattgaccatttttatgtcttctttttaacatgttaagattatttcccaatttcttagttgggttatcttcttgctgttgagttgtaggaattctttatattttggttgtcttttatcatgtatatgtaattacaaatactttctcccaatgtgtggcttgtatttgcattttcttaacagtttctttgaagttgaagtattttaatattgattgtttaatttacttttatggttagtactttaaccattttctttttctttttcttttctttttttttttttttttttgtgacggaatttcactcttattgcccaggctggagtgcaatggcatgatctcactcactgcagcctccgcctccctgggttcaagcgattcttctgcctcagcctcctgagtagctgggattacaggcatgcaccaccacgctcagctaatttttgtatttttagtagagacagggtttcaccatgttggccagcctggtctcgaactcgcgacctcaggtgatccgcccgcctcggtctcccaaagtgctgggattacaggcgtgagccaccacgcccggctgctttaaccattttcttgaaacttagtttgtaaattttttctccctgtgttttgttctagaagttttgccattttaggtttacgatccatttggaattcatttctgtgtgtgttctgaggtgtcactaagtcaaggttcatttattgcatgtggaatctagtcccagcacctacttttgaaaaagctgtcctttcatcattgaattatattggtacctttatggaaaattaattgatcatgtatgagtgggtttatttttgaactcagttcctttctatccttatgtggtgccgttctttcttgattactgtggctttgaaatgtgccttgaagtgggtgaatgtaaattcttcaactttgttcttgttagaaatttgttttggctattctagaattttttgtatttccatatacaattctgaggtactttgaacagttggacaaagagccttctggggtttctgagtaggattgtgttggatgtatggattctttctgactgtttggacatctttacagtattttagcctttcaatccaagaacacatatatttctccatttatttaggttttgttttttaacggtttaaaggtctttgcatatcttttgttacagttgacttttttgatgctattgtaagtggtattttttatttttatttttattttttttgagacgcagtctcactttcactgcaaccgccgcctcccaggttcaagcgattctcctgcctcagcctccctagtagctgggactacaggtgtgtgccaccacacccggctaattttttgtatttttagtagagatggagtttcactgtgttatagccaggatagtcttgatctctggacagcatgatccaccagcctcggcctcccaaagtgctgggattacagttgtgagccactgcaccctgccagtggtttttagtttttattccaattgttttttgctggtatatagaatgtggttgatttttctgtatgaagcttgtatctgcgactttgcgaaattcacttattctaataaatgtatttaccacttttattcattttaaaaattgtgctttttggggtattctctaaaatgtttaatagaagtggtaatgacagacatctttgtcttgttcccgattttgtatggaaagcagtcttttactactaagtatggttttagttgttgcacttcttattttgttaaaaatgtgttattgttaatttatacttctagatatactacagcttaaccattctacagttaaactatttgtttatatatctttttatatatttatggtccactgtgattcttttctgtgaaattgacatttgtttctcttgcctgttttttcttttgggctatttatctttttctttatgatttgaggtagttctttatggtttagatactacttttgtttttctatttacaatagtccacgtttactctcatggaatgtgttccaagacccccagtggatgcctgaaactgtggctagtattgaaccatttatagagtatattttgaaagagactacattcacataacatactgtatatgttttcaaaatatttgaaatagtataccatatatagtatggttcagtactatatagaatatagtatatatagttttttcttatctatatatacctgtgataaagtttaatttataaattaggcactatataactatatagtacatatagtttttttcctatatatagtatctacctgtgataaagtttaatttataaattaggtaatttataaattagtagagactaacaacaataactagtaatgaaatagaacaactatgataatataatgttgtgtgaatgtagtctttttcaaaatatccgataactgagatggctgctgactactaagtgggtagtatacacagtgtggatatgttggacaaagggaagattcatgttgtgggtggcatggagtgagatttcattatgcacagcactcagtcagaatagtgcacaatttaaaacatcgtttctggaacttttcatatttttggactacgcttgatcattggtaactgaaacttcaaaaagtgaaacgagataaggggaaactactgtatatgttttgcaaatattttctgttttcacgatgtctttttattctctttatgtactttcatgagtagacatttttatttttaatttagtttcatgtataattagcttcctttaatatttgaacttccatgtcctgtttcacaaagatagtctcatttattgccctctaagtgttttcttaatttgtcttcatgcagggtttaagtttcattccacttgggtttgatttttgcatgttgtttgagtagatgtcagaatttttcccctctggagaaccagcgactttattgaacagttcctccttcccattaatactctgcctgacaacagtatgtatactttttaaattcttcagttgggaccattgtaaagaaaaacaggtgtcaggaactttcgcccttgaattaaaaaatatatttttgagacagagtcttgctctcttgcccaggctggagtgcagtggcataatcatagcctgcttcagcctcaaactcctggacccacactatcctccctcctcagcctcccaagtagctgggactacaggtgtgtaccatccacccagctactttttagttttttttttttttttttttttttttgtagagatggggtctcgctctgtttcccaggctggtcttgaattcctggtgttaagcaaacctttcactttggccttccaaagcattggcattacaggcatgagccactgtgctcagccaaattaaaatatttttattatggttttactgaaacttgtttaaatataaactaggcatacatttattatgttctgttgggtagctcttatgtaataagatgaaaaaccaactactaacttaaaggtaaccaaaactacaaaactggagaaattcagaataaaaaggttagcttaatttgacagatggcagtgttttgcagaagctaatttggcatttgtggcttcaactaaggaaatcggtatatgtatttcaggatattgtaatatgttaagcttttggaagtaaattttatttctgttgtcaactatactgcatttctgacttgatacctaattaataaccattattgtagagtgagtggtatttttggtctttttattgtaaaactgtaacagatatgctctcaagtgtgtttttttttttaatttttttttcttaagctatagctcagtaaatgccgatatttccatgttgaactgaacaggttgtgtgatttaatgtagagcaggatacacttgctgtgaataagaggtaacaattatagcttacctataagttagcgccaaataaatattcatcagaacttgtgagtactttgccttgtgtacatatttgagtgcctgggcaatcaagagagtgacatactatgcagcgtgataactgcttttgtagacattgtgaaatagtattcttatactgaagtaataattgtattctaaatattgctttattgctagtatgtgtttctgcttatctgtgggaattttccaaggtttgtctttgattttctgatttctttgcaagctttacctttgagagattatatattttccgagtcatatatgttcattactatcaagtatgtgtattgaaaataagtgtaatgttacatcttcacataaattctagttttaggttttcaattgcatgtgtacatttctgcttagtcatcactcagtatcatgaccgttcatttatgtattctttgttttaagcagactgagaaatagataacatacaaaaagcttttaaattggtagtggctagagccagaggtgcacagataatattgaaagttaaataaagtatttgtaggtagaactaagaggatctaggaagactaggaaagatcttataaaggaggtaatagctgaaataaactgttgaagatttgtaggcaggtcgaagtgttattccaagtaaagagaagtctatgagcaagggacaaatcttcaatgatttagtgccttctgttatctacacatggttttatttggctgagtgtgatataataataaatatttggtctttttcccttgttcctggcatggagcccctaaagcctttggaatttactctctagtctgtgctaatcagatgagtggcgtgggtctgggtgtttggggaggagaggctgtgtagcttccacttcagggtgggtactctttaccactgtagttagagggtgagaactttcaaccccagtccagcatccggggagggaagaggggctgcagattgagcccaatcaccaatggccaatgatttaatcaattatactttaatgaaatctccagtgccgtgtgtgtgtgtgtgtgtgtgtgtgtgtgtatgtttttttttttttttttttttttccttgagacagagtctcactctgttgcccaggctggtgtgtaggagtgaagtggcacaatcttggttcactgcaacctccgtctccctggttcaagcaattcttctgtcagcctcctgagtaggctggactacaggtgcatgccaccgcgcctggctaatttttgtatttttagtagagatggagtttcaccatattggtcaggctggtcttgatctcctgacctcaggtgatccacccgcgaaaggctcccaaagtgctgggattacaggcatgaacaattgtgcccgaccccttatatccttttaataagtgttcagtaaatagtagttctatgataatgctcagcgtatatggttaactttttcccctaattctttttttttttgagatagagtctcgctctgtcgcctaggctggagtgccgtggcgtgatcacggctcactgcaagctccgcctcccaggttcacaccattctcctacctcagcctccccagtagctgggactacaggtgcccgccaccacgtccggctaattttttgtatttttagtagagatggggtttcaccgtgttagccaggatggtctcaatctcctgaccttgtgatccgtctgcctccgcctccgcctccgcctcccaaagtgcttggattacaggcatgagccaccgcgcctggccctttttttctcttaaaactgtagaattatattattaatacactgttagtatacagaaattgttttcaaggaatttgtttcagggtccagtgaggacaaagaaaggacaaaaagtagaacaaaggagatttggtgtaaagaagtattgactaggaacagatgattggctgctagagggtaaagagaactctaaagtaagaaatgaatttgggagaggcccttcagaagccccaagactctgagagattgggttcttgttggagaggttgtgaatggagcccactggatggcagagcagtttatagaagtgctgtagcttgggacattcctgccagtagctcttttgaagtggtgtagagtatgtgctttatcgtatctagatgaatggagtttccaagagaccataggacatattatataagtaattagcatgaccaaaaactgtatttgctttaaagaattgtgacaaatataactgctaggaattatatagtattccagtttcagagttctacttagagcacgtttattttgttttattagtataagggagtttatttttggattataagctaattaggcaaacaagtacagaaactagagatgcataaagatttaattggacaagagagctataataggaatctgattattagcatcaacaagttaaatacatattttatttaaactgcagacatagtgatttaaggatatgatttgattcataaaagttttgtttacctacttgttttccagaatataggcactctaatttaaaaacagactgtgttccaaaagattttgcaagttgggtttttggaactgaaaatacatgttcccatagaaaccatgtttcctggtggtgtgttcttatttagaaatgtaactctgtgtgaacttagcttatagtgctgagtaacagtattttttgggagaaatacatttagagtttctactcatgatgtatttattttatctactaattaatagggatggggaatactcttttacattgtaattaaaaaaattttttttaagacagagatttgctcttgttgcgcaggttggagtacaatggtgcaatctcagctcactgcaacctccgccttctgggttcaagctattctcctgcctcagcctcccgattacagggattacaggcatgcgccaccacgcctggctaattttgtatttttggtagagatggggtttcaccatgttggtcaggatggtctcgaactcctgacctcaggtgatctgcctgcctcggcctcgcaaagtgttgggattacaggcgtgagccactgcaccctttttttttgagatggagtcgctgttgcccaggctggagtgcagtggcgtgatctcgactcactgcaacctccacctcccgggttcaagcaattctcctgcctcagcctcctgagtagctgggactacaggcgcctgccaccatgcctggctaatttttgtatttttagtagagactgggtttcaccatattggccaggctggtctcgaactcctgaccttgtgatccacccatcttggcctcccaaagtgctgggattacaggcgtgagccactgcacctggcccagatggggaatactcttaagggtcataaacatgatgcagatatggttgaaaggttgggtgacaggtaggaaaaaggactctgtggcaagggaggatggaaaccatcatttatctaggactaactatatccattgttctttgctagctatttctcataaagtatctcatttcttttttctggattgcatgaatgcttaatgttttagctctggaattctataaaaagtaggaagagacttaaaatttagaattcttggcatttttaagctttaatggaaagggtataccttcagatttatgtgcccatagaggtatatgagtaatttattttaatgctaaagtgctgttaatccaaaaagattgagaaaaacttcaatctgtgacagtaggatatgcagcatacctgaaccatttgttacccgccaaaaacttgaaaaccaggattagttgcctggtgagtaataaacaactcttcaagagaatgcaggttttggtcagtaggagttttactacttgtcacaaataaggagaatacttggagtattctttagagcattgttgcctctagggaaagtgacagggaggttttatggggtgatggagaggggagagggtgtgacatcacatgtagaggaggggtcccagtggtgcaaatgcagtgagtcactatgtcagcaggtaggtcacgtgttatggtaatgaagctgtagttcccccccagggtgctgactttagcatgataatgaggaaagttcacttgggttcatctgcatgttgcgagggtctgtcaggagctggctccaactgactaggtgagagctcattcctcacagggtttgggaaaaaacaggtggcaaggtaggaggttgtaaacaggccagttacttaagttgattaaattcctatagtcccgggggaccctccttgtctgcttacacattcatgggactgtcatatagattatttgcaatagggaatttcagtaatattatattttatacaaaccttcaagtgagattgacaggaccagaactgggaaattctagatggaatgtaggagtgtagaaagtttgcttagtaagtgggcctgacttatgtcatttagaagaattcttcaatttagaagaattagaaaatgtgcttattagttggcctgatatatgtatgcttctcgttcctgtatgagagggaaaaaaaaaaaaaggcttctctttacctttctaagttctttggctggactagaaattaaattgacaagaggcagattaacaggagaaaacccattttaattacataggtacttacaggagtcccacaaaataagagacttgaagaagggtcacatgattgaagcttatgtagcatccagagctacaaaaagtgataggggtttggggcttctgggaggggtggcaacacaagttatgagagggtgggggaggaaatgtatggtgaataaagggtgtcttgtgtagataaaaagtcactcaagtaataaaagttgttgcaaccctcttgctgatacagatactttttctaatgtagatttcctttaaaaatggattttttttcacaaaaggacagtttttcaaggttactcttgtgtccgcagtttctcaaaataactacctcaaaatatgccaaagaagtatatttttgggtggcatattctagtcgcctgcagtcttatttggaggtggtgtgtcctgagccccagcattcccatctccaataattagttagtgcctcttttctgtgggataagcttgtcttgtgatatggcttgttccagctcacatctgcaggctctgctgtattcatttattcagtcaatgttgattgcttgccatgtgccaggcattatatgtatgtaccaggagtacagtgatgaacgaattatggtctcattgataactttgaaatgattaacatttggtgcctagcagtgctttagtgcacgtgcttctgaagtttaagagttcttgtcgtctttggatttaccttgtgattaaccatagtgtattattataatttgtggtgagtctcacagaaggcacctacatgtgcagagacctttgcattatgaaggagaatggtgttctgtagaccctgaatgaaagagagggaagaggaatgccagggggaaagcaaagcaagttagtgctggggacagaggtagggactctagcatgcagaggtcctttaagctgtgaggactatactataggaaaattcctcagacaagtcatagaatattacagttgagggaaatgaaagatccggcttacacattaacaagaaaaacatgactcaggagattttttcttcttctttgctttctggctatttagagactggtttggacttacaaacatgaaggatgtgttatgtacttgaaattcttggacagtgagtattagaggtttcttatggtaagagaacatgagctagagcagtgtagtgttagcaggtagatgcagaggtttttgcaaaatcaggtgtgtgtgtgattactcactttaaagacagtataatgaattaatcttgtcattgacaggtaactttgaaatgcctacatttggtgcttagcagtgcgtgtgattctgaagtttaagaatgtctttggagtttctatcagttttttttttttcctctgttcttagaaaatttggaaggtttttttagaggtcattctaagagttgcgccccccgccttacacctatccccaaggatggaaacctttgactttcttttcctgaaccaagtttcatttatatttggaaatttagctgaaggagccaaggactgacttaatgagtcacccaccgcttaacacaaactgtttttctcctttgttgtcagtggtgctttagttttcttttaccattttataagtattttacatcaacataatagtggatttttgcactgagttttcattttttattgaatctttaatctccaatgttagatatcctagagttgagaaaatatggcaaggacatggaatttgaacgaccaagtttcaaccctgtctctgcacttactaatgtcttgaagtctgtgttagctatgaaatgagagtaactttctagagggtgtgtgggtatgtctgtattaaatgagagtatatattggaaacattggaaacagtctggtatagggaagtttaaaccttcactctgaaagttcgattaattgagtgctgaaataaactgacagtaaacagattagcaagagaaagtgcatacaaatttattgacatggaagcatgggtgggagctacaaaaaaaatatgaggctctaaaaagggccagatgattgaagcctgaatcccctcttcataaagggagaagtggaggatgcaggcaattttagaggaagagtaaatgatttcaaggggagatgagtgtgcctgaagagcagacaatgacctggaacaaaattcttccgggctctgggagagatggtggcaattttttgggaaggtgaggggcagaactgtactgcaaacaaaagttgtctttgttatatagataaagtctctgaggtaagaaatagcccttagaagaatagtcaaaagaataggtgaaaagtctgtctgggtatggtatgcccaggtgcatggcaatttttagttttctttcctgctataggagttaatcttctctggtttatatagattccagggaattatccaagacaatttcgttccttctggatgaacgtccctcagtcagataagggaacttcagagaaaacctctccctgtgctttggaagggaaaacggggaggcaggagaatgttggagagagaccttgcttctgagtcctttcaattgcttttgttcagagcactcagcaagccagaatgccatactttggggcattgttttcgtaacctcaacattgatatacagcaagagtataataaattcatattttcttgccttgtcttgggccagtgatccctttttttgcatcctcaaaaagttatactgatgttaaatatgccctctttactgaaacagattttaaaaatacccagcattaagtggggtcacctgagaagggaaagaatttctatgaaactctcaggtttttaatttatattgaaattaccaatatttccttatatctgaagtgcatagtactgtattttgcacatagtagacacttaaggatgttattgtgcagtaaaaataacaggaaggaatctgaagacttgtaggtaatcttgacttctttgcttattaatttttgtggtgtttgcaagtaactgaatctctttggacgttgcatcttgcccctttggtttagcagtgggaagaggttgaacccacctccctgtacttaactagagaaaaaaaatccatacaaggagcatctcagagcccagaagaggagctctagatatggaagtggattggatgggaaccaccttggatttggaattgctggtcagggagaggaccatatttaggacatttccagttgaggatcagggcgtatcacaggtcagaagtttcataaatgggaaggtacaaaccttgaaaaacagactagggtcttaatcacaacagaaatggcaacaaaacccccacataattgcaggaaatgaaggttcagggtttcaaatacaggaaaaacacaactggaagatgccagtaacaaagggaaaaaaactttgcaaatgaggtggcttctctaacttaaacttaggatttttctcattgctcacctcttcccatttctctctacctaggtttagctaagaaaattctttcactttttttgttttcttttccacctggccttctccccgatcaccagttcttttcattgtttcattttcagtcaagatttatgaaaacatgaaccatactagagatacacctgatttttttctaggatatttgtctgaatttatagtaaaagataaaacagcaaaataacagtttcaaagaccttgctcttctccataatatactcagtattcttattgcactttatcaaaccaccataacaaaccacctcaaaacccagtggcataccaaaatattgtcactcacactcacagatttgctggttggctgggttgacttttttcacatgtgcctcattcttcttaggcaagtgggctaccaagtcatgttcttcttaagcaggttgcagaagttcaactgggctagcccagcgatgcaggtagtttcatgtctgcttgcatgctggctgctaacatgccattggtcaaatcccatcatccatgacaaaaggaaatacatcatgtgtgaggaagtaaaagtggcaaagagtatgaatacagggatgggagaattgggaggctagcataggcagtgtaatcttttctgggatttatattcgtgtttgtattttactttgtggttattaatttgtgtatatactattttgtattctgctttagcgtaatgtgattttgtaaggaaaacttctgtatagattatatatttttcacttaaatagttgtatgtgtaactgagactctgcttctaagttgatctgcatcaaaatcatttgaagtgcttattaaaatgccgatccctagaccttaacccagaccctctggaatcaatctctggggatgaggcctggacatcttcattattagcaaactcatggagtcatccttctgtacattaaagtttgagaactactttcttaatggaaggacatgcatttgtattagtctgttctcacgctgctataaggacatacctgagactgagtgatatggttagcctttgtgtccccaaccaaatctcatcttgaattgtagttcccataatccccatgtgtcatgggagggaccaggtggaaataattgaatcatgggggcagtttcccccatcctgttctcatgatagtgaataagtgtcacaagatctgatgattttataaagagcagttcccctgaagatgctctcttgcctgccaccatgtaagatgtgcctttgcccctccttcaccttcagccgtgattgtgaggccttcccagccatgtggaaccatgattctgttaaatctctttcctttataaattacccagtgtattagtctgttctcatgctgctaataaagacatacctgggactgggtaatttataaagaaaaagatatttaatagactcacagttccacattgtcagaggcctgacaatcatggcagaagggaaaggagaagcaacggtgcatcttacatggtggcaggcaagagagcatgtgcaggggaactttccttcacaaaaccatcagatctcataacccttaactcactatcacaagaacagcatgggaaaaacccgcccccatgattcaattaccttctaccaggtccctcccatgacacatgaggattatgggagctacaactcaatgtgaaatttgggtggggacacagccatttttaaatttttataattaatggccatcaacatttgtacaaatgactgatttccttgggtactaagtaatttttctctgagccatgattgaataattttcagttgaggaaaataatactttatatatgaaatcagatttggagtgctggtagcagtgacattacagacttataaaaattataaaggattttatattaactaaatgaagacattgaattgaataaagataatttctgtaaaacttttatgcctttaattcgtaatgttgggtattgcatggcttattcatgattccattgctatttattagtaattttctaaatgaaagtagtataaaccaaaaagtatcttaagacaagtctcaatcaatttagaaagtttattttgccagggttaagtacgtgcctgtgacacagcctcaggatgtcctgacaacatgtgtctaaggtggttggggtacagcttgcttttatacattttaaggatacataatatatcagtcaattcatgtaagattcacattggttcaatctggaagggagggacaactcaaggtctggtcacagggtggcttccaggtcatcggtagatttgaatatattctgattggcaattggttgagttattatcaatagaaaggaatgtctgggttaagataaggagttgtggagacctaggttttatcatgcaaatgaagcctccaagttgcaggctttagagagagtagactgataatgtttcttaccagacttaaggtctgtgtttatgttaatgctggagaggtatactgaggcatgtctaccccccacttccagtcatggcctgaaccagtctttcaggttaaattttagagtgccttgaagcttcagattttgtttttggtttacggtataaaaactgataggtttaaagataattttatttttctcaattcggctctgtaaatttggcagtttattcatccattttgatacttcctggcattttatatgactttgtttgtgtactttattatgtattttatttttaggtagcttggttatctcagctctgtaaaaccatttttatggaagtgaaattctttggtggcatggcagacactgccaatgcctatccaatgaacattcttttctttttgatagcagaaccctgatttcattttcacagcagcctttgcccacccaaaaaattcatttcccaatctcctttgcagctatgagtggccatgcaactgtgttgtgctttgtgaggcttttgtaagtggaagtttgtaggtggggcttgttaaagaagtctcattcatttgggagacaccttttgtcctttgcccttctctttatcctacctagaacttggacaggatgatggaggaggagaccatgcagtgacaaacattctgatgcatgttccactttaaagacttgatgttgggtgtccctactaggtctggactgcccattgtgtcttctaagttagaaaagaaagacactccagagtattgaagctgctgtttagttgggaatctgttacatgtagctgaatatagtttctatctaatacatatgatttctgtaaaagatacttgggctgcaatatctcttaaacctttcatgtaatttgtttaggactttttagacttctgaaaatacatattttatacataaattgtcaagcatgttttgaaatgcacattttacaatttgatgtcaacaaagctgaatgcagaacattttaaaactttttattttgaaatttcaaatttaaagttgcaagacttagtacacagaacttccataactttttttctccccaaaccatttgatagtaagttgcaggcatcatgcccctttagcacttaaattcttcaggatatatttcctaataaaaaagatactctcttactatactggagttatcaaattcaagaatttaatattaatgaaatgtcattactaagctgtgcatatttatatttctccggttgtctcaatatcctgcataacatttggtatgggatgcagtcagttccccctttggctcacatgcttctttagtctcctttagggtggagacttcacctgcttttcatggcatagacatttttgaagatgatagaataattatttttcacagtgtccttcagtttgggtttgtgtgatgcttcctcaagattagatttcggttgtgcattttcggcagggctatctcacagattatagagtgtcaggaggcacgcactgccattttatcctattattggtaatactaactttgatctcttggttaaggcagtgactgtcagggtttacactgttgttacagtaggtagctagtcagacatgagcagggcagaagggggcctcccccccaggaatgtcaggcaaccattaggcggtggtcaggctgttattaaccatctctctgaaataataattggtcgcagccggtgccagggaaaggcagtctcccaatagatagaaacacctgaaactggtgattagcaacttcctgataagattccaggatttgagtgaatgggctcaagcatatatgcactaagaggcaaaacggtggagtttaactgacatatgacctttgtttaggaacacccaactggtaagggaaaaacgccttaagtgagcacatgcacaatttcagtaaacacactgtgcgtgcagcccctccccagtgctggcaggccactgcacctgtggacagccatcctgtaggaagaatcaggggagaagaaatgcaaaccctggaagcatgccagtgtataaaaccccaagtcaaaggtcagctgttcacttgatctttcaagttgcccgcttggcccccttccaagtgtactttacttcctttcattcctgctctaaagctttttaataaactttcactcctgctctaaaaacttgccttgatgtctctctctgccctatgcgccttggtcaaattccttctgaggaagcaggaagtgagcttgctgtagacctgtacgggttcgccactgttaacacaataaagttattctttctccctttataatttgtggaagagaatttaaaatgatgtaaatattctgttcctgatcaaactttcattcagtagttttatcatccattgaagattcctgactgaattattgctgagataaatgtgaaacatctttttaaaaaagatttcaatagatcctattctattgactaggtttgcttttcctatcatatccattgtgattttttatttcatggtactgttctatagtgttgggaacttcaagaaatacagagatgtaaggaggaagttggtttttatttaagggccatcaggggagagtttgatagtgaaatcctatctctctacctcttttcccttccagtacaatgcagtcaattttataggccaatagcatataaagaactgaagcaaatgggggcaaatgatctattcaatttagaatcttttatgacagattggacagtgaaatgatcttctttttaaagtagatctgaagatctccgtggtataattacccaccgagttatgtcttgccgaaagcatgtcttttccaaaggtgtttctctccttgtgcttaccatcatggataaggccccttttcttgttaggtggcataaatgaggggatgaagaaaaggacagaaactgctaattcagtaagacttattggggagtaatgtagagaagttaccttttcgaaacgtgagaatgaaataagggttctccacagcatgattcattctttctaaaagaatgaagttgtttggcctttctcaagttctttttccttttttactctagtttactttattctgttttttgtttgttttggaaaaccaaaggtgatttgttttcttttcctagtatattttcagagttgagaatataatgattttgggtttttcctccctctagcaccagcagacgtttttgaatcaactgagagaaattacggggattaatgacacccagatactacagcaagccttgaaggtatggcctctgttttatgatatacagtttgtggtatatgctcatctctagtgcgtattatatttgatagttgattttttttttggggtataccatgtggtagttttagagatacaggaatggactttgtaaagtaaaatcctcagttaacacactgcggttttgaggatgttagctttcagcagtctgatgtccatgataccttagagtgacagataacctctttctatatatgaaatgctttttgtgcaagatagtgggatgtgaatcctaattctaatggatggttttacttacgagctgtgattttagagtttaaatgagggttcaaggtggggtgtattagaggatgaggtgtaagagaagggaaaagtagaaaattaatagaagtctgaaaacttacatttttcttctcctgagaagcagagatataaatttgcacccattcagctaattacaccctaagttaaacattcgatttcaaactcttcagtataggcaacaactaaaatgtatcattttggtcatatcttagttggaccttcagtttcacatcgacatccaaatgagtcatatcatatggatactcacattgaaaaagagtgaatgaaagctatttaagaaccagaactgtacagtattttaagcttatttgcatattactactataggctaaaaacaatatagcatttttgccactgcagtcatatacacagctccaatcctttggaacttgatttcaagcctagagttctttatttgtttttagaaataatctattagatgattataataaaagtcattataacaataagtagtaccgattaaacatttagtactaccaggcagtattttaagtactgtatgtgggctagctcatcctaataataaataactctatgagataagtattagtttcatcccctttatgaaaagatgagcaacagagaggttaaagtaacttgcccaggatcacacagcctgtatgtggagaagcttggaatagaaaccaaggcagcctgatcccaggtgccacacttaatttatgcttcttttactagaagctttgcttcaccttattcccccatcaggaaaatcatgaaatagtagtgtttagagcattaatgcggggtgtatgaagccactgtaagtatttggagaggaagcagaagtgctatacctcaatttttatgattatgacgtttagataattgctagtccctttttattctgataaatatcattactaaattccatgtttgttttcagaaactgcctttttcattatgtattactgagtgtgagaccatagcctatcaccttgccagggtaaatttggggaatttgcttttttttttttttttaaacttagaaaatatgtagctcgaatgaagtcttatccacatttcctttgatagaggttgtgtgagcataggtatttttaattttccaaaatttttgtttcagttaccagtagctaggggaaaagagtgtatttaaaccttaattgttgcccattataaatactgacgagaagtctacttttgagcactgtaatgtcattgattaatttcagtacttttaatttgagaacatatttttagctctaaaaagtaaatgaacttcaatttgtgtaaattcctgctgtgttgttttaaattattatatgaggtaatatatgaaaaacacttagcacatttcttggcatatagtaagtgctcaataaatgttagccatcattattgcgctttattttattgttagattacttatttaacaatagtgtatcttacattttggatgagtcacttaggaatcgtctaatgatcatgacagatagcatttttgaaagtggtggtgcctttgaaactgcatccttactccttttgtcactgactgctacaactggaattggggtaggtcttggggactttattctgccagctgctcagtccttaaattttggaatcatcctgatcctacttctgtcatgtcccacatttaataagatagcaataatattggatgctgtcttctgccctttctctcctctagtctattcttaatacatggagtaaactttttaaaatgtaagtcatactatgtcattcctttccaaaacactccactggcttcttattacacccgtgtgcatgtctaagttcttagggaacctacagagccttccatgttttggttttctgttacaaagatagcttcgttgtgaatatctgggtttcctatgttgttttggttaactgttttagagctaacgttttacttgctgtcagttgtgcagagaatataaagatgtaactgggcaagtctcttctcattttgctgttttaaattaaaattcttattctggcatctgctttcttctaaataaactttagaataattttattcagctatacttttgatgagaactatgcaaaatgtatctatttaatttgagcaggattgtcatcttgacagtattgagtatttctgtctagagttctatgtgtctttccataattccatattatcaagcccttcagtacattttgccattttcttcccatgagtccttgacattttgcttaagtttgcccctaagtatgtatccagcacccagattaaaaggaatatcttttattgtccttgtttgtagaagtactaattttaatacccattttgcactctttcgtatggcaagttccagaagaccttttttagtttatttgttcaaaagtataagtttgtgattcacttttattaagcagataggaaagtaatgaagactaagaaattagagatggatttttacattgtatcagtagttttaattagtaagaaaggtattactattgatatagtatactttatgtatgatgcatttacactataaaattagaatcacatatagattaattgcaaatttaaagcaattttgttctagagagttatggagaatattgtataactttttttgatggataaaattatttcaaaacacttgatactcctttcttgatatttgaaggatagtaatggaaacttggaattagcagtggctttccttactgcgaagaatgctaagacccctcagcaggaggagacaacttactaccaaacagcacttcctggcaatgatagatacatcagtgtgggaagccaagcagatacaagtaagttttctttcttttcttattattttaatagaaacatactgaaaaacttttcttggtgtaatatattaatgttgcttaaggagaggtaaagaaccaaaaaagaactctattaaccttggttctttttaatgtagttgaaaggaacatacattatctttttcagattataaggaaaagattttatgtaagttatatagtttttcatagagcatttcatatagaatttattgttttgaaatatggaatagctgcagatatattcataaaaggaagaactagaatttttagtgggcacagttattttgcagattttaagtgctggtagaggctttagtatttcttttgaggttaaagtattatttctaattactgataggtttaccatttaataaaatttcccttccctttccccctgcttccaaataaagctttggcaaagaagtttattattgtgtaatgaaattgcctttcatccaaaagaaaaaaagaaaagaaaacttggaaaaagtgttttggagatacaaatacgtacatgtggaagattctatgtgggacttaagtttttcttcataatatgaatactttatacttatgtagcgcacagtttttcaaactatgttcagttaccttcatatctcattatagtttaataattgtactacataaaaatagttacttttatgccttatggatttgcaaagtttgattattaacatatatttggagagaatttcttattttgtttatagacattctcaaagttaggaagcaaccagaaaagagttcgtttacatagatgtttattaatgtttattgataaaatattttaatttttagttttcaggataatcttagcatttttgctacatagatgatcttgtgtcagagaaaactagaatactcctgtctcacttagttaataggtgatgggagaatgtttgtagcatatataagatagacctgtttacttaacgtctaagttcaaggcaagctgtgactgggcccccatccacatttctagcctcattttccactgttttcctcctgtcattcaacactgtgataatacagaatggcttgaagttctcatgtactcagtggtatttaatttctctgtctttacatttgctgttccttctgtttgaatgcactctggccttttcctccctagcctaatttgttctggtcttgaaagatttagctaaagagctgcttgctggagaatgtttttcctggcctctagctaggaccaagtgtttctccagcatccagggcatgcttctgtcttaatgaatactctgttattttgaaattatttgcttgaacattattggtgctcaaaaaatgttcactgagttatgtttgataatatgtgcagtaaagctctttcaaaaccaatgaaagggaatgaagttgagaagcttgttgcaaaaagttgaaagagaagtggtataaaggtcagaaaaatgagtacttaataatattttggatatttcaaagttccaagactcgaggggaaaaagaaactagatgggtgataaaagggaaaaggataattttgactaaaatgctcctggtttaagtgaagcaagcaggaaattgactaaacagagatcattgttgttagttgtgaactcttaatatagatggtatacttggtgacatgacatggtatatttatagaaaaggggaaaattaggattatgtgtgtcctgcacaaaagaagatatttgctgtgcaaagtgagaaaatactgcataaggcaaatggttacacctgtttacgattttagatagggaatagtgaaaatattatggaggacaaaaaaaaattttgaataggttcccttagggagaaggcagcctaatttcaggaggcacgtgtctcatttgctgataattaaaactttttttgtgtgtttgtggatctcttgaaaaatattcacgaggtaattttattttccacttgaaataatgtagagaaatgaagtttctgatgtcatctcaaccgattgtcatattgagtaaattgcttgctgttgtggtttctttatccataaaacacataatacgtaatatgtatcaagtgctttccctctaatcagggtgccaattgagatagtgtgtccataaagttggttagaggttattgacagcaaacagttgtaggaatttaatgtggcaattgtactatgatagtatcaaaccagaaaaaaattaactgttggcgtaacagtaatacttttccattaaacattcctgccagtagtgtcataatgcagtgttactggtttaaaactgagaaagtggggagatgtcatgcatttcagcaggtattaaaaaaatactctttaagtgactgtgcagttactgttgagaagaaatgaagtcgtgtatttttaattcttggaagatgtggtaaaacatgagggaaggaaagacaaaataattacaaatggatatacattcaaatgcaggcctctatttaaaaaaatctacctaactgctgtaggaatgtagaagaatagatcagagtgtgagttttcaagggattgttgtagatataaaaaccctttttgagcactttctccattttgtgtgaaatacattgttatttaaaggttgaccacagtttcacttaattctttcaaatatggcagggatttttattttcagtttttttccattcttctttttgaggtataaaatctcttaaaaccagggctaaagcagaaacaaagtcatgctaactttaagtgatacacttggttgcagtgctgacaaaacgtctgtcttctgaaatcgaaatctctaataccaaatacatatacctctttgttgatattagctggaatatcactgtttacaatggactgtttcttttagaaggaataaattttttttttgctgactagaaaaatttagtttttaaactaatatcacatggaagttatatttggggcatatggagaaatttttgtttatgcatacctggtgtgtcagaggctaaactatattatgtcactggatttgaaaaacaatttgtgagccttcctttaatattgaagaagtaaatatattttcaatagttagtaggacaattatatgcctttttggtgtactttttacctttcacttttgagagaaaaaggagacatatcaaagaaatcttgtgctctgcataaaaaagaatttagaagtcgtacacctcatgtctttacttgattacattccatactgtaattctgttgaattctggaaaaaagcccaaatcatttgtactataattagcaaacgtactaggtaacattttttattatttggacctctgttcagatcagatcaaatattatagattgtcaaatgagtgcctgttgtccctggcttaaattgagaataaaattgttttggagttttgctgtcaaaaacacaaatgaaaatgagaccaggacacgatacccggtattgagcattataggtgtgattaatagtcagaggagagattctgccaagtttttgtgtcacggcaaactctgtcatagacatgaccatacagctcttttgcccaatttgaagtctaatagtaatactttttattttgtgaccattaaattctttcgaacatttttaaaacaggaaaaaaacagtatatgctctccagaacaagatgtgctacaattgagcgatcaaaagataagagggatttgggtaggtaattttaacacagaaagtaatgccacatattgactcaagttttagagaaattggtataagacttgaaatgagtgacaggtggtaagactcttcaaaaatttataagccgttttttttttctttttttctaaaacaccttgaatttgaaaagatggcatagaaagggagaaaaaccttgaggttctatcctagaattctagttatggctatcttgcttggccacagtaatagtgatttaaactgtgataaatagatccaattctagtgcttttattcttaggataattctcttatgctaaacagtttaggatattgttaattgaacactgatacttttcccattgcccaagtaacttcagtttttccctagaaatttctaatatgtaaaacgatttttgatgactcacagaaagtcaagatgaagcctaaaaactgagatgctaaatggtgtgaaaattagttccaactgatgggtgcaattaggagcttcagattgattagatgcattttattagatatgaactgtagaatgacttgtataacttgatgaattttctttagttttgggttagaatgatagccatggtctttgtacttttgttgactaacatgggagattaattttactttttttcacaataaaaattgaaaaacatagtagaattaatgacaaaactctggaatgactcccttactacttactcattttccttgcttaccactgctgccactgtgattttagcagctattattaaaaacagaactagaccatttaaagctgagctgttcaatatagttgccactagtcacacatggcaattaaaatgaaataatattgaaattcagtttctcagttgcactttaaatgtttaattctggtggctaccagatcagtgcacataatgctacatttccattatcacagaaagttctaatttacaacactcttttaagagaatctgagtttaacagtgagaatattgaaagaataggaacatctgaaggaagctgaaagcaagggaaaatgggagagtggagtgggaaacaatttatattgtttatgtcttctggcttttaagattcttgcaacatgataccttactatgctgtctgccctttcacttgaaaaaattttgaatatataaaagatatgttctcatcttctaattagtgccattatgaagatgactcaccagtttttatctctattctgtatttctttaacaaatatttattgtctaatatgtagcaagtacttttatagaccattaagaaagcatgcagagcctcagtttacatagaggaaagacagtacacagtaaacaaacagtatcagatagtaataagtcgttcatgaagaacagtagacctggatatagacaaagaagtgatgggggtgtgcttgtgggctgggcataggataatatgtgattttaggtagtgtggaagagctcatatttgaggaacagtagacctggacatagacaaacaagtgatgggggtgtgcttgtgggctgggcataggataatatgtgattttaggtagtgtggaagagctcgtatttgtacagatacctgagcgaagtgtgagcatgaacttttggctctctgaaggttgtgcgtcccagaccagggcctgatggggcagtgtgctggccctcgagatgaatagtgaggacacagccttgttgaagctgaatgagcgagggtaggaatggcagtattctcgtttctgatctcttgctgcacatcctgatgttcatatttgcctttctttcttaagggtatttccattcttctggtggtccagggtattttttttttctttttttttccttttaatagctcttctgtcaatctcccaaaacaaccatttggtttgcagatctgtcagtttttgtatgtagacttttcccttcagttactcctgccctgctacatattcttattgcaacgcttctcaaactcttcactacccagtttttttctgtcttgcactcccttgcttagaaatctttgctgacagtaaatataaacttggcttattttttttaaaaaaagtatttcctcttggtttagcctgtgtagataaggaaaaacaatggaagaactctttttttcttctgaattcaaaatatttacatatataatagttcagctagattatgggccaactaggcttttgtgaacttacttagaaacctgaggttcaagtaagattcacttacataattcacgttcctatttaatataatattttcatgggaaagtgaattatgagttataaacaatgcatatattttgtttgaagtctagttcattgataagttgatgactagcatatattttggagttagcagagaaatgtttggtagttggtgtataagttttactcatggtattcctttgtaagtgaaagatttagtaggatgagtatcacgttttgatatatatttctcactttacaggaaaaatgttttaatttggactctcataaaaatgtagattactgcttagatgcatttgtaacatgattttatacagtggcacccagctaactgttcccatgtgtgtgctgttgaattgtattcacgctaatactagagggagagttggttaaaaataatgtttttagtgttttaccaaggtcttgccttgacacagatatgagaatattaataatgctctggcattgagatggaagttttacaaaggctaattttctgtaactgacttttaccagttagaagttgtttatagccaaagttattctgtttcttttgtaagcatgtgagaatatctgagcgctagtttttattataaattgataattcgttacatgttttacacaaatcattattccactaagtccagaaaaagaataaattgggtttaaccagtctgttgaaataacattttattttcttttactggtcttaaaatcatgtgaatttggtatgtgaggtatctttcaggattgcatttgatatgtgaggcatctttcaggattgtatgtgtggaccgtatgtgagggatctttcaggattcagctatctttcaggattgtcatattgttctaaaataccctgtgaaaagaagcagttttatggattaataggaagatcatggaagaaaattgttacaattacaatgaaattaaaataataagtaaacctcctccattgcttaaaggaaaaagtcccagcttttcagttaaggattgttagtctctggtctcaaccaacttttccagcattaaggactactattcctctataccagggattggaggctcaaattcccagctggggtacaggtgtgcctatatgctgaaccctccgctattggagatgcctggagtggctggagccatttaatatggtcgttctagccacaagcagctttatccttttacacccatgtgaggtacaagatatgcgaggatgcaagggcaaggaaggtaatgtgaatgtgtgtggctggccaagttgggggcgggggcaaaatgaagagtgaatattctatctaaagagagctgctactactacttttattacactctggctttgtcacaatgattattgccatgcaggaatcgtgtaaccaggtcttctggtttttttttttcctcccagagcgtgagggaagtaatacctattattgtacacatacaatctcctaatctttatcttttgccagttatttcaaaaaattttgaatgacattgtaaaaaccaaagaaaaccattttcaattatgatttgtttcataaaaaacatgtctaagaacatggagtagatggtgattcttgttatttttgctctcaggacccctttacactcataaaaattattgagaacctcagagcttttgggtacataaaatttactattttagaaattaaaacggagaaaagcttaggctattagttcatattaaaatgtcagtctattatgtttgaataacatattttatgaaaaacacatttgctgaaacaaaatggttagaagattacgttgctttacattgttgcaagtcttgaatgtctgccatattagaggagaactagagtctccaatgtgcttctgaaggtttgcattctattgcaataagttgttttggttgaagtttgtgaagaaaatctggctttacccagataataatttagaaaagggaggagtattttaactgataatcagataataatggatattctttttaatgctatacccaaacttaacagatggtaatttcttaaagattagttgcaatgtggaattcgaaatcacatcagttattctatggtggtatcaacaaccttttcatgttatgttgcattaaaatccattagtgtttcttgctttttggatggatcttttacccatgcatgagtttgtaacactgtgcattggtaatttgaaaagatttctttttaaatgcttgaagaatgtctactataagaaaaagttgaatttgttaatatcaccactcatatacaagcctttaagtattgagaagatatcaagctcacagtggtagaaacaagtttttcaaagtttagatttttgcttgaaaattccatattaatcattgtcaacagatacatttgttttccttaaagcaacaggctcacttttttttttccagacaacatctgccaaatactgaagtctgaataattctagtttgtagtttgttagtttttcttttaaataaaaattgcattccatgggaaaaatcagtttagcttgtaactcattttacactagttgttagcaacagcatactctggatatatcgcagaagtactttatgtgtacttcttatgttagaattaaacataaatcaaggtttgaggtttaataaaattaggtttaatcttttcgccaagaacataattctaaaagaaactggcttggcttctgtttaaaacagtgagtgtgtatatttgtgactaatacaatgaattatgcaacttggtgctgctgccttgatttgtgctaagatgcagcagttttattcaatatcgttttgcatcattggtgcaaatgtggctacagtacaaaaggcaaataatatctgagtagtattatttttttatttaaggactttcctcccttttttcaaaggggccctggggaccccaaggatcaatggaccatatttgaagaactgctagtaaggcagaaagaccactggatttaagagttagaagacttaaattttgaagcctgtgcaccattctcgcgtcttatgatgtgcttcatttctcagaatttcagtgatttcatttataaaatatatttggggaaaaaacatcttgttttttgcttttttgttgcttgaattacaattgatgaattaggaaaagctgtaagtgtaagttgttgctatttttaaattagtttcggctatagcccatttgttttacttgtcagtcatgatacagtaaacattctagaaattttcaaataaggaatttaatacaggggattaggttctttaaaaaatcactggaaggactggaggaaagctctagctcagacttctgaaatgactcccacatcattgcaggactgaccagtcagggaagcgaccagtcagggaagcggctacttctgtcacaattaggaaagcggcctcttggactactgagttcaagaacatacttctatagctgcagcccaggaaacaggaagccaggattaggtactgcctctgagctatgcctggaaattggaatgcaaagtctagttgccgcttatattccatctcttgacattcttaaagctggaaattggagcctggaatactgtggaacaacttaaatcttttcaatcaagctagagaaaacagccaaaggcaacaggataatggttgccacccccccccccccccgcccccgctgcactctgccttccatgtctcgtgttagtgcattctaatggatgaggcctaagtttcatccaaaaccctaactgccagtgaataaggaagatagtttttctgtttttttttatgtttagtttctataattgaagaaagtaaacttaagagaacgagttaatggaatctgaccgctaattaatcacacacctaaaccctgtttttctgcttctctgtgattttcaaattttttccacttttcattatcctttctctacttagacctaagttctagccattttaataaccaagatagctttcatttttatgaggcattccatacctttttaatcctcactgcttcatcagtgtttatgaatgttcagttctgggttacactcatcttcagctgtggtctgggtggacttggattttgtaaccagacttgtaaaacctttggcctgctgttgcctgtaaagtgattcaccatttcaattactatgctatataaatctttcacattttacttgcctgtatttttggggggccctacttaatacacttttgtgaggttttattatactctctaaagacattaaaaaaaacaccaccacttccttccatgatcaggtattctttctcatattttaaatcttcttacaagctactatttggagaacgtgtggataaaaatagaagtagactctggaaaatatcaatatacattactttttttcattaaatatataatatgcttttctagtatttatgtaaaaccttatagccatatggtaaaataaagccaccttatcctccccatcctctatcctgtttgttttttttttcctcttctaaaattgtatgattacaaagaaaatatttttaacatgtctaaaatacaccaacctgggcaagacgcaaaaccttgtatctacaaaaaattaaaaagaaaattagccaagtggtgcatgcctgtagtcctagctactctggaggttggggcgggaggatcactggagctcaggagtttgagattgcagtgagctgtgatcatgccactgccctctagcctgggtgacacagtgagacactgtctctaaaaaataaaatttaaaataagcaaataactaaaatgaaggcaaaacgtgtccaaaatacaaataagcataatcccaaccatgcaaagataataacagatagtttctctttctgatcatattattttgtaacctgttaccacttccctacttagcaatataccatggtttctatcactgttgaaatgataatgggagtatttatcattggcatcatctgggttagggaaattgaccaatatatattgggaaattggattaaaagtcatttttattgaaggcggtattagttgtaaccttttttggaaaaagaattaatacttaatagcatcaaggctattttttattagaagagggcttgtttcattcacttgtatatttcatttttgtgaaatgagaatcttgttttaaattaaaaggactgcatatttattaagcaattcagattgtatagaagtatttaaatagaaagtgaaagattcttatacttcttcctcctataactcctttcctcagagttaaccactgttaatagtttggcacattctttcagaatttaaaaaatgtatgtgtaaatgtacatctctggttagtttctgaaacatcagtttttaagagttcactgttaattattgtaatttgataatgtctagatggtagtagtatggacagaatttaatacgtatgtaatcgggttaacttcagaaagcagaaatgtcaatgtttaattgtattgatttcaatttttgttgataaaccattctcagcagtctttctgcttattagcttttaataagagacctcatagtaaatacagagattcttctacagtgaaatatatttctgcttactgctttaggtatattttatcaaaaaaatcattgagttactgagtatgaccagttaaaaatatgtttgcatttatttttagataggcttttagaaatacaaaattagttggtactgactggtttaaagagtatattggatataaaatctccataataaaaatcctttcattttgttttacttttaattttgagaaagatagttttgcttttcagatgtgattgatctcactggagatgataaagatgatcttcagagagcaattgccttgagtttggccgaatcaaacagggcattcagggagactggaataactgatgaggaacaagccattagcaggtaaaaacataatttgtataaagcagatataagtacttttaaaaatagaaatcattaattgggttaaattaattttaagaggtaataagatatactttgttactctaaactagtaatatgcttgtgtatttttaaattttatgtaaccaaaatcttcatatttagttttgattgcaattgggtttagatttttaagattttgggatggtgttatgagggattacatttaggtgcatattttaatatttctttcattttttttcttcccctaatcttttttggatgcactgtccaatttgcaacaatttatagcaagggtcagcatcctttttctgtaaagggctaatagtaaatatttttggctttgttggctatagggtttctgttatagctattcagctctggtgtcataacgcaaaagcagctatagctgataaataatataatgagcttggctgtatcctaataaatcttgatttacaaaggcagccagttggttttgtcctctcggctgtggtttgctgacttctgatctatagcatgataatatgtttatatatattgttcaaataaatgggcagggctccaagatgtgtgctagaatgcagtttttcatttaataaccaaaactttgtagtttgaaacagtttgattcatctaaggactaaaaaatacatttggttttcataatacctctaaaaatggagatataataatttaataagccataaagttgtaactaactgtaatcctctaaacaactatttgaaggcagtggtaactctatgttactgaagaagaaatttacttgcaagaggttaaatgtgctttttccaaaggcacacagctcagatgcatcttaagacttaaatgttcttttcctttaacatagtcctttggtaacagaatgtaccaaatttctcaggtaatttttcttggcacaatatcaataggagatttctttccaaataatcagagattactatatggtaggaaatgtttcaaaatgctatgtttagcaaaggcatataattttttatcttagtgcgactttttaatgtctttaaatgttactttggaaactactttgtaagacattatattatgtaaagacttaattaaactctattgtccccctcattagttgtggctaatatttattgccaggaactttaaatgaaaaccaaaaaatacgtagttaggcttattttctgaagcatttgagaaattatatgaattgggctttttctttttaaaacgtgtattgcaatgcataattgtcttgaataattatgaaacaacaatacttaaactttgagaaatattttaaatacaaaacacatgagttggatttcatatgtaaggggcatggttttatgtgaaaagggttataaaaagaatgtatacttgatacaaatattatttttaaaattatatttttgtttatatgaatttatatgagtatatgaatataaaatatatgtgagcttatatacccaattagtatcagtcgttctattatgtgttttctaattaaaacaacaggtactaattatataataaaagtaaggtaatataaaaagggatgaaggctgttcctaatttgatattcagttcaatgtatatgttatattattgttttggatagttgtttttatccaaaatggcaaaagaaaatctcttcagataatgctgttttttcattctaggtcttttacattttaatataatttaaaaatagtaaatatttggtagatattattattgtagatgacatagagattcggcataatgtaacatgccataaagctatgctccctagaagtaaaagagtcatattaattatgtgtaaattcaataacccgcaatgagcaaatgggtgttcaatgcaaaatatgcatttaataaacttatatgtaaatcatattgtattaggaaaagaggatgtggagagttctagctaaacattatcagagatatatttgctcatatgggtttattaaggtatagaactctaaattcaaaagagaaaatgatgcattttaaaggaagacatttatatattatgcttaaaagtaaattaactccttcttcattactgaagttgatatagggaaaatctttgcaaataaaattccagaatcatttgcttattatattttagtagacataatttaatgtgaagttacacattaggatactacattgtgtgtaatttgatgagataaagcctgtctttttacgtcttagaatcctgtgtttaggcatttatacgtttcatgctaaaattttttaagtagaacgtttttaaagtatttctttatacactttttagtgtcagaattgggtgtatttattatctcttgattatcactgccaggacacaagtggagtatggacagttgaaatttgttaataaactacattgtgactggtttgtgtctatggcatatttcttgtgaaaatggcttgcctcatgaaataactttgaagtgcctcattagaagatagtgctaagttttctagctaaaattgttacaaagagcacgcaccttcaacaatttcaagaagtagtagactacagattctttttttcctcattacttctgtgtttcaactagttatttcttgttatcttcagcctggagttgccattggggaaagaaagaaggatcatgtccaggaatagtcagggtggaattctgaattattaaaataggtctgtataactcctacattttttatccttatcattactgaggaagcagctgtgaaggggaactgtctaaagatggtgtgtgaaacaggagtggatgagggaggcagagttagaaatcttttaaaattgatctttgaggaggatttcggtgctcaataattccagatacttgtggatgctaaggagcatggaagggccatcgaataaccatcaaaccatttaaggtgtgttatgtcagattatagatgatctggaaaagtaagaaatatgacacagattagtttcctgggctacaaggttgtggctgcaggtgactgatgaacagcagcagtgtaacttgaaaaagtatcagcaacagtgaggtaccactgatatccccaggaagagggatcaactggtcgatgtagtcaggctgtccgtgtggcaggagccacaccccatgcaatgtgggctctcctacggccagatacacaggtcaacttttggtaggaatcacatgtctgacaagtagtggtagcttctgtgttagaaacgtagagttccttaatttgtactctgtatacgattgtggatgtgattccattttgggtattgtgattgtggcagtggtggtgatctgggttgtgcaagtttgatcaaaagctttattctgttcatctcattgaagaacacattagagcactcatccatcacaatggctaaaattaaaaagactgatgggaagtgatgtcagcaagatcgccaactagagttgcttggctatcatttccctcacaaaaaaggaaccaaaacaacgaataagtttattttgtctggagtgactgaggaaatgccctggagagtaccaagagaacagcaaagtccctgtggagcatagagtcaagaatagctccacagggaggagaccaaagtatcctgcctctgccatactgtctcccctgcgaggattgaatcaaagccagggggttcctcttcttataggaagaaggtaagcggagaatcatcagtcctcatcaccaccacaggtgccagcagtcactgctacaagagagttccccagtcctcacaggtcccaagtccagcatgaacagttgctgaaagtgcatgtggctacattcccccacagcaggaacctctttgacaccctgcacccctgcaatccaagcagctaagggatgacacaactgtgaaaccaagcccacatctggagtgcttcctgacctggaggccagtagccaccctgtatcccagaggcattgccctcattccacaaagttcacacaagtgcctctagcactaataccttggctacttggagcctaggctcaaaggcacaactggggccctgatacctaaacccacaaggctccctattacccagggaagcaggtgggcctgcatggccgggcagccccatgcggccaccaggctagtgtacatctgtccctggctctagctggcctggaggtggccccaccccaagggagagagtagtatacagccagtgggcctgtgtgaacttgctcccagcttgaatagctggcccagaggttgtctgcctgtaccactggaggattgtgcacagctgccgggccacaatttcctgcctttagtccaatagctggtttggaggcactctttccgcagctcaaccctacatcaccagagtcatgcacagcctccagacctgtgtgcatccacccctggcctgatagccagcccagcagtaaccctgctgccattcaggagagacagtcgtacaacctttctggcctgctgcatcagcatgtgcctgaccagcaaccagcttggtgccaactccagaaaaaccatgccaccacagtcatgggcttctgcatactaagtcactgagataatcacggacatcgcaggtgaggattccagctgaataatctgtttggacaccacaatactgagtccaccctgaaccaaagccaccacacgccatttccaatcagcaccctaggacccatcaacaggaaaaaacctcttcctatgaaagctgctcgttaaaattggaaaaagcaattgtccattacatgcacaggtaccaacatagagacagaagaatcatgaaaaagcaaggaaacgtgtcacccccaaacctggcaccacaatgcatctttagtaatggaatccaaagaaaagaatatttatgaaatgcatgaaaaataattcaaaataatgacattaaagaaacttttgagttgtaagagaatacaacaatttaacgaaattaataaattcattagctgagtgagaaattgaacaaagatagatattatggaaaggaacaaaacaggaatcttggagcttgaggaattaagtgaatgaaattaaaaaaaatacaattgagagccacagtaacagactagaacatgcagaataatacatttctgaacttgaagacagatcgtttgaaataacccattcagaagaagaaaaaaaaaaaagaataacaaagtatgaagaaagcccataggacttatcagacaccattaagcaaacctatattcatattatgggagtgccagagaaagaataagtgaagagaggcatagaccacccatttggttaaatagattgcctgtgtccttctgcacttcttggaaggaagtcttggaagttatggacatctaggaatgaaaagatccccaataaaattcagcccctcaaaatcctctcaaaggtacacaattctaaaagctgtaagacaaaaacattacgtcacatatatgggaattcccattagactgtcagtacatttctcagcagagactgcacaagacaggagagagtgggatgacatattcacagtgctgggaaaaaataaaaataaaatataaaaataaaaactgtcagcagagaatatatccggcagtgctatccttaagaaatgaaaaagaagggccgggcgcagtggctgatgcctgtaatctcagcactttgggaggccaaagcaggcagatcacgaggtcaggagatcgagaccatcttggttaacatggtgaaaccccgtctgtactaaaaaaaaaaaaaaaaaatacaaaaaattagccaggcatggtggtgggtgccggtagtctcagctacttgggaggctgaggcaggagaatggcgtgaacccaggaggcggagcttgcagtgagccgagatcgcgccactgcactccagcctgggcgacagagcgagactccgtctcaaaaaaaataaagaaaagaaaaagaaatagagacgtttccagacaagcaaaggtgatggaattcatcaccactggactggtcctacaaaaacacttagaggaaataataggaaatgaaagaatgattaataccatgaaaatatgtgaaaatacaaaactcatcaatataggtaaatccataatcatattcagaataccccagtgctgtaatggtgctgtgtaattccttccgtcctctaatatgaaggtttaaagttaaaaatgtcagaaatatcaacagctacaattagtggctaaggaacacatgaaagataaagatgtggctgggcgtggtggctcacgcctgtaatgccagcactttcggaggctgaggctggcggatcatctgaggtcaggagtttgagaccagcctgatgaacgtggagaaaccccgtctccactaaaaatacaaaattagctgagcatggtggtgcatgcctgtaatccaagctactcgggtggctgagacaggagaattgcttgaacccgggaggtggaggttgtggtgagccgagatcacgccattggactccagcttgggcaacaagagcgaaactctgtttcaaaaaaaaaaagataaagatgtaaattacagcaatcaaaacactaatcatggtggggtaggggagtgaggggaaaaagtctagattatttttgtgtgaccaaagttaagttgttattagcttaaaatagtctgttgtaactgtaagactcttcatgttagctccatggtaaccacaagaaaaattatagtagatagacaaacaagaaaggaaacaaagcttagcattatagaaaaccaccaaaccacagaagtaaacaagagggaaagaatcaaacgaggaatcttcataatattgagaaaacaaactagcatgagtaaattattacttatcagtagtaaccttgaatgtaagtggattaaattccccaattaaaaaatatagagcagctggatggattgaaaaaaaaaaagacccaactgtatgttgcctacaagagacacacctcatcattaaatataaacatagactgaaagtgaaggaatggacaaagatatcccatgcaaattcaaaccaaaaatgagcagaagcagccatacttgtactagatacaatagactttaagtcaaaaactgtaaaaagagacaaagtcattatgtaataataaaataatcaattcaccaagaagcaaaactgtaaatatataagcaccgaacaccagaacatccaaatatataaagcaaatattattagatttaaagggggaaatagactccagtacaacaatagtagggacttcagcatcccacttttaacagtagacaaatgatttagaaacatgagacttaaactacaccatggacatttacagaacatgaacagccgcagaatacacattcttttcaactgtgcatggaatattctccagtaaagatcgtatgttagagatggtatcaagtattttaccagatcacaactatataaagctagaaatcaacaacaagaaaaacgttagaaaccaacaaatacatggaagttaatatgcaccttaataaccaatgggtcagtgaagaaattaaaagggtaattagaaagttccctgggacaaaggagcgtggaaacacatacaaaaacctgtgggacacagtgaaacctgttctagaagttcatggcaataaatgcctgcatcagaaatgaggaaagatttctaataaacagattaactgtgcaactcagagaaacctgaaaagcaagaacaaattaaacccaaaattggtaggatggaaataataaagcttagagcagaagtaaacaaatagagactaaaagagcaattcaaaagatcagtgaaatttttttgagaagataaacagaatcaacaaacctttagctagactaagaaaaaaggaaaaaaaaaaagactcgaataaataaaaccagacatgaaaaatgaaacattacaaatgtatcacagaattggaggatcacaagagactattatgaacaactgtataccaacaaattctagaatataggaaaaatggataaattcttgaacacacacaacctaccaagattaaattgagaagaaatggaaaaaataagcagaccacaacgagtgggagaattgaataactgctaaagcctgacataaagatccctagtttctgatggctacattgctgaagtgtgtcaaacatttaaggaacaactaatattaattctcaaactattccagaaaattaaagaggagggaatacttccaaactcattttatgaggccagcattaccctgattcaaaaactagacaaggacacaacaaaaagaaacaggccaatatccctgatcaacctagatgcagaaattctcaacaagattctagcacgtccgattcaacggcatattaaaaacatcatccactatgatcgagattcatcccagagatggagggatggttcaacatacacaaatcaataaatgcgatacatcacagtaacaaagagaacggaaaccatataatttcagtagatacagaaaaaagcacattacaaagtttaacatcccttcatgataaaaactctcaaaatagatatagaaagtatgtacctcaacacggtaaagaccatagttgagaaacccacagctagtagtatactgaatgcagaaaaaaatgaaagcttttccactaagatcaagaacctaacaaagatgcccacttccaccaatcctattcaacatagtactggaagtcttagagcagttaggcaggggaaagaaataaaagacatcaaaattggaaaggagaaagtaaaattgtctctgtttccagatgatatgatcttaaatatagaaagccctaaagagttcaccaaaaaactgctacaactcataagtgaattcagtaaaagtgtaggacacaaaattaacacacaaaaatcagcacttctatatgctaacggtgagttatttgaaaaaataagaaaacaatttcatttacaagagctacaaaaaatctagatacctaagaataaacttaaccaaagagataaaagatctctacactgaaagctataaaacattgaggaaagaaatataagacacaaacaaatggaagtagatcgtatgttcatggattagaagaattaatgttaaaatggccatactacctgaagtcatctccagacttactgcagtccatgtaaaaattccagtgacccttcagagaattagaaaagacaatcccaaaaattcatgtggaaccacaagagagcccaaatagccaaagcaagcctgaacaaaaggaacaaaaggtagaggcatcactacttgacttccaaatgtactgctagaatatagtaaccaaaacaatgatattggtgtaaaaaacagacacatagaccagtggaacaaaatagagagcccagaaatggacacacctacagccaactgatttttgacaaaaactgttaactggagtaaatctaagaaatgtacaagaacttccaggaagaaaatgattaaatatcattaagacacattaaagaatacataaatattttgaaacattcgctgtttcatgaattggaagaccattgttaaactggtcggttcttcttaaattgatttatgggtttagtttgatcccaattaaaaataccgttagttttgtttttgcttttttaggaaatcaaatgagatgtttcattacccgccgccccctttttttttctttgtagttgatctatacagcttaaagtgtatgcatgtttctcagtgagtgtaatacttcccaaaaaggggcttaggtgagctatgaagtgggatattttcagtattactgctataggcaatttaacaacacaaaaacaataaaataataacaccccctcaccccccccccaagtaaaaccaccgtgtaataaaatttaatggaaacatgatgatctaccatatgtaaatgctttaaacatttagcgtagtgtgtggaaggaaaagacgcagcaaaacattttgtcgtctttttatattgcttactaccaaggtcatgaccaattttgagaagataaagcaaggtgataggtcagactcgtttttggtatgtggcttgcgagtttacccttcaaacattttgttataggctatctctgaaatttgccttttttttttctcctctaccagctggtaatacctggattttagccactgcatgtcttatacttaagagcttgggtagtatcattggaaaggccaggggaggaacccttatgcaggattttgctttataaaaagtttggatttatggtgccagtactagattatagaaggggatcaggtggagcaatagagcagtattggagctagagattggcttttgcaatcagtcagtcaatcaataaccaagaagtagcagcatttaatatcttcatcatccatttactttaaaaacgtgtttatcactcatttataatgtttgctctagaggtaaagcaaattcttgtttctacttttcagacactgattggagacactggttgatatttttggcacagtgttaagtgtgtttattaagttctttaggaaccaagaggagatggtaggaggagacctactgaggcatgctgtaaaattctggtgataaaatatgtttaaattaagagggtcaggaaatcatggcattcccctttcacctacatgctttttttttgcaccacaattctaccatgtggtatggttaaggtgtattgtgataaacccatttctttaaaacccatacttttgttaacagtgaatgacaatatctaccatatgactgaattgagctacttgggaaatggctattatttttaaatcttaggtgactttgaggagcaatcatcaattacatgtatctcttgaactttaatcaaagttgttacactttgtgcctcatttgatctctgcaaagaaagttatataggagtgctgggaagatgttgtcttggttcgtatccctaactttcttgcccttccaacttcctttttggaatggtgtgacaaatggttcaggctttacttgctcctagaaagtacatttgaggccacacattcttgcaagtcctgtgtggggagagagaaggcaaaggaactaaaaagcttacattatctcagtatatcaatgtgatgtttacattaaatattttgtatgtaaacatgccaatcaagtggtgtatattttttggtagagcagaagacgggcgtaaaggaattgactatacttaaaacatttcaaaagaccttcctggggtttagtaatcttagcccagatctggaatgtgaaaaatgtacttagggtgtattgtgcagaaatcagatgtcctcaagttttctgtagctgatgtatgtatgaaccatttcctgcttattgtgatatgtgtgatctgctctgttgacattattaagaaggatttgtttcttgttataattagtagttaaatataacgacagatgttcatatgctatagattcaggattacgtctggttcttttagacttttgagcagtttatattttagaatatgctgtagaatcctctttttacatattgtctgtctgcactggtactagtcaattgctgggtacctcttctatctcttatataggatcactggtactatttgttttatggtatcgtttttatctgcctttcccagaacttattccatgttttagtctatttatttctgactaccaagatacaaataagtttgctgtatctcaacgtctaaatatacatatatattacaaaaggaacaaaattttcaaatgagaatactgccatttataaaagtcaataaaaagttaaatatcccctctatatagggcagtcttttgtattacagttactttttatatactgtgcattaacctttcttttttgagcataaaccagtcttgaacaaattcagtttgttcaggttattattattctgctgaactgcaaaatttaactgttagaaggtctttaggacctcctgggtctccaataggagagtcaagttgactgtctttctatctctcccttgtattcttgaaaacttgctttctggtaacagtagaatgttctagatattctttggttttcctctgccccagttcatctaactaaatgtctttcaaggagttctatgtcttttcgtgaaacaagcctagagtctggggttgcctgtgggagttggtttttgggcagagagtagtgctggccagtcgggtcactcttaagtgtgacagaagtagaaactgtttacttttcactatatgagtttacattttaacatatcatgttgttaccagtttttcaaaaatgtgtgttttattgattcccaaagactgacttctgtattcacatggatattttagatttccttgtatctaatgtcttgtggtaaatattgctgttaaggataaaataataatattttgacattaatctgataggataaaatctttaggataaaaatggtgtgaaatgaatgagattttcttgataaaccaaaaagttgaaaaaaactaatctttactcaggttctggtaattaacacaaagtggttaagatacctgaatgttatttatgctgatttagaataataagtaacaagtttctttttttttttttttttggctgaagccaagtagcaagtaacacatttcttgagcaggcaaaatgcttggttagatcctatgtgggaaccagggttttccagttatgattatacttatgttgttgcatgctcaggagcaagaaacatcattaaagtagcattacttttgccatgtttagatatacttaagatattcataggtgagtttattttggaaaggttaactatcttttgttattctaatatgtattctaatatttatttcattaaattttcccaaaggcaaacttttgggcaaggcagtgaacatacaggttttcttttcctttacttggctctcatagaggcatagatctcaagaattgaaaggaatcataaagtttaactcactgaactttttttttgtagaagaagaactaagtggtcggtgataaaagtgcaacttgttcagtttttaatgttttcttgattcagagtaattgttataaaaagtggtcatcatgttatattgtaaatatgtactttaattgttatttctcagaaaattcatctagatggtatattcctggtactaatatctaatttgttgaaatgtgatttattgtactttctattatataaaactgccattttatgtttgaaatttcatttttcttaggaaaaaagactatacttctctatgtattagcattgacactgctaaaacgtgtatttgagtaaagttagtattaaatattatttcttcaaatacattattgaaatcttatgtaatgaaaatgcttttagaatgtgtgatatgcctgggatatataccattatataatgctgcatttttttccaccattgattaagagttcttgaagccagcatagcagagaataaagcatgtttgaagaggacacctacagaagtttggagggattctcgaaacccttatgatagaaaaagacaggacaaagctcccgttgggctaaagaatgttggcaatacttgttggtttagtgctgttattcaggtaaggatttttctttattcagttcttatttgatgtgtgtgatagcaatggaaagtgagttggttgtgtttaagttgtgtactttaaagataagtacagataagtttttaatatactattttgtctaataaactagcttggggattgaagtatcctcccatccctctttgtttttcatttctagtatgtattttttaacagtagatcactacttatgcctttcacttatttggaatcaatttatcctttccttctgcttttaggaattgttggggtggaaagagttttgtatatatttccctgcaaatttatggaagcattgtaaccaagtttgaaactagaactggctttctgtgggtcagatcagatttatttgtatatactagacagtgttatttatagaattatagacacttagtatttttaataagcattttgtttgaggttggtatagatttgcaaatctgagtttgcatgtgaaatgatgtgatgaataaatattgataaatcaagaataacacattgtctttttttactaagaaatcccttaatgatacatttcttgatctgcttattctaaaataagagacatatgtatgtgtagatatccctcttttcaatttggaacagttttcttttacgtgtttaacaactgttatcaaaattctttatcattctcggttgacattgataatgttatccatcagattgcaaaactttaaaacaatttatgaataatatgtccttaatttttattactccttaggaaagttaactaatgttttgtgttcgtttttgtgtgacagttgaattatagcttattatttcatgttcgtgatgaatgctttttccttcattggacatgcatgctattttttgtattcaaaatatatcttcattttgtaactttccaaacctgtgtgtatgacagcttaaactttcatatgatattaaggcaactaacaggttatttggttcattttctacaagttaattgtttttgctaacttgtaattttaacttttttttatatacttcagtgctaaaattttcaccgttttctccctttttgcttctggtgcataatatcatataatttgattttctttgtttttctggatttacctcactttttaatatgctgtggtgcatcctaataagtaatatgctatgttattggctttcccaggacatgaagatgctaaggaatacctggattaacataaatctatagtagtatctttgcttctagccttgattatacgttgtttacttacatgccaaaaagcaatatctaaaatattgataccttagagattcttagatcatcttaataggctatctcactttacttgcgctatctattaagaaggtttgtgcatatgataatttagacataattttaaaatattaagtatagttttaaggctctgaactgagtgctcatgaacatgttttgctgcctgtgtttggtcaagtagatgctatctcagcactattatggcaaatacatgagggtcattgattagaagcttttcttagaaaggtataagaagaaagaaagtatttgtaaataatattgttagaatagttgctttttatttctctatcctgtatgtgtagggaagttctgtttgaaatgataaatgctgatatagggataatgaccttttgttttagtaggataaaacttctttcagcagctcagtttaatcttgatacagttacaatctgtttctaccctaagtttgctaatcttagcttttctagcttttctttttagcttagatttttttttttaagaaggagggaatgggctagaaaaaaattatcttttaaaaaaatgcctagcttatttaaaaactagtaattgtactagttttaaaattttatctaagtttagtggctgcttaactcctaacataggcaagtataagagggcttgagttatttattttttcttttggtgaaatctaaacatctaggagaagtaacctataagcttaaaaattcaggttataatggcctaataagataatggcttttgagggagtagaaaacactaagcatcagattgtggaaaatgatgagtgggcagaaaaatttggctagagatcacctgaagttttattttttatggtaattttaaaatctatcaaactattttaagtagcttttaacttttatctttggtagagtcttcttaaaaattttctaccattattgcttaactctaagctataaactgagatataatacttggccatcataaattgactttttacttgtgaatgaaaagttgggccaaaaatctaccatagtgttggaggttttgttgttttccacagtgagttggaacttactcaaattgtgatgtaaatgtactgtaaagttttgattacaaaattttctcggggatggaatttacttagtaggactaatttgaaacatctgggaattctttttcttgtaaatatattgaccagttatagaagtttgctagtaatatcaccctttaacttcaaagtatatagctggggtaggctacaacagttatagatagctttgcatacttattattttagatactgagaccaatattttggtagaaagggggaacagaatgtaagaaagggaatataaacaaagagaagattgtacagataatggcttaaataatcttttggctgctggcaacattagcctgtctttaggttagacatcaaccccacagctagtcaggattatttttgtcctattcacttggtacttttatgtagaaagtactgattgcagctgttccccactagggtgtcactgaatgagttagctatttggaggtgtatgttcttctctgtagctctgggacatgtcgttgaagtggtatgggtgctcatgatgatccttagccccttagcacctttccatttggatgccgagaagtaaggtgctcatacttctcagtttgcttgtcatagtcccttttactcctattgtagatctgttggcacctgtcacttagtcctaaagccctgctgtgtatgatggtaaagtatgtggttaccttactcataaatcatataactgcaggttgactaaaatacaggcaccctgagggcagagagcacatttagggtactctatattatatatataatacagggtctggcacattggaatagcccatcaagtaattattgcatgaatggatgaatgaaccaaaagggagcatgtatggagtatctaaagtagtacgtgaggatattttaaaaaatgatgcatattgtcagaacatttcaggatataatttaaaatgcttattcatactccttgctcttctctctttaattttcatcaaagaaaaaatcatgtggcactaaaatgcttaaacctgtctgcttcctagtcctgccccttgaaagagacctgtatctaatccatttcttctctatcttcatttttctaaatgacatgccttcccactgagatagatgaggaatttgctctttcagttcacctgcctagaattgccttttgtttcatctctcaacatggttataatacaaattaaaaatagtaggtagtcagtattttcattttttataactttgtaaatgttacagtgattcactaggtcctcccatctatagtactttgttatcctggagttgtcaattgctacctttttcccctattttctatatactttaatattttctaaatgcttcaacatgtttgttatggtcttaataatatattctgtatgcccacacatatttgcttcatttttttgtttgtttgtttttggagttctgtcccatagaccatttctctgtttcaaatttggggtgaattctgattctttgtggtttaagcatgatcactcgctttctaaaagtaagtctagagaaatgggattggtcgatgtgggtatcagtttacatgtttttacttaatcttgctgtttgtagctctcaatcatctctcctttgtactgtgacatacaatttgactgatttttctgaacctgagtcatttaagatctccaaagactaaatttcctatacacccacagaggggaggcaattgtctgaatgtgctgggtctggaaagcacatgggggtttaattgttctgtacatagacttgtggtttcaataatgccatctatttttcaatccctgcctcaccatgaaacttatgtgataccatgctaatttttttttaatcctccgaggagaatttatcacgcttctcagtcttctccactgtaggcagtttatgtttcatttcctctgcactcttgccatcacttctttctttttcacaaattatttgaactcttatcccccattatgtctttgttattagcaagaatctaaccaaacttcattttcgtaagtgcttttcaaaattcacatattagctttggactgaatgaaaggatggttattttcaggtgcattaatcaaaaacactcttcaggcagtaaaagttaccctttcttacctcttttgaaggaatacattggacagtcctcatatgactttggtgaaggatatagggtctttgggacttgaaaaacttaatttttatgatttgttgtgataatcaatggtgatgagtttcactgagtaatggtagatgaggttgttttagaccatctgccttgtgatgttttgctggattccaaaacagaaataaaaccaaccttttgagggcatcacagagtactaaagcagtgaggaattttgagtaaagaaggatagtcatagagtgagcttgttatttttgatggattttgtcctttaggcatctccagaactgactgctgcgtagttgaggaactaagaaaatttttgcacaaagtttgagccctagtaaaacatcttagactgtgagttggaattctaaatggttagaatgtagcattaactgagaactgaaagttaagacaggcttcctagtttctgaattatatagttttaagttatctcagaatttattggattaaggcgacctgagactgtgactctagtctccctgcctgccagagcaaatgtaaattctctcttagaagatagtattatctggaacctttcctcaatttttcatacacaatgtctagtactcaggtcagtcataccagaaaataagatgtgtgtgaaaactaacacaaaaaaatggacaatagaaaacagcacagggaaactggaatacttgtctgccataataataattaatatgttcaaggaattaaaagcaagattgcgagtctgaagaaaactaaaaactgtaaagaacaaaatgtaaatttcagaatggaaaaatataaatgaaactaagaagtcagtggataaatttagcagcattattagacacaactgaagagataattagccaactggtaaattaatctggagaatatttttcagactaaagctatgacataaagatgggagcatcaaagagatactttggatatggtgagtagtactaacagtgtatttgtagttccagagggagagtaaaaggaaatagggcaaaagcatgtttgaagagattactcacaatattccaaacttgagaaagatcaagccatagattcaggaagcaataggaatcaaatagtataaacataaagaatactgcaccaaagtacatcataataaaacaaataactatagacaaagagaaatcctaaaagttgcaaggtggaaaaagatacacgtataaaggagcaaaaacaagactaatagctgactttgatacctttaaacatcaagtcacacataagcagaaataatgtctttaaagtgctagaaataaataactggccatcttgaattttatacctagcagaagtctttaaaaatgaagaaaaactagctgaaataattcttcaccagcacacccacaccaaaggaagttctaagtatccaggaacaaggaaaattctctatctacaatgggagctcagagaatagaagtgggattgaaattcttctaacctgccaagattctctttcctctttaaattcctcaaaagaatagtccatggtttgtctcccctacttaacagtagtcccccttatctttggtttcactttctgctgtttcagttacctgctgttaattgtggctgaaaatattacagtactgagagagagaaggagagggagagagggagaacacattcatataacttttattacagtatgttttctttacaattgacctattttattattcgttattgttgctaatctcatactgtgcccaatttataaatttagccattataggcatgcaaggaaaaaaaacataatatatatggagttcagtaatatctgtggtttccggtattcagaggagattttggaatgtatcctttttggataagagggtgctactctgtaccccattttcccattatttaatgcctctgttcttcctctaccactccactgcaaacatgactttgcagttgccaaatccaaaggttatttctctgtccttaatttattggaagaatgtggcaacctttcatgatattgctaatcttgtcctccttgaaatgtgccagctattttttgatgtacagcagaatcttttgtggaactttgtatctttattgagagtcccctgacacagctattttttaaagctccgcagtttattagaatacacaagtatgtttgaaagcccttgttttctccactcgtttttcttctgtgatttcccttagtattcctttctctttttcaaaactctttttcttttttcctgtgatttttaaatggtgctttctccccaaggttctgatcttggccaactgttaatgtattcatatcccttctggtttattacttctactcttactgttttaaaaagcagtcacaagactgtaatccctacaagggcagagactaccttcttagtgtctggcatatagtagatgctccataaatatttgttaaatgaatgaatagatgatttattttatgtgcttatattgttgaataaatctttctagatcacaagataaaatttttttttacagtttctgttaccagctttatggttttacctttcatatttaggttgttaattgatctatgtaatctggctctatttctttatatgtagttttctcaatacccaactgttgatcaaaaccttgtttcctcattgatttgtggtgccacctttaccttctgtcaagttggctgactcaccttttctaagatttgaaacattatcacttcctgtatagtaattttcaaactttataaactgtgacccaagaaaggaatatactgtatattataaaacattttacacatacacaagtgtgtaaaatatctacaatgaaaattttgcaagaaaatactctgatgtatttactgagtatgatacattgtgatattttccattgtattttatctcattttaaagaaatgttcagtatgatgatagtaaatggttgcaaactacagtttaaaaaacatactccaggaagcctttccatgggcatcctgcatatgctccattagattcttgtgtaattattatcactgcatcttgaagtcacgacatttctattacatgtctgtctcctttctaaattgtgtacttccttgagcattgagataatatgtaatttctttgtgtctctattacctaggatctgatgagtaaatttatttgtactccatttttctagtattaatgatacatctagataattcatggtaaacatagcaggtctaaaaagttttggacttgacatttgcatactctttattttgaggaaactgcttaagtgcatataaaaagagctattaataatgagtagtatatttaaaaagttgtccaaatataatcttgtgcactatcaagtatcaagaatggtatgtcaaataaaagaaacttgactttttctcagaagtatgtcctccttgtgccagttgcaatgattctgagtataagtagtacacagttgtaaaaaataaacctccaagactagtcatttttacattctgctaatggaattttccctcaggttatgttaaattgttgttctttttcagtcattatttaatcttttggaatttagaagattagttctgaattacaagcctccatcaaatgctcaagatttaccccgaaaccaaaaggtaaaattcaaaagatttttttaagcagtatatatactctatatgttctcttatatgtgattgatttttgggcatttacttggctcatcaaatctgaaactgtcaatttgaatgtcaattcattaatcttagttaccatagcaagttcttatcctttgttaatatattataaatacgacttttttcctttacctgtcacagtaatatgccaatttttggtgtcgctttagtaatttttttgggggggactgtcaaatttcagtaaactttataggctatagtttacaatttaaggtctttcctcagttgtctcctaaaaaattttgtggaaatcgaaatttcttttcaattgatcgtcttgtgcagccctttaaaaaatgcgttttgcattcatgtctttgcagtacaaatctgtatctttcattttggaagtgactgtcatagatgggtaatataaagtgacaacacacacaccagggccagattgcgtgggttctagctagggacctagagctggttacttgatttctctctgttccatttactatctgtaaatcatatataataatagtaattatttcatagagttgctgtgagcattaaatgaggtaaaacatgtaaggggcttaaaagtgcttggtacatagtaagtactaggtgtcagctattgtcagttaaacaataaaaaaaattaaaaaaaaaaaaagacttattttaaaaagaaccagtttgcacacagaatttatacctaatggaaaaaattacttatggagatgatatagttgcgtgtagggctttagtggttgatcttgtcataaacaatctgtagtcctaaagtggacttattgccaaggcaagggagttagttttaggtttcagtaaactgctgaacttttttgacctatttttagtaggagtgatgaaatattaaattatgttttcgttttagcgtttaatttttaaaaccactttttctttttctgtaaacacgtgaaacatttataatgcatgctagtgggaagataacttgatttataaccagcttttcaggttataatctctgggctgtagagtgtcaggctgataaacaacccattttcaaaagggagtcaggatcgtctgacaaactcttatgtctccagaaaaattaaggaaaaccctttcaatcattatggtttttacatggaactttctgaactattgcctctgtcattgcaatttgttaatatcacagttcttctctcttctcatatctcaaagtatatgtataatttgtgtgaaatggttgagaattatcatttctagttaggtatgcatgtatgtatatgcatcttgaccatttatggtcctggattttaatgttttacagagctttaatttcttttgttcttcacagagttgaatgaggccatgttagtttgtattcttatttaaaaaacagttgctatatttatgcttatatatcagaacgagttgtgaatactagagaaatgtgtaattccagtcttcagcacctttctagagaagtttgtttcttgcaatgggttagcctctccaggtgtccctttagcttaaggaaataaaagaatttctcacttccattctgagacaattacttagaatactgtgcaattttatatgattattccacaaatgtgactctaatttagtatagtgacagcagtacacactataccttgacatctttgaagcaaatggatttatagatagttatcagccactgaatggtcctatattcacttgagatggtgacagcaggtttttaaaaaaggcgtgagtgtaacttgtcacttatttaataatgaatttaccgccaactcgtgacatgtctacagctacattcaatttgaacactttgtcttaagttgcagaatacatttgggattactttgatcacatcacagagatgccatttgtatgcacttttaaacaggatattttttgctagcaaaatttgccacaaatattacatacatattgagtgagatttgaaagaaatctagtatttgaaattagtatgtattttaagtagacttggcaattgcttgtagaaattgaaactaattttagacactcaggtttctttgaactgttggtaatttcagtgtctaggagaattgtgaggtccctggaaatataataatagatccttgatgtaatcatcccctctcccctcacacagatatacatttggtttaaaatgtttcagactgatggcaaagcatattaaatgttgagaaaacaaagatgcacatgtataatatttagtggaaatcatcatgtaaatagctaaagccttattaattggaaggttatattatttaaagtcttgatttaggacaaatatttcaaaataaagaaatttatcactttccactacttaaagtgaatgtcatcagaaggaaatgggtttagttgagtaccatactgtattcctggagcaaatacctgaaggaattttgaattttacaaataaaaggggcattctgagatttctgccattagtcatgaagaagtaacaggagctggatttataagtctcagtgcatcttagaggattcaaagcatacaaaataccttttctgatgaaaatggtagaaatcaaggtagaaatcaacaacagaaagatatacagaaaatccccagatagttggaaatgaagtaattcacctctaaatatcccaagggacaaaaaaacaaatcaaatgagtaatgtcagaatattgtaagctgaatgaaaattaaaacatgacatatcaaaatttgaggatgaagctaaaacagtgattagtggaagatatcttataagagacatcttaccagacatcttattagaaaagaagaatggttttcaattaatgatagcagcttgcatatcaagacattagagaataaagggcacgttaatctcaaagcagaagtaaggaaataataaaggtaatagcagaaatctgtgaaccaaatatcagaaaaacaatacagaaaattatggaaccaaaaactgcttcttgagaagattggtgaaattgatgaacttctaggtagactaagcaagaaagaagagggaagacatatattacaaatataaggagtgaaaaagggaaacatcactacatactctgtagacactaaagggagaatagtggaatattataaacagcagacaagtatcttgaaagtcacaagctatcaaagctcactagtgaagaaatagataacctgtggtagccctacattatattaaaggaactggaacctgtccaccaaaaaattcagcagctaaatagttttacttgtaaattatattaagcatttaaagaacaaatgataacaattccctataaatttgtacagatacttaaaaagtaaaacttcccaactcattttgtgagctaagcattaccctgaaatgaaaagtaggaaaatacatttcaagaaaagcaaaccacacaccaatatttctcatgaatttggaagcaaagaattgtagcaaatttttgaaaaattaaatcctgcaattatatataaaggataatacctcatagagaagtggggcttatccaggaatacaaaattggtttagctttcaaaaataaatcagtatacttcaccatatcaacagactaaagaaggaaaaccatattatcatctctgtggatgaagaaaaatgatttgaccaaagctaaaatctcatttatggtaaaaatcttctagaaactaggaagcaatttacttttcaaatatgcttctcagcagaattccactaatttccaaaaattattacttccaattttgttactgggaatgtctcaaaaaactgcattgacttaggtgcggtgataaagaaactgatctcaggaaattaagggtacttttgaaagtaattttgtggattaaagctcatagtctttatacttttaaaacctatgtctgagggcatatttggaaccagttttattccctcttacctatttctcaggactcttttttggaatctattctagaagcaattctttctatgtgggttatactattttgggcagcaactatgtaaagatacacccccatcccagacccctagaattttacagtgttgagaatgccaactgtgtaaatttggaagaaaattttcatgtttaatatctaaattttttccgttaaaattgttattataagaactaaatattataagaatggcttgcctggtttgttgtcatgaaacatttcactaagttatgtgaattatgttattttttaaaatttccttcttgttttaaaatacattgttagtgattggtaatgtgggttgttttaatttctttctggagattttgctttaatgagccagtaagaattgaatgctttgtgtagtaaaaagttggggaaaagatatagaaattcttgtctttgagaatcttatagtcttattgagaaacaaaagtaagatttcagaggaatattaggagggtgatatattagtctcctattaggatctggtctaattattaaattaataaaattaaataaatttaaatattgtgattgaattatattaaatataatgttcgataactttagatataaaataaatgagtataaaataattttataagtaatttttattaaatataaaaacaaatattaaatttctaataatcgggtgaggttctaatattagtctaataattaagattgtcacaccacagtgacagtcggtgattcattgctcagtgaaaggcatttatttcagtagatgtggaatttgaaggtatcgttgacttgaaggagtctggaaaggcttcatggaggagtggagatttttgctaaatgggtttattgagatcaagcacttagaacagtgcctggcatgtagtgaacactcattgaatgttggctgttattattgctctgagcagcagcagctgggccttgctgaatgggaagtattatgagaagcagtcttgaatgaggaagatattcttggctgagtaatgacatgatttgctgtgaatatgtggcattcatgctgaaattgtgagcctatcctaggtcttctgcctttttgtgctggacttctttgagtctcttagatggcaccaacactctactttcttcaattatgatagagtgctaattcatccctaaactatattggctagtttaatttttggttactgttaaaatgaatatttattagtaaaaattttcttaatcttcagttaaggtgtttttgtttttgtttttttccttcaataggaacatcggaatttgccttttatgcgtgagctgaggtatctatttgcacttcttgttggtaccaaaaggaagtatgttgatccatcaagagcagttgaaattcttaaggatgctttcaaatcaaatgactcacagcaggtagttctgttgcactgacttgttcattaaccatttgtatttaatctgaacaatattaagcacctttcccaagaatatgagactatttgagatgcatgattctgctttattaaaaataacctggaaccatttaaaacatttgggagacttttaagagaaaagtgatcttgaaggtgttaaaataaagttttaatttatattatgattgaaatgaaaacgatggatacaattaagattatttacaaatacataattaaacatgttcacaaatgtgtgataacagaggatcattatagtacacatgcttttgatattcctgtgtttgctggcagggagtacttttccttaattacccagaaatggtttttgaaagatgttatctttgttattgttgcttttgtcttttattctttatatagtgtattgtggtagatttttatccattaccttaaaagaatattggtaattttcttataaaaaatacaaaatatctataaacaaaccagtattttcacatataattggaaaaatcagagaaattaaagaaggaaaacagaggaaaaaatacagtggcaaagaatagtaagtgttcaaaaagatagcggcaatgtgtaatggcagaagtttcaaaaagccactaagcttgcagcgttgttttttaaagtacatacttggatgtgtctctgttttgtgatgtatggagagggcgtttggaagaggaaggtctgagattctctcaccatcttccttgtgctttttgtttctgctttacatttaccttgtatggcaaatgtgaatgaacaaaaagggcactcacatcagagtttcttttatatgttgttgcatttttaaaaaaaattctaacaatgctccagtgccttttaggcttagtatctactcagctttgtttcttactcgctctgtcatggtaacactaacacaaatcaaaagaaagagaaataattttacagttgattccaaaccatcattttcgggcattcagcattccttctggttctaaatgtgttttacttttttttttcttctttagtatgcatagtatcttttccagtgattctgagtatacaattaaattttttaaaagattacttctgttctctgacttatctttccttctggatggctttttccttgtcttttttctggtttctttttttttttctttcttttctagagattcatgttgattttggggtatcttttcacatttaaagatgaggcagcatagactttgtctggagccatgtatgtacataggtgggcttttcagtttgagttagagttgaaatggatacaactggcggttaaggccacaatataaatgcttttgcttcagattagcagtgtagactaacttttgaaattagtgattctttttctttagaggccttttaaagtagatgtgcatcaattaaggttgataagtttgattctcttctgttccctaaacacttgaatttgaagtctacaggagtaatttagtgaatctgtaaatgtaagcatcatgatttttttaaaagtgaatttatattttcattgtatcttcttcctaaatatttcaaatacatcatcttttgaagtacacaggagtcttttgagacaccctttggtatgtgatactgttagttttttctttttcttttccgtgtttgtttttttttgagacacagttttgttttgtcacctaggctagagtacagtggtatgacaatggctcactgcagcatcagcctcctgggctcaacccttccccagacctcagtctcccaagtagctgagaccacaggcacatgccaccgcgcctggcaaataattttattttatttttatagagacaggatctccctatgttgccaagcctggtctcgaactcctgggctcaagctatcctcctggtttggcctcccaaagtgctaggattatagacatgagccaccacacttggccccaattgatactgtcaattttaatcatacctttaattgttttattttataattgtcaattttagattgatttctaagaaagatagggattaacttctgaaaaatattgtgttagctaggaaaccttattttttgttggatgtaatgtttaagtgaattaaagttatacaaaagtatgaaaagttgttttaaggtgttacaatagttcctaaggacagtcgtaacaaattacaacaaatggagtggttaaaaacaaaaggttattctctaatagttctagagggcagaggtccagagtaaaggtgttggcagggccacacttcctccattggctctgagggagaatcctttgcttccaccgtactctggtggctgttggtgttccttgccttgaggcagcatagctccaatctctgtcttcctcttcatgtggctttccctcatgtgtctgtctgtcttctggttttctgtttcttacaagaacactcaccattggatttagccccagccctaatccaggctgatctcatctcaagatccttaccttaattatattgacaaagaccattattctaaatagtgtcacattttgaggatctaggtggacatatatttttgcaggctactattcaacccgccacagatgttatgaatgtttacagctggatttttgcgttgcgtttagtcctatttaactctacagctttggagcagtttacttaagcttcccagactttagtttcaacatttttttgaggttaatataaagttggcctacatgctctttaagaaactgctggctgaaaaaatatatgatagtaagtttgttttgtatttggggctattttggtaagtaaggacaaattgcttactactgattcatctgcctgtaagcagcctcagtagagttgatttattgtttttcccttatgttctatttattattttctgtgttccaactcacgttattgaaagaattatggtagttgataacacaactgccacaacctattcctgtttttccgtgttgggagagcaaagaccaaaggcatggtgaaaggtgataaatgggctggttctgaatgatagtaaaggtagatatggcttaaaaagttgtgtgtgtaagttgaattaagaaaagtgaattgtggaaagagactagtcttccttctaagagagaagccagtcataattctttataaaacgaagaactgtttgctaagatgatttcttcattttataaagattcattacagagctctttgggtggggagtaatgattattttttaaaaatctcatttgtaagtttggtttttgattgtgtgtgtgtgtgtgtgtgtgtgtgtattttaaagtgaaacccaataattgattatcatataatgcttgttttttcaaatatcttatatcctggttaaattataaaagtttcttgcatttcgtgtgaaacatttcacttgttatctttgtaaggagttggtaattatatatttcaacaactggctctaggtttgatgttacaacatctagtattttttttttagtaggctcaaatatcaacaggcttttttcttttcacagcaagatgtgagtgagtttacacacaaattattagattggttagaagatgccttccaaatgaaagctgaagaggagacgtaagttaccgtgaagtttagcaatggggttttaggaattcattagatagcatgtattaaatgtcaacagagaaataagaaatcaagacagacttatgggaatcccagtattttctgtattattgacaagctgtttagaatttgcaggcacaaataatagtgtaaccaaaaaaatctaaaaagtgatccctggaagagctagtcttacatgcccagttccttttcttagattcaataatcacttttcatgacgaggaatgaatttgcggtggagaaagatgtcaggaatgtgaattgtgacaaaatccttttacgtagaagcatgaagacagggatatgaagtagcagtgcatgtgagcaagtggctctgttttatctgttcactcagggccccgaggtcacctaggtttctgggatcttgctggcagtgaaaattatactgtgtctctaagtttctgcccagaggtgacacacatcacttctgcaaacattttgttgggcagagctatgtggcctaacttcaaagtgagtaggaatatctcacactaattaggatggcggctacgaaaaaaaacgaaacaccccccccaacccctactgacccaagaaaataacgagggttggcaaggatgtggagaaattgaaacccttgtgcagtgttggtgaggatatgaaatggtacagccactgtggaaaacagtatggggatttcttaaaagattaaaaatataatcaccatatgatccagcaattctgcttcttggtgtatatccaaaagaattgaaagcagggtttcaaagagatatttgtacacctgtgttcatagcaacgttattcacaatagccgaaaggtggaagcaaaccaaatgtccattgataggtgaatggataaacaaaatgtgctgtatatacatacagtggaatattatttatcctgaaaagcacagaagttctgacatatggtgtaacatgaccccttgaagatattatgccacgtgaaagaagccagtcacaaaaggacaggtactataaatcacttatgtgaggtatcaagagttatcaaactcttagcaacagaaagtagaatggtggttgccagaggctggggggagggggagatgaggagttgtttaatgcatatagagtttcagttttgcaagaggaaaagaattctgacattggttgcacaacagtgtgaatatacttaacattaccgaactgtacagttaaagggttatgtacattttatcacagttttaagaagtgagtaggacagtgtatcttaccatgcacctgaacgtgaagggccagaattttttttcagtagcattaaagactgctatactacctactggggttcttgtaagaattaagagaagtacttatcaacattattctaaggattaaatgatgacccatttatcaagagagatggtatcccctctctccctttttaaacaatacttcacaaatcaattaatataaacacaaattaatacagaaaaatctgtacacaattgtggatacaacgcatttctatacagtaaggcaaggataaactttgtctttttaggtcacacaaaccataaaaagacaatttaaaattttcaacttttgtttgctccaagcagaaaagaaaaaaatgaattttggtattaaatgacttggaaaatttgtagatgactaattctaccagcagtgtgaaacttcacaaaagaatgaagtagctgttcagctactttgggtgaaaaactggtacctcgttccctccctggtgagggttgttgtttttggatttttttggactcttccatgtaaatacaggaaataacctatcaaaattttgtagaaatgtattctgattaaaagtggcttttcttccttcccatgtccaaataaacgtgcactacacagagtatgagattgaaatgtgtaatgatgataggaagagcaggcactttgtgcacaaactgtgtcaatttctcttccaagttcatacacgtagtagctcattttaactcctatgagagtcctgtgggtgcagctatcatagttatccgcagttgacaggtaaagaaatggaagaataagtaccttgtgcaacgtggcactgtaaataacagagctaaatgcaagtgcgtgatagccacataagtgtttttgtcttgtcatatgttatagttctttaatattttctctatttataggtccgaaaattgtaatcacatttatattttttaacatactttagggatgaagagaagccaaagaaccccatggtagagttgttctatggcagattcctggctgtgggagtacttgaaggtagagttatacatttactttttattgcaagtgaagagagattattattcattcattcgtctcgatagttactatttttttagtggactttatttttaatttgatatattctgtctagtaatttttgttggattgctactgttattcacataaagcacagaattgaatgaaggaaaaggaatgtacagagtgcattatcacatactaattaatactttattttatcctcatgttttttccagtgagagggcttccatgatacaattatgttggaatacagggattaatgggatggttgatagatcctttgaagataatattggagttaaatactgggcttgatatgatgctcactttctttttcatgttgaaagctgaatttagcaacttagcatagtcagggtattatagagttctcactttttcagtgattttaaatgtagatattagttttcaggaaaagattgtactctatcttttgaaaaatcagtgaagagtgatactactccatttaagctaaatacctgtttcttaaaatttggcctaagtagtttctgtttgggttccctaacaagggaggagactctttaaatgtaacttcatgtaataatattaggtcccaaagcataaacttttgaaaaattgtttttctcacatcacccaatgcatcaacttttgaaagttatctttttccagatcagctaaagtgtaaaatttgaaaaaatgctttttcttcacgatcttaagtagtggattccctgaagttctgtttgaacgtaggtggtttgggattcagaaaaagacaatactaactcagatgttggccctttaaaaagtcttagtgacatgttcgtacgtttttgtttgtttcaagtggtaacaacttatatataagttgttttatatatatatgcacatatatatgagttaatatatataagtttatatatatatgtagaatattttacatagtacatttacgttgggtcattcatcttaatcattctgattttatttgaagtagaacactatctgatgcagcgagtaggtctcatcaggtcatgactaggcactgtttataataccctgcatgagcatttctacctgtattatattgattcctaaaattgattgttattaaaatatttaatttgttggctgggtgcggtggctcatgcctgtaatcccagcacttcgggagcccgaggctggtggatcatgaggtcaggagatcaagaccatcctggctaacacggtgaaaccctgtctctactaaaaatacaaaaaaaaattagccaggcgtggtggcaggcgcctgtagtcccagctactcaggaggctgaggcaggagaatgacgtgaacccaggaggcggagcttgcagtgagctgagatcgggccactgcactccagcctgggagacagagcgagactccgtctcaaaaaaaaaaaaaaaattaatttgtcaatccagtgttgaagtctttgtacttggtattagtaagttgctttagtgattgtgttatataaaggtggccttaatacgttttcacttgaactatgtgtttgcttcagtaaaagtaatttatttcagagtactttcttatcactttttacatagatcttcctaatactttctttcaaaccaatggttcttcattagggatgatttttagtttgtttgccaaagtacccccactgcaaaagtccctcaactttttgagaacttctagttcattgtcccctctcagcccttctctgtacttcactccttcctttttcatctaaaacctaaaactctctttccccccttcccttctggcaccccctccctgttctctaaccttcattaagctgttcatcttttctgtgtctgtactgagtacctgaagattgctggcaaaaagtcacagaaatgggctaactgtagtggatcatgaatttgagtgatactgagcttccgtgctcccaatcctataacccaacttgttctgtgtaatcaccattctttctctcatttactgcaataaatattttcgttttttccactcatttcagatctaacttatctcttcattctctgagaaaatctttacctcagatttcatagatttactgtcacattaatgaaacttaatcacaggttttgcccagtccccgaatctaattttacatttgtagttttgtatcatattctaaaaacacaacattcccaaatatatgagcctcaggctccataacctagatctatcactacctctactatatttttacctgctcctacatataataaaggaattacccagttttatatcaaaagactgttctttatacgtgctcagaattccctcccttcatgcttttactcagaccttacttcattcgttttttcttggcttttgagcttctcccactctttctttctcatcaatatttacacattgtctggtatctcaaaccttaaaaattaaaaacgttatcccctcccatactctttttcagttaataccctctcttgattcttattcaaaattaagcccctttaaagagaggagttagtttcaactgattactccccatttattaaacctagccccagtttagtttctggcttcagaacttgtctaaaagggatcttgctaaggttattgattttctacatgtggttaaatccattagatccctttcagtttctgatatagtttggtcatgtcccaaaccgaatctcaacttgattgtatctcgcagaattccgtgtgttgtgggagggacccagggggaggtaattgaattatgggggctggtctttctcgtgctattcttatgataatgaataagtctcctgagacttatcatttattaaaggcacttcttccatggcggcgacaagagaaaatgaggtagaagtaaaagtggaaacccaggataaacccttgagatttatctggggtttccacttttacttctacctcatttcctcttgctgctgccatgtaagaagtgccttttgcctcctgccatgattctgaggcctccccagccatgtggaactgtaagtccaattaaacctctttttcttcccagccttgcctatgtctttattagcagcttgagaatggactaatacagtaaattgggtccggtagagtaggacgttggtgaaaagatacctgaaaatgtggaagcaactttggagataggtaacaggcagaggttggaacagtttgaagggctcagaagaagataggaaaatgtgggaaagtttggaacctcctagagatttgttgaatggctttgacaaaaatgctgatagtgatatgaacaataaggtccaggctgaggtggtctcagatggagatgaggaacttgttgggaactgaagcaaaggtgactcttgttatgttttagcaaagagactggtggcattttgcctctgccctagagatttgtggaactttgaacttgagagagatgatttaagatatcggtggaagaaatttctaagcagcaaagcattcaagagatgacttgggagctattaaaagcattccattttgaaagggaaacagagcataaaagttcagaaaatttgcagcctgatgatccagtagagcagaaaaccccattttttgaggagaaattcaagtcgtggctgcagaaatttgtgttaagtaacaaggagccaaatgttaatccccaagacaatagggaaaatgtctccaggatatgttataggtcttcctggcagcccctcccatcatagacccagagaagcctaggaggaaaaaatagtttcgtgggctgcccgtggtactcatgctgtgtgcagcctaggaacttggtgccctgtgtctcagctgctccagcttttgctagaaggggccaaggtgtagctcggcccattgtttcagagggtgcaagccccaaaccttggcaccttccacgtggtgttgagcctgcgggtgcacagaagtcaagaagtgaggtttgggcacctccacctagatttcagaagatgtatagaaatgcctggatgtccaggcagaagtttgctacagagttggggtcctcatggacaacctctgctagggcagtacggaagagaaatgtggggttggagcccacacagagagtccctactggggcaccacctagtggaactgtgagaagaaggccactgtcctccagaccccagaatgttagatccactgatagcttgcattgtgtacctggaaaagctgcagacactcaacaccaacccgtgaaagcagccaggagggaggctgtaccttgcaaagccacaggggcggagctgcccaggaccatgggaacctacctcttgcatcagtgtgacctggatgtgagagctggcatccaaggagagcatttcagagccttaaaatttgactgccctgttggatttcagactgtaacccctttgttttggcctgtttctcccatgtggaatggctgtatttacccagtacctgtactccaattgtaactcttctcaggaaaaaaatcagtcagtgttacagtttttaggttcaggtgagaatccttacataatcttaattttagtagccaaaaggccatgttgaggatcattaattttctcccttcttatagggagtaactagcttgcttttgatattacaggcttgtaggcggaagggacttaaccttgtcttagatgtggtttggactgtggacttttgggttaatgctaaaatgagctaagactttgggggattgttgggaagacatgattggttttgaaatgtgaggacatgagatttggaggggctagggctggaatgatgtggttcagctgtgtcctgatgtaaatctcaacttgaattatatctcccagagttcccacatgttgtgggagggacccaggcggaggtaactgaatcatggtggggcagtctttcctgtgctattctcatgatattgaatacatctcatgagatctaatgagtttatcatgggtttccacttttgcttcttcctcatcttctcttgcctctgccatgtaagaagtgccttttgcctcccgccacgattctgagggcttcccagccatgtggaactgtagttccaattaatcctctttttcttcccagtttgggatgtgtctttatcagcagcgtgataatggactaatacactttccatattgaattcttaccagttgttaatgctgatgactcttaacctcttcttcctcctttttcctattctttccttaaaaacacatttctctggcttttgtaacaccatattcttgtggcttttttcctgcctcagtgggtacttctaagaaaagttgtatttatagtctctttttgcatataaaggtagcagaaccttaggactttgtttaggcccatttcttcttcctgtcccatcccctaggcatctcattcagtgccttaatttcctgctgtcaataagccagcaattctatctttattccagaatgttaatcttagttacagattcatattcaactgtcttctcaaattgaaatctcatggatcataatgaaccagtgatttccactgctacctcaaaactaaagaaaaaaaaaatcctgtgttcttacttaagtggtgccattttcagtccataatctgccaggcatgatggttcatgcctgtaatcccagcactttgggaggctgaggcaggtggatcacttgaggtcaggagttcgagaccagcctggccaacatggtgaaaccccacctctactgaaaatacaaaaattagtcgggtgtggtggtgggcgcctgtaatcccagctactagagacgctgaggcaagagaattgctggaactcaggaggcggagtttgcagtgagccgagatcacaccactgagctccagactgggtgacagagcgagactctgtctcaataaaaaataaaatgtcatcatcatcatcatctagttgttcaaaaaaaaaaaaatagtaatcattatcatcatctagttgttcatgccagaattctgttattcttgatattttccttcttacctatctcttatcctgctcagtcaagtcctgttggtgcccttccttgcatatatgtataaatgtatatgtatgtaattttatctcttttctgtatttttacttttaacaaccttcatccatgctacctttatttctggatagattctgcaatagtcttttaacagatgaccacccacttcacacagggactttaaaggtgtttcagagacataaacctgagcctgttattcttagatttaaccattcagtgactgtattagtccatttacatgctgctgataaagacatacccgagaccgggcaatttgcaaaagaaagaggtttaatggactcacagttttacatggctggggaggcctaacaatcatgggctggggaggcctaacatggcagaaggtgaagggcatgtctcacttggtggcagacaagagaagagaacaagagccaagccaaaggggaaaccccttataaaaccatcacatctcatgaggcatattcactaccacgagaacggtatgggggaaaccgcccccatgattgaattatctcctgctgaatccctcccacaatacaggagaattatgggagctacaatttaagatgagatttgagtggggacacagccaaaccgtatcagtgactttgcattatacccagaatgtggtggggaaaaaaattcttaataggaccacaagaccttgtagattttaactcactgcctgacttttcattgtaatctctcccttggttccccaagctacactaacctcctgttagttcctaaacatatcaacttctttactgccttaaagtcttcatcatgctgttccatggccaagaatactctatagtcccccagcactctggcatggctaactcccactcattattcaagtctgagcttaaatgtcctttgccatggaggtcttccctgctctccccaccacctccaagactaagctcccatttttatacctctcacataattctgtctcatcacaactttctttttataacaattgtaatataattatttgtaattatttgtttataaatatatgtgaagttaatgggtataatgttttttaaatgaggctgagaattttctcagctcagggaccatatctctcttgttcactgctgtatatattcccagtgttcagtacagtatcttgcccttagaaaatgcttcttgcgagaaaaaatatacatacatatgtgtgtatataattacatatatgtggatgtgtaatatctatggctgggtataaatgtacatttgcacatgtgtataaaccaacaggaaaattaacactaacacttctcaggaatgaaatcagtcagtgttacaattttcaggttcaggtgagaatccttacgtactcttaattttagtagccagaaggccatattgagtattattaattttctcccttcttataggtaaaaaatttgaaaacactgaaatgtttggtcagtacccacttcaggtcaatgggttcaaagatctgcatgagtgcctagaagctgcaatgattgaaggagaaattgagtctttacattcagagaattcaggaaaatcaggccaagaggtgagtttaacattttcattgtcccctttcttccctaggtctttcttacaatgctatagcacaatgtaaggttctaattatagagctacctaataattgagagagaatactcagagagtatgtttggatttaattggtaatttagacattcaggagacctgtccagtcaatatggcctataatctatgtcaaattctcacttaaataatttatctcagaattttaaaatcttaggacattgttcagtctttttagacctttcaatcaaggtaccagccattagcagcatgctagttcctcgatataaagaagaaaaatcctgatattacagtggattttaaaacagatatatgctacttatatcaactgttattggaatttgtccacgatgcccagattccttttcttgtaaaattgctatgtgattgcataaggtcagatggaagaacttcccttctcaaggaagaaatcatttttataaaatattgttaacttatatgtctacctcaactagtttctttctttccagccatctctgtttctttatccatctctgtagctgcatctgtgtagccattcatccatgcattcatctgtcagggagttttggcactgtaatagtaagcaaaggacatacgtgcttccccaatcagttactgttaagaaattgctgatagttgtctagctgttaaactccatgaatgtggctagaggtctttatctgtgtcattcactattatatccctagtggtaatatggtaactgcatacataatacttattgagtgaatgaatgaaatgtcttggtgcttatcaaacaagtttctgaggtctttatactgaataggtgcttaataaatattaagtgatacgatgtctctgtgtttatctaaaaggagactttgttcttgtgtttttgagaacaaattgcttttgtctaaattttaatttttttttcttaaagatgcagttaaccctttcctgtttcaagtgcatactcatttttttcctcttcccccccacatacataaacaaacaaaaatatgcttttcctgttaagaggaagagatgtatttgaaatagtctttctctctacatcgtagatcatctatttcagtgattctcaatagagaatagccagacttcaaagttatccaggcagggtctacgatagggatgtggtatatggacacaagagctgcacaagtaattctgataaaaacctctaaataagaatgtttaaattcagcttattttattgattgggaaacagatctcttaagagtgggactttaccagtatcccacaatggaataagaaagcagactcttaaaatccgatctgtttgctgttaaatgaaaggatgattggggtagtaaggcagggatggtacttgtttttatattatcagagtagctgaaatacactatggtttattggtaatctttctcacatattcccagcttttaaaaatttttattgtacacagaattgaaattttattgtttatttaaaatatcttagatttgtcctccatctttttattggttttatactctgaatgcccctatgttgcaatataaatgttctgcctaggttttttcatctagcctagggaatataatgatttatgatggttctctattttagcagtttctaatctccactactgtggcaaatttgattgcctgtgattcctgctaccatttttctagatttgctggaggctatagtttcaataataattcagcttgatttaagagactgtcactgactaaagtatagtatcagtttttaaaaaataacatatttaaattatagtcttattatatcctttagaaaaagtattcttgaatctctaaaagccagtaagtaacattacagactatttctaaattggcataatccctgataacaatagctttttcctcaatctattaaaaattgttgattttattttggcccagagaacatcttatttgctgaaatagctgtggccaactaatatataggaagacctccagtcttccaagctaaaacatccaattggctataagagtttaaattttgtggatgatatactaagagacaactgaataagttaaacatgattatatccaaaataactgcttaaatattttttaaatgatacattttaacttttaaatggtatgcaatttgtagatgagtcagactctccaggaaacatggagatattttttgattgtctgttggaggaaaaaaatttcagatagtaaatacttcacttgtagtgtgagtattcactactaccagtgtgtgctgtgtgttcttttagactattgctatgcacatataagtatttgcatctgtccacactgccccgaaagttgcatttttcactcagcagtatatcatgagcatgcttctaagttagtgtagagctttacgtcagtgtttttaaaatctacatagtgtcacatagtctgtatttataaaattaaattgatttaattatcctgtaaggcagtaactcgaaaaagaactattctgaagaatgtctttgtataaatacccttgcgcacttaggaatgaagtatagttagaagtagaatctttgggtcacagggcatactcatttagatgtgttggcactgccaaatttcccttcacaaagttgtaccaagttataataaagtgctagaaggagtttttacaaagctttaaaaacaaaattagagaaacaatatcgacatgtaccatattagacatctgtagaggttatatggggaacttaacttttgaaatcaaagggcaaatgagtcaaggcaattaaatgactggagctaattttttaactggaataaaaagtttttgcttcttgtgcatagtttacatcctggcttggtttgatattccgtggggaatttgaagtgataggtgtgttttttctgttgtttttttctctccacatttgtgtaatcctctcataaaagcaaggtatcttatacactttaatagaaaaccagctattaaaactcataaaaatgacatactctttaggaactacttttgttaacaggtgagatttctagaattgtgatgaatttagaagcacttgtgctgccaatactgattatgtaagttctttattcactaactgcagaaatctattcctcctgtagtttcattatctagtaaaataataatatgtttagagatatggagaatgacctctgtctcacaagcatggcatactagttagattgtagacaagtagatatagttttttgttgaatggaaatatttttttgaaagaaaaatttctcatgtttcgtattatttaaaattcaaattatgtactgctatactacaatccaaatattgcagagctagacataccattaatattttaaaacatgaatttacagaatgtctggttatctcatcttgtccccatcagctttagaatgagaaagtgaaatccttccactcttgtagtaggaaaaacctgccatcgctgatagaggaaaatgcattcataacagagacatattacataacatttttgaacatccttttgtaaggtatggaagctatttatatttcctggacttttcatggtctacagaaaagtgtaccccagtttgggtcatttcatttcttgtggccattgtagatttccatgaattaaaatatgtaactatttaattttaatggtgacatttaaagtattgcaataaaatatgaaagtgatagttcttgaaatctactttcttgtttgagtatcataaaatggagcagagaatattatcctaaagaatcaaaagtgttctttctgatgtgtctggggtaatgttttaattcttaataataattttatatgtggattagaactaactcaaaaattcttgccagttccatgtgagatcaaaatgagtaagcaaactttgctaatcaaattttaaaacttgagatgtttcttatatttttcataattttatttaatccgtttcaggtattatccatataaaacaaattccttaaactttagctttcagtaaaagataaccatccagctcaggaaatctcagttcaagtaattatagcattttgaaagagaaatagtattgaataccatttgcttttatttgctgtagagaaaagtagcaactttccagatcctcctcagattcagtttgccagatgtgtgccattcatgctttttttggatgttcaaatttaaatttggtatattcttaacttattgacagatgtgtggtggcattttgtgacacttgaaattatcacacacaatagattatgcagcagtttcgcatattgcagtttataataagcacttcagaactattttatacttctgttctttgttgatttacatacaatctttctttctctttaaatacatatgcttatgtataatttgaggttgtatatgaaaataattttcttttaaaaatgttgaatttcatgcttaattgaacagttaccaaagcatgtatggggattaggggctgggggtaggggaaggaaattacggctatactcattatcagaatttggctcatagcaatgagacattcaattctttaaacactagttattttaaaagattttaagtaaattactctaagtattaactttttgttagtgatatgtctttttcataaattagtatgaaatccagcagaggagctaaagctaaaacaggaaaacaccattttttcatttttagtatgagagttgtgacgatttatgatataaatttttttttgagtactccctctcataagttattttatcacaggattttgatgctttggttaagtataagtgccattcaacatcacgttgaagaagacagagaagacttgagctactaagtcatggttttaaccagtgtctttttctttgggctagaaattctaatgtaaagaattattttcgaaggatagttgtgagatttctttttttcctgatcatatattatacccactcttggaattttcaagaggtgtggaaaacttttagaaagaggttgagttttaactaaactgtgtacccagttacttgtcaggtccgcattgtggtgatacatataacaatgtcagtgcccacatcctgtgcctaagattgcagtgaagaaaacaaaggtggtattaaagtttttgttattgttttatttcctttcagcattggtttactgaattaccacctgtgttaacatttgaattgtcaagatttgaatttaatcaggcattgggaagaccagaaaaaattcacaacaaattagaatttccccaagttttatatttggacaggtatggtttgatatactgcatgacttagtttgaaacagtttagtaagggagaaaatattgtttagaggaaaattctgcataattttcttagaattaatttctacttttgcataatatacctaataccatttgtcaaggtagatgaaatttactttgtattagaaaagtatagtttttgggaataatgttataaggaaatttaaaaaagatgaattttgtaatcttaaaattcagaattttaaaaaataccattttgtattatctaccttacatcttatacaattttgaatgaattgatgctttgtggtgatgtctgtacttaatattgtatctatctatctttctgtctttctttctgtctctctgtcttcctgtctttctgtcttcctgttttcctgtctttctttcttttgtttttttctgtctgtctttctgtctatctttctgtctttccttcttttttgttttgagacagagtcttgctctgtcgcccaggctggagtgcagtggtgcgatcttggctcactgcaaacaccatctcctgggttcaaatgattctcctgtctcagcttcccgagtagctgggattacagacacccaccatcgtggctggctaatttttgtattttagtagagacgagatttcaccatgttggccaggctggtcttgaactcctgacctcaggtgatcctcccgccttggcgtcccagagtggtaggccgggtacgctggcatctggccatattgcatctactttcatgatattcggaaatgctaatgattacctttttctgatagatacatgcacagaaacagagaaataacaagaattaagagggaagagatcaagagactgaaagattacctcacggtattacaacaaaggctagaaaggtattttaacttttatgaaattaggagataattatcagaaaccatgtatttggtgactagatttttaatttcaaatttgctttgagtgatttataattttaggagtagttaatattgtgtgaatagttttgagttttgcttgaaactaaaaatctatagtagactttaaaaaattattctagtgtttaaaattaaatatctcattgtcaacaggtaatgttcctactgctgaaaatagatacaaagttaaatgaatatagttttgaccttcctttttgcatgaaactaaagattactcttgagattttcattaaaatgaatggtatctgagtttttctccttaaaacaggatacaaactcagctgcctaccaagtcttctcagcagcttcgtaaaggaggaaattgtgtcaggtgtaagatggtatgtgccgggagcctagagagcaatctgtgtgtacagggaatgaatgccattccataccagtggatggtaccatgtatgagtatggcctcactgttgtctattgatttggatcatttctaaaagacgtcagaatctggactgagaaatgttctacaggccagacagaaatctaaaggctgaaatgtcacaagtcatttcagtttgcaaaccccaatctgctctgcattcccctattttaggaattttcaaattagtagtctaaaacttcttacatcaaatagtatattgtattttaatgatttttattcttaaaaagtatgaataatcatattgaaacatgattagtggtaaaagataggaggatagtacacatcactgtcttgatcatgagaccagatgccagatctaaaaataaaaacagtctcaggagatgtcagttttcatcttcctattgagttacaatttagaacagcatttacagattataacagtatatactcacattcagtcccaatcggccttggtttcctgtctttggggaacttttaatgtttttcttaagtgtatattcagttttaccatcttcgttttaaagcaaatgaattttattgctgaggaagttttattgaagtatcgtatcacgttttataataataataaaggcccaaatatgctgtatatagaaataaaagcatttgtacattttatgattaacagatatttaagctatggttccggtcccaaacgattccccttggtagatgttcttcagtatgcattggaatttgcctcaagtaaacctgtttgcacttctcctgttgacgatattgacgctagttccccacctagtggttccataccatcacagacattaccaaggtaaaaagtaatcctgatgcaagagacagttgttacctttattacacaataatgtaactgctgcctttaaagacagtttctataaaatgtatgctttgatttacttcagtgaactcctaagagtagattcacttagaagactgtatgtcctctgggagtttttttattatttcagtagattttatggttatggattaaaattttaatcacattttttttcagttcagaattatactttagcatgttttggtatgtacatatataagattcagcattttatgatccataaaaatagtactatcaaattagaatttgtttctgtaatgtaagctgataagccagggaaaataatatcaccatgcgtaagattttcttgttttttagaaataaatatgattaagctgttttaactctaaagctacaacttcatcttataataatttagttcttatgtattaaaaatctcatttggatgttagatcaatccacatatttctttaagattttttcttttgaattacaagccaatttaatactgtgggtttggcacgatctttgtcaagagtttcagcttgaaaggttaataagaaatactctatgctttgatacagcacaacagaacaacagggagccctatcttcagaactgccaagcacatcaccttcatcagttgctgccatttcatcgagatcagtaatacacaaaccatttactcagtcccggatacctccagatttgcccatgcatccggcaccaaggcacataacggaggaagaactttctgtgctggaaagttgtttacatcgctggaggacagaaatagaaaatgacaccagaggtaagaagtgtctcatagcatggttactgtcacctcagatggatatgtgtaatgttaatattgagaagggaaatcacgtctggattttatatttaaatattatagtcatttttcttttccagaaagggttttaagataaactagtttggctccccatttttataatctcaatatcaggttcacagggaccaaaagattttccctggattgcttagctgattaatgacatagcagatggcctgattttctagtttgctgctctaaatttatatcaaactggtattcacagttactccattggagaaatgtcatacaatatcaatgtttgtacatatcaattaggtactaaatctaagtttgcacagggagttccggtgattaaaaaattttctttgggcttaagaattagaaatgtgaattttaatttttaatagctctaacagatttatgagtatctatgatcccattactagtctgtaacagagtttttactggcatgcagcaaaataagaaaaataaggacagtgctctgggtggggtgtgtgcacttgtgtgcgtgtgcgtgtgtgtgtgtgtgtgtgtgtgtgtgtgtgtgtgtgtgtcaagttgccatctgtcctttcttggaaggaactctcttttattcttttctattctattttttcttttttttcagaataagttattctgaacttttctctttcctactttgctgctgttaaagtgtacttaaaaaaatggattatggtagattttattacatttttttccttaaatgtgaaaatataattccctattatcattccccaattttatgctgatttattgatttttgaaaaaaatgaactatgtgacatggttggaattatattgaacaatattgattgttggatattatatgaccaacttaactctttatagacaatatttgaaaaagaatggccctaatttagtaagaagtacataaggtatgatggtgactaacagcattagtagctgtcaagattttctttagtatttttcaaataagagggaatttttaaaaatatttgaactcattaacaaacattaatcaagcaaatagtgttgatgaagcactatattaggcgttgggtaattttctactcctcatggcaggttgtttttaaaagattacattcagaggagtggaagctaggaagcttttgacacctaagtagtggcattgagggagggaagaagtgaatgtacttaaaatactctttggagacaactgacagatgtgggtcattggctagaggtaagagagagggacgaatcgaatgattctctcagttcataatggtatgaataaccaaatagaatgtattttggaaaaaaggtaaagcagtgggcaaagaggttcccactcaggggaggaaagagaaatatgatgagttctcttttggccattttaagtttgaagagcttttttgagacggagtctcgctctgtcaccaggctggagtgcagtggcatgaactcgggctcactccagcctctgcctcccaggttcaagcgattctcctgcctcagcctcccaagtagctgggattacagttgtgtgccaccacacccaactaatttttgtatttttagtagagatggggtttcaccatgttggccagggtggtctcaatctcttgaccttgttatccgcccacctcagcctcccaaagtgctgggattacaggcgtgagccaccatgcctggctgttaagatttttatatgtaatactatggatcaggaaagaaggttttcctcaggatattttttttctttctttcatccatattgatgttagcagttagcattattttgtaaactattgtgtaatattccaacacacgggtatgatgtaattcatttaattcccatattgatatttcctaaatagtgctggtcttcgatatacatatttatacacttctgtaagtaggatatgttcttttttatgttcaggggtacatgtgcaggtttgctataaaggtaaattacatgtcttgggggtttggtgtaagattatttcatcatgcaggtaataagcacagtacctgataggtggtttttccatcctcaccctgctcccaccctccaccctaatgtaggccccaatatctgttgtttccttatgtccaccatttctggttcagagtgtgtatattttaaattttgacgactgttttaaaattgtcactccaaaacattaaaccagtttgcattcccactgtgtgagagagcctgtctcccagtatcctccctagccctggacactttttagtagtttttcacaattgaaaaactggtattttagtgttttgatttgcattcccttagcttcgagtgaagttggatatttatattgttctgtaaatttcttgtttgtgacatttgcccattttttaagtattgagctatttgtatttttcttattacttaatagaaagtttaatgtattgtggatattaacactttacctataatatcacatatgctgcagatattattttcccagtttttcatttgattttatgttggttttgttttctttttataatgtagattttttaaagtgttgggcagggaggatcttatcttttcctataaggttactagttttctgacaggcttaagacaggtctttccccactctaaagttagccagtttcttttatagtttttcaaggtttcttcctgattggttcagcagcttcacaatatgatgtggttacaatctaaccgtttccttattgacagatatttaggttatctcttttttaaaaattattgtggacaatatgactgtgaacatccctatctgaacaattttgtaggattattttctactagaagtagaaataattgtcatgggagtgccataattttattttcactggtgattatagtcgatttttattcagttatgtgtgtgtacaagatatgtggtgaacatgttttactttgttcttaagtttacttgtgttatagcaatatgtaaggaagcttagctttcattttcattgaaactctcctttatagatttgaacaaaattcacttttattggctctgcacattttctagataaatcatatttgtgttgtttttaaagtatgcatttgtactgtgtcttttattaagaataactataattcattttctacagatttcaaatggtaatgttttttaagaaaagttttaggaaaattttcctattcctctaacatgtttgtaggaaaaacattagtccttatcttataagtagaaacacatttgctgttaatcattaaatgacaccttatatccttagatttgcaggaaagcatatccagaatccatcgaacaattgaattaatgtactctgacaaatctatgatacaagtaagtgaaattttgagctagtaatcattgtcaaaattatttacatatattttaatttacctttacattatcttaatctaatttttctttacatgttttgttttaaaattttggcaaatcttattgtaaaataataagggcttgcaatatgtacaatgtgacagttcatctgaatggggaaacttttataacaaatttataacaaaattcatgacaagttttccccattcagttgtattttcacaccgtatgtgttgtgtacccttactattttacagtaaaatctaccaaagtttttcaaaaggctatagcatctttaaaaagtcttatgggagaaaatctatggttgttaaaggatattaagatttgggaagaaacttaaggactccattacattttaacttctggtgtatatcatataatctattttgttaaccgtcaatttagaattctgaagatgtagacacatttgctatatgtaaaactgcccactataagctttttattcaaataaacaattaggccaatgagtatgtacacaataaatacatttttagtttttcaaaaatcatctttttaatctatcaactttgcatatctttagcttattcagattccgtctttttaaagttttatagtttagtttttttcaaacttttaagcccagccagttctctctcatttaaaaaaaaaaatgctcttatggttttctccaaacaggttgtttgtggatttcatggaatgtggtatatagtaaactacataattgcagtttaactcttctttttttcacatttaggttccttatcgattacatgccgttttagttcacgaaggccaagctaatgctgggcactactgggcatatatttttgatcatcgtgaaagcagatggatgaagtacaatgatattgctgtgacaaaatcatcatgggaagagctagtgagggactcttttggtggttatagaaatgccagtgcatactgtttaatgtacataaatgataaggcacagttcctaatacaaggtaagaatatatagggtggtgtgtatttttaaatagtcataaaagtggctctggtatgtggtgtgattagttaagtgtaattcactcagacgatgaaggatgtggttaggaaatgctactgggttttgacaagactgaattgaaaagtaatgtcgtcagggctaagaattcgtatatattttgtattccaagtcaactattaaaggtaaatatgacctttttcgtccttgctaaaaatgctttagtgactgttccacagattgactcacatttaatatttaattccttagcctaacatatatggcctctgttcttggcctctgattatctccccaccttcattgatcaccagtgttccttttgaatttatatccttactgaacttcttgctgtatctgctcatatcaaaccatttcacacatttatgtttgcatgttcgtatatgttttattttttgctagtaattcttttgcctaattcttgtttatctgtcaagattcaattcaggtgtcatttcccctgcaaactatttcttgatctgccaaaaagtatctctccttatgctgtcctggcatctgtctactgggcatttactgttgtgtattggaactgtgtgatgacttgtcttgcacatttctctcttatctgctcagagccagagatcatgtcatactatgtctgaatctttttaatgctgatattctgatatatgctttgcatatagaaaataataaaggtttattgaaactgataaaaataatctttttatatttagtcattcagaatcagctaggcagtccacttctgactaaaaaaatgaagttatttttctgtgtgtgtagtagaagttcagtaattcttctgaatactctattgtttttaagatcttgctatattaattttcataattgcatatttaagtctacttaatttcttcatatgacaaacaattttcattttattttgagctaataaggttaacatgattatgagttgtttacattttgtgaaaagttttactttttaagtgatcaaacatctggtattttccaatagtggcagaagtagtattacatcactgttagagtagcaaagaaaaaaaaaaatggccgggcgcggtggcttatgcctgtaatcccagcactttgggaggccaaggtgggcagatcatgaggtcaggagatcgagaccatcctggctaacacagtgaaaccccattctactaaaaatacaaaaaaattagccgggcttggtggtgggcacctgtagtctcagctacccgggaggctgaggcgggagaatcgtctgaacccggaaggcggaggttgcagtgagccgagattgtgtcactgcactccagcctgagtgacagcatgacactctgtctcaaaaaaacaaacaacaacagcaacaaaaaacttggctttggctttgtattttctgtcacttctactcttaagataaaaaaaaatctgagaccattacctatgatggattatcaaatattttcatcattgtttttctgagcatttgtttgagttttaaaaagttttgtagataataattatttgctaagcaatagtaattcttaagtaatatgattggctgagtggtaataattcatagtttaaattctatttgaaatgcagtctattttgagctttgcattttccctttaattcttaattttatactagtttttgaaatatgatttgcagaggagtttaataaagaaactgggcagccccttgttggtatagaaacattaccaccggatttgagagattttgttgaggaagacaaccaacgatttgaaaaagaactagaagaatgggatgcacaacttgcccagaaagctttgcaggaaaagcttttagcgtctcagaaattgagagagtcagagacttctgtgacaacaggtttgtccatttttattaagttgtgtttgattatcaatattatttttataataagatatgctcattattaaaaagttttagctatcttaaagtgtgaggaaatcagtagaaatcatttcaaattccatcactcagattatcacagttaacaatttagtttacctttttgccagacaccactgtatatatttatatgtttttcaagataaatgagataattctgttgactttccctctacctactctgcctgtgttgggtgggcttgaattttcttggcaagtagcagagaaagctgtgaaatcagcaagaaacccaaaccaattcactaaagctatcaagagtatcaattcaataaagctatcaagagtatcaattcaataaagctatcaagagtagtaattttaaatttggccaaaataatactaccggtatattcatatatactttgtgcaatagtaaaatactaccattaataactatttgatgtttttcggaattcttaagattaagagaaaattgaccaaaactatttagtatatcacaggtaaaaagtaagtgtatagacctgtaaaccaaagatataaatgcataaacatataaatatttaaaaacattattctgaaatgaactattagctgatgaaatcaataagtcaaagtaaacactgtataggaattaagaaaatagtttctagtaaaattgaaaatatattgtctttttattttcttaaaagattactcttcactgagttgcaaatatgttttagggcaacatgttttctggtatagaaaatgctatttctcagagaagctataaattaagcgcatatattttcctcaaactcatttgtctctttttataactgctagtggatattattgaataactttttttttttgcaagatctgcatgttttgtgttttaaggaagtagttccagcttttgtttgtttaatttcatctttcgcagacagaggtttccttgcagcattacctggttgggcttcagcattatcatttgaactttagaaggaattattacttcaatagaagattgttttacagtgctacaatgtagtattgtgactgtcgcaggcatgcacaaatctgtccagatacttaacttattttcatgtagatcaaataattgtcgttgattttgatcctgagaggcagataattcagcattttttaaaaagataatggtatcacagcaacatttggatactacagtgctatggagaataccaccattatagtggctggtgaactctaccattatgtagggctgcacttttcccccacgtgtacaaggctaccgcgtagagcaggtgaagctatgtgggtccacaacaatgtagtttttagtagatgtcaagaggtatctaagctcaaatcacagtgtagtaactatattatagttcctttcatttttaaaacatttctgtccctttgtgatttcatgctttgcattctgtacatattctttccaaatcactcctcagaacctgccccaagatggagctactgtgttattgttcccttaacatttacttattccattcacatgtgactattcttgttattagtgggaggaaggggctgcatagtgtactataagcagttgtggtacctaagctcccagacacaggtgaatcctccattcattggttaagctccagttttattcttggctcacctatattttgtgataccaaaatattaagttctatatatcctcctcctcttcatcctgtctgtttctcatctctccaaattttcagagttaacatattttatttctgcttagtcaaacgaatacatatttccaactaatattcctatctattaaggactagccttgccccatcctcattttacatttgtcatcttttttctttctctgtgaaaagaccatgtgtgcataactgcatccattttcatgatcaatacatctgaccatacactttacatggtgttttgtaatttttaaaaaatgcagtactaggtattggacatatattttcatgtctgtttttaccatgcaaaataatcttagaatgttgatatatttctgggaggaaccagaataaaagatgaagagatggaaatggtcaattcctattcctagataacttttatagttacctttcagcgtgggttatttagaaagcagtggtaatactacttctgtaggaaacattgtatcctccatagacttgacggaaatatgcacttggtttgaattagtagaagtagaacatgccaagtccataaatttacagagtgagattgttgtttaaaagattggtttctattactgttatctttgagattatattaagaaatttgttctctgttgcaggatagtttcacatatcataattgaataagactaatgtttcattagaaccatttattccctattattaatagggaaattttattttaatgtccatgccatcctcttctgattcttctcatggttttcaaagtaagtaatttaatttggtataatacttccaggatctcaaagcaaatctgtattttaatctctcaggtgttcactagtattaccagtgactagtggaaataataaaaggaaatcttgttcataaaatccaacagaatgatttttttcctccctgcaaaatcttctcgttaaagctgaaacataagacctcataaaattcaatttctactgagtgatattccaattaagagtactaattcatattatattaatcaaattagtatttgttcctcttctgctaaaatgtgatcgagaaattcatgcgtatcagttcaccagcaccattcgttccctactgagataataaatgatgggaaagtattttttggttcatttcatgctgcttccctagatctgcttactgcaaaggcaaacttacctgaatacttttgttgagattttcagccagccattctttgctgtcagtgtggggatcagaatgagtaggggagcaaacttacctgaatactgttgttgagattttcagccagccattctttgctgtcagtgtggggatcagaatgagtaggggagcaaacttacctgaatactgttgttgagattttcagccagccattctttgctgtcagtgtggggatcagaatgagtaggggagcaaacttacctgaatactgttgttgagattttcagccagccattctttgctgtcagtgtgtggatcagagtgagtaggggagcaaacttacctgaatactgttgttgagattttcagccagccatcctttgctgtcagtgtgtggatcagaatgagtaggggagcaaacttacctgaatactgttgttgagattttcagccagccatcctttgctgtcagtgtagggaacagagtgagtaggggagcaaacttacctgaatactgttgttgagattttcagccagccatcctttgctgtcagtgtgtggatcagagtgagtaggggagcaaacttacctgaatactgttgttgagattttcagccagccatcctttgctgtcagtgtgtggatcagagtgagtaggggagcaaacttacctgcatactgttgttgagattttcagccagccatcctttgctgtcagtgtgtggatcagagtgagtaggggagcaaacttacctgaatactgttgttgagattttcagccagccatcctttgctgtcagtgtgtggatcagagtgagtaggggagcaaacttacctgaatactgttgttgagattttcagccagccatcctttgctgtcagtgtgtggatcagagtgagtaggggagcaaacttacctgaatactgttgttgagattttcagccagccatcctttgctgtcagtgtggggatcagagtgagtagggtttttttttctgagtgtgaacagcacaccctacctaaggccacttaagagacactggagtcagaatctctggagaaaggatctgatacagtgctatcttaaagagatcttcagataattctgaggttaagcagcatggctctaggctgtatttataaaacagaaattatgctggagagaagagcgttgtccgagttactattttacttatattactcttgtcttatccaagaagtatctgaagtccttacaatatagcacacccagatttctttaaaaaataaggaaacactagtgaagattggaatgaagtgtattgcgtaaggttttataaatttctctagaggaagcaggcagagttggctctggaacttctctacactgtctacaagttaaaaataagctgatgttccaggagagtacggttggatcctgagagtaagacctggtagaataaacagtatcgtcagtgttctcagattccttgaaagcaggaactaggtgatattcttttttttttttctgagacagtttcactttgttgcccaggctgaagtgcagtggcatgatcttagctcactgcctgccgggttcaagcaattcttgtgcctcagcctcctgagtagctgagactacaggcatataccaccacactgggctgatttttttgtattttagtagagacaaggcttcaccatgttgatcagtcttgaactcaaattcctgagctcaggcagtcctcccacctcagcctcccaaagtgctaggattacaggcatgaagccaccatgccaggcctggtggtgttcttatttatatctccagcatctagtataataaacgacatatgatagatgttccttgaaagttttctgttaataagttcattccctatggagatttccaataatgaatttcttaggggtgatcctcagtgtaggagaacataaaattttaaagtagaaacaaaatagtcacacaataaggaggcaggccaaatacatggggtgaggatgtagctctttgtcccggataaatttatggtttgactctggtttctaaacctctctcccccacacccctcagactttcttcggaatggggcccaggaatctgaagtttcaaaaattccaccagcgattctatgcaaccacctaagcgtggctctttgtaggctcttacagggtattgtggacttttaaatacatttctagaaatggatgcactgtgtatctctcaagcagtccgctttaaatcttcttcagtgtgaacgtaataagtattgacttactagtaagtcaaaaaaataaagacttctgaaagatatcagagatgttggtcttatttttatagttaagagcaacccttactctttaatagaaagccaattggtggtaaagttgaccttcttaaaagattgaagaccataaccaggaaatatgcataagtaaagcacccccaaacctcctcaatagcctgtttcaacatgaagatggacaaaaggagcagactcagagttccctcagaatgttgagttgtcttctataacagctagagaagcatggccggaaaatcactctgtggaggccagtcatttgaaaatcctagagaaatacccatagaacagatgagtgattggagagagactttaggaataaggatattatttacctccatagagaactggtcattcatggtgaaatgagtgcatttaaattttttgtttgtttgtttccagtctcccagggtttcaaaccattgtgggtttacctaccgtgactacaacaccactcatctaagttccctgggaggtatatacacagggaaaaccctagagaaaattgttctgtatggcatttagggaatttatagctgtgggccactagtgatggggtttttaatagggttagaggatgaacaacaattgtattatatggtaaaagccgaacttgttctgctgttgttcctaacacagaaatagaaattactaaagtgtatggtagggtattagttgcgtgagccttccatacagaacaacacaatataaccagtacatgttacattgaatagagagtaattctttttgtttaaaaatatgagtaggtaggtacagtctggaaataatgtatcagaaatattaatagtgcttatctctgagtaatgcaaagagttttaaattttccacatttttcttgtttgttctagtaaacatttttattctttggtttgataaattgaagacaaaacctctttttttgtcttctttgacagtttttttatacggactttattttataatctgattcccttgtaattcttctaagaccacttccctgtgagtagcctgtgtttcatctacaccagattactcatcgtttctattgcatataggaaattttcctgtcattatggcatgttcatgaagtatccttcatcttaaaaatgttcttttatctttagtgttcatgaattttttcatattctttaagatcttcctcatatcccagagtctttgtgagtttctctgagagcacttctctagtagctattgtcttttccctcttaattccaaccttttcttactaccaaatgtattatgttcttctctattgtacttatattttggcttgccttccagtgtagagtctcatatatagcagggattttatgaatctttgatcagaccttacaatgtgctattccttctgcctggaatcttttctattcttttctccaagataatcctctacaaatccttcaagactcatctaagttagcacctcttctagaaagtgtttcttaacaggcagcattatctcaagtatgtgtattgggtccacagtgcttttataaaaccttgtgcgtaacttttattgaatttagcacattgtattataatagaatgtatatttatcagattttactcagagttccttaaaattagtgaagtatgtaatcttttttgttttttatatttttaatacctaatatagtactgaaaatggcacaggttcaataaacatgttgggaatgcaatttgaattttttgtttccaatctcccagggtgtcaaatattgtaggttcaactcccgtgacaacgaaaccactcacttaagttccctaggaggtatatacatagggcaaaccccagagaaaattgttctgtatgacatttagccagaagcattcagtgttactcataacgtttttgtactcaaactcctttatggaaggaaaccttggccctggtgacctaaggtggatttgacatgtgttgatcagataacattactcttggtcctaagaaccaattttacaaagattctaggtttcagtgggtcattagaccaatgtcagaccagatggatttattgctttaagttcacatccaattattaaccgttgacattatctgctatggtgaagagaggaagagtgccaaacacaaggaaaagttttatcaacaaggagtttctctcccagccctaaagcagctggcatgagccacctatcatgaagtcttccagaagcagaagtattgctaagctgatggtagccaaagattttctttatctattactcatgggcattgaaaggctattgcagtccaaaatcaggaaatgatttaatgaggacattaaacttcttttaacttctctccttcctttttgtacacattgtaagcatcctcacctctggttttccttatcacatagttttacctccatgatcttagttaactctgtcaaaaacttggtgtgttcatgtgcagtctccacacctttgtgtccaaaatatgtcttgattctagccaattttgtgtccccctgttgctctctctcttaatcagaaagcacatttatttctttttcatgttgctctactgccttctattaccttcaccgatctctagttttactttcctctctaattcgttcttcacaatatccccagaataattttttaaaaactgctatgttgccattatattatgtactatattatatacctgcatcatctcttgccatttctccactctcatactgtagtccagtcatattattcttttttttgaatgtagtccatgcttactgcatggactctccattcttccacctggaaaaacagctcattcattattcagcttaataggtcactttaggtcacatccaaattgctcacatcacttcactgccattgttcccatataaagtgttataatattgtcaaaatttatatatatgattatttggttagtggtgttctccacagatgactgtgagcttcatggagacagagactggctgctttgtcagagactcactgagataaaccctttaggtcatgtaaggattttgggcttgtctcatctagggaacacccagtggatgttcattgtacattgttggatatataagtctggaactcaaaagatggataggagatatcgtgaatttttattggtaccagtttgcctttcctctgacaacactcagctactggggcaagtacagaaaagatggaaggttaggttcattcagggttaagattttgtcaggaagtgtgaaggaagatgctgtggccagagaaaaatagctcctgtgcactctatggaaagtcagcccaagattgctgttcaaaccaaattcttttggtaaaatgctggcaattttccaaaatgagcttttgttatttctcatggcagaaaaatttactgtgaattccttaccataaactataatgagagctttctttcataattattggagtactcttagttctgggtttttgttttttaataaattctgggaagaagtgctatacgtggaaagatatattttactttgaatggaagactaaaattggttcttacataacttcagacatagaaatgaataaaagatttatcttagtatagactctgtggtttatattagatatataattgattcttttctcatgaagcacaagcagcaggagacccagaatatctagagcagccatcaagaagtgatttctcaaagcacttgaaagaagaaactattcaaataattaccaaggcatcacatgagcatgaagataaaagtcctgaaacagttttgcagtcggtaagaacttttcttttggctctctgaacatagccatggtcacgacatttcctccagtatagtggagagggacctgtcagggagtcaggagagacggggcccagtgatggctctgccatgggcatgatcagtgaccatgggcaagtcatctcatgcccaggctgtgatttcctcagctgtgattttaaagacacttttctcttaagtttctgtctttctgctagagaattctaatgaatcataatcatagattaaattgaccatttgatctggaacttaaaaagagaagtgtaaaatttagcagtatttctcctgtctctcacccattcctccatctgtaatctgattacatgggaatagttgagaatttaagacctaattgtcataatttcatgaaatgtgtttaacaataaaactactagatactgtagattagagtattatttaaaactactagatactgtagattagagtattattagaaggataagtaggatgttgcaaaactgtttgtgaatattttaagaacgtcctgtgcaaaaacgtcattaggctactctattgtagttttcaactacatctttttatagcggtaaattgagcatgtttggtgttatactgtgttatcagtgaatatggcattctgagagaagctatttcaagaatttgttactactaaaccttttagttcctgtagtcatttatcttttattagtgagcataagcagctctaatgcagattttgtggtagttccttttaatatttgaagattccccttgacaactaaaaagagtacgacatatcataattttacaacacgtaattttctgcttagtaagtgaattcagtgccagcaataacctgctaattgcaatgaggccttaaatatataataagacttcctttagccaaaatgttcaagagatatggtactctgttaattttgttttgatgaactaaataacaatacaaattattttttgtttgaacaattttgaaaatgtattaatatatcatcttattaaaatgtattaatttaaatagatatttgatgattccaaattttgcaaatgccttagaagctttaaatgaatttgatgtgaacatcactaactctaaagcttttcctggaaaatgctttgtttagtggatctgggatgtctgcttcttgggtgatggtaagaggaaaacctagggaaggagaaagaacagaggagtaggtacaaggggaaatagttttgtctgacaaaaactgcatttgcaaggcctctgctaattagaacttttatttgttaaaggcctaaattatgattaatgagtgtcactttttaagctggtattagaaaaccaaaagcattacttagcttaatgtagaatcctgattttaagtttggaaaatcatatggaatttaaatttgcagaagtcagctaaattttgattgctcagcttcataatatggatatcgtcttataaggtagcaacctactacctcatctttacttcagaaaggaggatgacagggagactatatgatatagacaaatacactatttgtctattcatttaattgttttctggagtggcatccacagttagccccattgcatatgtaaatcctgaagcaagtctgagaattcattaaccgtggcttgatcttacagtcagttgcttagcgtcatggtaactacttcatagcggtttttttcatttaaacttagcgtacactagaagctaaattgcacaggtgaaaagtatcttcagactttgggattaaacatttctggattttggaatattagttttatttattatgaatgcaaccttgaataaattgccaaatttctccagatagacctcagtcttcttttccataaaatgaaggtaattgtaggattagtcaagagcattatttgtaagtgcctggcatggcatgtagtaggcactgagtaactgttggtttccttctgttacatcagtcctagccgcttttcaaatatgcaatatattaaaatcaactttaatataagaaaaatttcctggaaagcgtagaatcatggaaattagagaaagtcttcaagtgtttaggcaccctgctttttagaaaaatgtctttaattttaaatggaatacttaggatattttcaatatagaagagtagaccctgagaaaaagtcatgcatagtcccactcactactcatagttaattattgtaaatatgttggtatttatttcacttttattttaatatgtagatttgggatttatttttatagttgagttgcatacaaaattttgtgttgccttcttttaatcacttaccttttataaccatttccccatgttgtaaactcagtgaaaacatttagtggctgagtattattccattgaataattaacttcttgtttatgtatctgctactcaatcgtatatttgtgtctacttttacattataaataggctgctagaaatgaaaacttttttcatatttcaggttatttccttagaatagatttcccatgctagaaatgaaaacttttttcatatttcaggttatttccttagaatagatttcccatggttgaattactagcttaaaaggtaaaggcacattaatgtggccgtggacttagatagcttttttgtcacccttcttatgagaccactttttaagaagtcatataattaatggatttcaggcaagtcataaaaatcttcgtattttaattatttttgcagcatattaactgagaaacttatttttaactcttttcaagtttagcctttgttaatgtattcatataagacctgaaaacaatagaaaaagataaataaacatgtattttactctagtgagcccttaaattctttacatggaaaatttttatggtactttgggatatctaaatttggcaaatgatactacagaattattatatgtggcaaagtttcttccccctttcagcttttacccatgtatttaatcagcattatgctgttgaaattcttcaatagtaactgaaaaggtttataaaacatttatgttccctaagtgcaatttttttcccccaaagggaatctgttttgtaaggattaatattctaagtgataaccatttgcttcaaatttatattttcttttcctaagatagaattgttttggattggtttgctagtgagaaatcatcaccacaaactccgaacagatttctgaatttacctgtttatatttcactcttgtgtacagagacctagcacagttcgtctcttatatgctagaaagattaaaaatccttaattaaatgtcatggaccaagcacatctctgtagaatgtgtgtgatagtagtattaggttaaaattattcaaatataaacaatttaaagtagcacaacaaagtagtacaatgactcatagctgtcattttatagaacagccgttacatacctggtgttggcttagctgcatattatctctcatgatcatgatacctgttcatgctgatcatttcctgttgaaaagttgtggattttgataaattaaggataagttgtggattttgatatatgtgtgtgtgtgtgtgtatatatatatatatatatatatatatatatatatattttttttttttttttttttttgagacagagtcttactctgtaacccaggctggagtgcagtggtgcagtctcagctctctgcaacctccgcctcccaggttcaagcaattctcatgcctcagcttcccaagtagctgggattacaggcatgtgccaccatgcctggctaatctttgtatatttagtagggacggatttcgccatgttggctaggctgatctccagctactgacctcaagtgatacgcccatcttgacctcccaaactgctgggattataggtctaagctaccacgccatgccaaaaatagtgtttattttaaaaggggcagtaccagttgcagctattggttttgttttgttttattgttcagttaaactctttttctatatatgcttccaggaagccaggaaatgttcacattgctaaaatttacccatatttctaatggaaatgaaacctctttaattgctgttataaaaatgttttttgtaatatcaaaacaaaagtttatctttgtgtatgaaaacttatgcaattcagttacttaagttgttttcaagcaccttcagtacttttggcttttttaataggtaaatagtggatatgctagttataaatatgttgaataagataaataagtatgtaaacatctgtatggtattttgaatgaatcatattagtgtcatgaagttttgaatgaaattttctgaattttacactgacttctgtattagtgtagattactgaaatacatagaatttgttaacaataaaaagaaaaaaaggaataaatctgattgagttgttaaaaatgggtatcagcttccaacagctttttcttattttcagcaggtgtttgttgaacacttaagatataaatatactggagcctcataggctgtatataataagttaaacaaaatagaatatggatattaactggatacacaattgattaccaaaaacaatagaaggataaaattataaggaaaaaaaccctacaaattctgatgagtttagaggaggtcatatcttattttggttgagatatcaagaaaggtttttgggagctattggactttttaaaaaattgtcagctatacagacaataatagaaaatacaactccactattttttatcttaagtacttaaagttctaaatactttcagggaaaaatgtaatgatattggtaatacccagtttgaggatgtaaagggaaaactgcagattttgtattactacttgatgaatgcatttgcttctgatgttcagttttaagtggtttcatttgataccaagtcaatgcaggtatttttaaaagatttaagagtatgtgcttaaacagtttaatagtgcatgtgcgttggaacttttaaaaataagtcatatggatacagggctgctgcttagggatgtgcaggttatacagttgtgcaaggatgccattgttctccactgttctcttttctaatgtttatattaatgatttccttctgcagaaacctgaaaatactacaagccaaccactttctaatcagcgagttgtagaggtggcgatccctcatgtagggaaatttatgattgaatcaaaggagggggggtatgatgacgaggtaccttttacagccctctgcaccattgctacttaacttttgctatttaatacaaatactttgggcatgcctgcaccctcatacttaatgtctattgccacataacatacagctttgccccctcatagtccaaaattactttaccaattattaacagaactttgaatttcaaatgaaaatttaagtagaaaacttatggaatttgtcaaaagaattttctgtttgtggagttaattcttttatgcagaaatagtaccagtttacttccaggttggcagattacaataagatttgtttaattagtacaaaaattttttgcatttaaaaataattttttatattccattcttgttttactggaattacttataatccttttcccactatctcctgccagaaaatcccacagcatgattgcaggatggataattgatatttttgcttctacagcctctccatgtgactgtgagtggagtaagtcatcaccgttactgagtgcctaccgttaataggacctccatgtttattcttatctcttcactgttaattctcatttacttagttttccaacagtatggaggcatttttgtttttcatgatttagttctttggaatccagatgaaaatgatctattgtcttattctatcagatgattttctccccttttccacttttctcttgagacacttaatattactctttttgaggaacggccagtaaagctgtttttgaacaggaacacagaggaggccgtaactattgggtagtgggggaggggggtgatttggaaaaatgcttgttggattctagtttttgtgggtttgtataagaattgcatttatgttaagttttttttcacgtaactttttttctgacttactccaatgttactatcatgctagagttaatcaccaaagtcagaagtgtcataaagacatatcactgtaccagtgtaagaaatcacacgccataaagagaataagcagatttgtgagataaactggtcagagagttttctcaagcaggtgttagatatattgcaattctcagtatataatccaaagtaaatacaatgagtaataggttcagtgaatcagaggtgacggaggcaatctcttgatttctgtaagatagcttcatagggctttgagtaatttcactttgcagatattttaaaatgtaaacagctaaaaataataagctattatgaaaacaaaaaaaatgcttaagtatttgtacttaatggctctacattgttctagttaactattttataaacatgctggctcttgaaaattatgggaactggcatgtttttaataaacctatcaatttattgattaagcagttaagtacttgttttaggatgtgccctctctcatttaaaaaagttgaattgtgattaatcatttaacactatcttttttgcaagtgcttatgtgacagagttgtgtgttttgtcgttttttaaaatttattgcagtgacagtttaacagtgcatgtgcattggaacttttaaaaatgagttgttatggatacagggctgctgttcagggatgtgcaggttgtacagttctgcaaggatgactagacaaggggcagaagtgggaagcaaattgagttcatgatgagctctctgaggcttgaggaagaggtaccttttttaattggtaaaaagggatgttgctttttctaaatagttcactcagaggatagcacatttttctaatttgtttgtctagaagcagggtgcctttttcaaattctccaattcagagaggatgcctttttgcagtttgcacaaaggctccgtatgagccagctgtgccctgtatggatgatcttaaaaggtgcttacatgcatattggattaaatttggtattaaaagtgcaacatttgatttataaatatggaaaacaaaagagtttcagcttgcatgtgaataaattattttagtttaaaaacctttttttaatgttaactatcttctgtggcagatcatgatgacaccgaacatgcaaggtattatcatggcgataggtaaatccaggagtgtatatgacaggtgtggccctgaagcagggttctttaaggtacaatgaacattttcattttcgtgtcttttctttttcaaaattaaacttcttaaaatattttatttctttgaattcagtttggttttctgtataatttctcttttcctatcttagttatggccaccggatatcctagggttttattttatgtattaattaacctaatactgattgtttttctcttaatccaggtaattcaagaaaaaaatctttttatttgagtcactctaatagtgtgcttttgatttgtcagcagaaatttgaattgtattttttatttgaagggaatgaggacattaatgaacaataataagaactgagtaaattgccctggtaatagtttattttatcttcattgttcatattattggtcaatatcataatattctttaattttattatcattaggtactaaattgctttttcgtttataaaatgatttatttattatattatttttgttatgtttccccataattaatttttgataacctagtcagttcaagacatgtgagaacatcaagctgaacacgattccatgatttacccacatctttttccctctaatatcagagctttacaatgttttgattacaattttttccttttacagatttgaaagatgaaaataccatgtatgttttgtcattttatttacattaactgaaaatcttcaagtttttttttttttcactcttttcaaacccttcttagtggttttaaaaagcagcttttttgaggtccagtttgctacagtgaactatgcatttctttctttttgacattaaaaatctaacatttttcattttctgtattttgccattatccaacttggtctttcaaaaactggttcttttttcactgtttctttcagtatacagtacaaaacaaaagccttgtacatagtagtagacctatcaataagcatttttgagtttgctaagattagggtgactaactctcctgatatgcccgggactgagggatttcctggactacaggatttaaagtgctaaactgggaaagttctaagcaaactggtcccaggacaagttgatcaccctattatgatcccataagaaaggttgaaaatctacttctaaaaaaagaagaaaaatgtattttttatagttttctgttttaatacatttctttatagtttctaggtttctaactggcttcctaatttttaccattagaaattccttcttatgcccagatagtctacattttcttttcttaaaaaaaaaacactgaatatatgtcctctaaagtatttatttcttgtggaaaagttatttatgatttacagtgccattgtcatttctgaccagattgggtcttcttatgttgaattgcaaatctcatttttattaagttaatatctgcatataaataatcacctaattgtatatattacaacagttagtaagcccccagtggataatgactttcagttatttaatctgtttggcattaattcatatctttaaatagaatatttgggttttttattcacagtttacacattacctgttgaatttgcttctgtggaatatgaatgatgagctctctttcttttcctgcgtcgcatacatacactgagagacacagctcctatcccccatacacacacacacacacacacacacgtaaaatcttgtaattttgattatatcagaattctgcatttgtaatattattatgtatgctatatgtgattgagttatattataaatattactactttctgtttttcccttaacttttgttttccttaaacttagttgttttgttttttggtttgcttagtttatgtgtattactgatttagttcaaagctgtccactgcttgtttaaatctcctctcattctgcctttaccagttttatcttcttgggacatctattctggagctttatgacctgccccaatctgtattggtttttcttttctcctgatccataactagtaacttgagatctcctttcaccatcattctggggattccctttgcatcctttcctttgtgtattttccatatttcatatatttttctttattggtttgctctatgattttgatagtacagcaagaaagcatgggcaagaatcaagtttgtggaagagggacagagcattttcttaaataagttatgttatattgcaactctcagcacataatctaaataaatactgtggttaataaacttcagtgaatctgaggtaaaagttttcaagttgctttggagattgagtcgaatttgacgttttactcatagcataaggaaactgtgctctttgtcagatgttaaaaataattactacagaatttctatttcactaaccattctccttactatcatcatactccctttcttgcttttttttttctgctggaaaaacacttacaagaatagtgggaatgtacattaggaaggaagtagtttatatgttgatattagcagccagactgcctgggccgactgctttctagctttgattttgggcaaattattcaatctttgtatctcagtttcccgaggtgttaaataactatttattttattgagtcattgtgagctttaaataaattgtatcaatgttacgcttttaaagtagtatctggttgatagtaaatgctcagaatttagctgttattgttgttagtattatcacgaagcttatcttatgtgtccagttctggtccacatatagtcggagatgaaaaatgagaaaaatgaatgtgccatatctgtgtcaaggacctttatttgctaatagaatttttttaactcatttgttagaaattgtcagtaccattttggagtaacaaaattagcagttttgtttggcttaacctaataattactatcataaaaccctctttctacctttttatgtctttagtgtgtgtatatgtttataaaatttctgaagtttgtgtacatttgcacctatctgtgattgagtaatacatgagtgtaacccctttatgtaaacatacatcaagttgtttctaattaatgcatgtttttggtaaaggtagaagcatttggacacaactctagctgataatatgtcaccttaaaaattttttcgtataaaaaatgaaagtaatgtatacaaaatgcagttgtattcagtaatatagaggtgtctaaaataaaactaacaatgacagtctctgccactgccatggccctattgtaaccattcttagcactgtgtatcttgtttttttctttttgtttataacaatgcacatatacagagacttaaaatttttttaatgtagattttactgttcataatattttgtaacttatatcactcagaaatctattgtgggcttaaagtttagacagtatcacattatctttactagctgtctgtatacacacatacacatgtgtacacatgtgtacacacaggtacacacatgtacacgcacacgtgtacacatacatgtacacacacatgcacacatgtacacccacacagtattccatgctatagatatattctcatttcttgtatcttaccctctttatggacatgtgtcctatattttctcccagtctaccatttctatttgaattagtttagagtactttttcttaaacaggttttaaaatagtatgttcgttttcctactttatggattttttttgccatattaaaagatctactcttacccaaagttatataaattttcccactacttacttaaaatacttttcttagtaaatttttattttttaaattcaaatgcttactgtttaactcattagcattttatttgggctttctgcgttctgtattaaatgaatttggtgtttttctattttgtgctgtcttcatcaagtttgcaattagggttatgttagctttggtaaatgaatttgagagctttcctgttttttttaatacttaaccgtgttagcgttggaatgatctgttctgttagttagaactcactcgtaagatcatacgagcctagcgccttcttgcggggtagatcttttaacacatttttttggttcattccatagttattggcatgtttaaatattcttcctttttttgattgattctaatcatcatcatcattcagtattaattcataaaatatgtacacaccatagaatctaacatatggttgctgcttctgtcttcctgtttcccctcaattagatatagtatttttaaatttttgttcttttttgtgcttagtgtattataaattgagggaaaagttgtttgttttgttttgttttgttttgtttgaggcaaagtctcactctgtcgcccaggctggagtgcagtggtgcgatcttggctcactgcaacctctgcctcccaggttcgagcagttctcctgcctcagcctcctgagtagctgagactacaggggcccgccaccacacccaggtaatttttgtatttttagtagagacggggtttcaccatattggccaggctggcctcaaactcctgaccttgtgatctgccctcttcggcctcccaaagtgctgggattacagatgtgagccaccacgcccggccgtgtttttgtttttttttaatatctcttctgtcctgccacgtcctgaaaaaatcttggtcgggtctattttacattagctttttggctatgaaagaaagctttttaactctgtgcctgtttaggtacttctgaatatggatttccttatgtattatgattagaccaactttttaatactctgaatgtttgctagtgataagaatagtgatgccactgtcagccttgttataagaaacttaggtctgagtaagtggacttgctaaagtttaacctccgaattaggaagttaccaacccagtcataggaactctttcaaccacaggccatcatcccacgtgaacgtctacccaataagaatgcagtatgaaaaagttaataggcaaagttgatctggaaaaaaaaatgcaatgggctacactacactaacttgagtccttcttcaaattgactttaatggttaaaactagtttctactatagaaaatccccaaataatagtggcttacggagagaagattctgttgtgtaaaaatgaaattcagaggaaagcaatacaaagttactatgataagcaaaaataaaagccagaagataaaaacaaaatattttcaaagtactcgttgcttgtatatatgtgtagaggtgggagggtcatattataattacaattatgggattagtgtaagttttttcatttattttaaaagacattaaaatttctttttttgtaaaaattttgtcggtatcaaagtacccttagggttttattgaagtaatacttttgtattataaaaattttttcttaatagttgtttcattgcttcataataatggtgtccctacttgccgtaactttatcacccttttttgcttttgaaatgtctcttaatcaccttgtttattcaatagatataaaaatgtttattagaatataaaacatgttgaaaagtacaactcggtgaatttttttttgagtgatactttccttatttacatggcctttaaggaatgtgaagaggaagaattatttatcaacatggtattaatgaaatcttgttccctaaaggtatacgcaggcctaaatcgttaatgcaaaaaatatacttctccatgcatcttgttaaattcaagacagcggtccaacatttccatgcttagccaaagaagactcttttcctcttggttgtgtacatttgtagcctgagttttaagtgccacatctttcaagtcagttacacatcctgcctttaggctctcagacttgtacttccaactctgggttatcacagtgtgtgtttacccatgtgaccaccaactaggccaagaggtagaacaggagtactccagaagtaccttttttccgccttcccatcactacagtctgtccgtacccaaaagtagccattatctggacttctaacaacatacgttagttttcttgttggcctttatacacttggcatcttttactctaggtccttttttgtctgactgcttttactcaacagtgtgtttggagcttcatccatgttatacagttgtcatttcttccctctcatggtattttgttgtatgactataatttttttctatccttctgttgatggacatgctaaaaaggtattgcctgtttatatgcagggcattgtcctaaatccagggatgtagctgggataatgatggactgagttcctaccttaatgaacctcattttctgctagggaaagaaacattaattagagttattagtatgataaagaaccagtgtaatgtggaaaaagaacataaaataagaaaacagagctagtacctagagggcttcttagaaaaagtgacttgtaaactagtaatacataatccaaaatgtagaatgtaaatgtttttctctcacttcctaattctcactccacagtgagcatctattcattgtttcttgtatatcctagagagatagatgagactggcttacattcaggcattcatcctgtatttataatttaaataaaagtaggagtatactctttctttttttttctttttttttttgagacggagtctcgctctgtcgcccaggctggagtgcagtggcgcagtctcggctcactgcaagctccgcctcccgggttcacgccattctcctgcctcagcctcccaagtagctgggactacaggtgcccgctaccacgcccggctaattttttgtatttttagtagagacagggtttcaccgtgttagccaggatggtctcgatctcctgacctcgtgatccgcctgcctcggcctcccaaagtgctgggagtacaggcgtgagccaccgcacccggccagaagtatactctatttgcttctttttcttgagtttatttttcatgtatatgtaattattcatatcaggatttgtagatttatctcagtatttttcctttgtttcctagggtttatcaaaatttatttaaatattctcctagaatagggtattcatgttacaacaaatttgaagaaagttaatacatttccacccaccatagaggctgatgggagcagtatgtcagcacactgataacttactcatactctaatttaggaaactgtctcctactagctgttaccagcaaggtctccatagtcctaggtttaaatcctaacattatcatttaataattgtgacctcaggcaatttattaaattatcagaaccagtttattcacttatatgagaagttatcttgagaattaaatgagataattcacgtggaactcttcaggcagtgtctgtcacataaagaacacctaagttgttacctattcttattaaatttatcagcattgttgttgctgaatatttgagttattttcaatatcgtgaacatttttgtgcatatattattgaacacttgcgtgaacatagcagagttgacaagtcaaagtgcttgcaaattttaaatactagtattatcaaattgcctacatgtagttatattgatttattctactattgatatttgcctaaaaaaagacattaaaaatgtaatctcatatttcaaaatgtatttctttgatctttgtgagggtcagtttttttcataaatattttggcaattggtatttatgttgactgtcattcatctttatacgtttattacactgagtttcttttagttaagtgaacattgatcttctaagacaattgattcatctgtaatttgcaaattatattttgtggtttataatttgtcttttaaatttattttttgtgtcttactatacataattttttagatcttataaaatacagcaactctttttatagatttggtcctgtgatcacttataaaattatgcaaaattttaattctgctgctttcatggttttataatactttttgttttgattacaggatagaagattttagttttctctgaatagtaaaatatccagatagtctaaacataaaatactgactaatgcctccttttcacgctgacttgacacatatactaaatcatacctatactaaatcccttatcagggatttatacttaatgatatactaaatccctacttataagtagctctaactgggtctctgtattccactgatctagttttctgtttttggacaatacactgaataccagtgatcttattgtagatcgtttgtaatacactttcacattttgttagaagaacacttagtaatttttgttcttttataaacaggaagtttggcaagcctcatttttcttctgatgatttttaaaatcaattgccacttcctttccaaatccttttagaattgtatttatgtattaatttaacatgaagcagataattttttttttagtattttgagtcttgcccaaaaggaacatgatacgccttttcacttttattgtcttctgttgtgttctttagtgaggttttataattttatttcataatagtcttatgtccttttgtttaatttattcctacataattttttttgcctttatgaatagggtcatttacttccattttttttttaaccaggttattgaaagggtaggtaacgggataattaattttacatgtttatgttgtatttagttaactttattgaactctttgttttctaatggtttttcattttattttcttgattatttcagtaaactgtctcccaaaaattattttctatatctttatttcttatttcatttctggttttattgcggtgatcagaaatttttattacatattctcaatattgaaataatggtagtaggtgcctttgtctagtttctgattttaatgtctccagtgttttagtattatgtataatgtgtagttttggttccgctttatgaattttaaaatactctcaaattagtagataagggtttccagctaaactgattggtattgaaatttagaaattttataatatacctattaagatgctgaatagatttctccttcttaatacttgtaaacccttaattcttaataattgtaaaggtgttaactttgatctatgtttaaaaaaattattgtaaacactttttgttatctcatatattttttgtacaccacactgtttgtttaccaaaagtgggtgtgggtgttggcatctgggtacatagacaaaattgatctatagtttctttctttatatttgtcaattttggatatacaaattatatatatataatatatctatattatatagccttttataaccattaaggaggctttctcttgttttgttttgtgtttttttttttgagacggggtctcgctctgtcgcccaggctggagtgcagtggtgccatcttggctcactgcaggctccgcctcccgggttcacgccattctcctgcctcagcctcctgagtagctgggactacaggctcccgccaccacgcctggctaagttttttttgtatttttagtagaaatggggtttcaccgtgttagccagggtggtctcaatcttctgacctcgtgatctgcccatctcggcctcccaaagtgctgggattacaggcgtgagccactgcgcccggccgctttctcttgtttttctggctctgtggcagtttagatatcacagaaattatctgatccttgaagatttgacataacagcccagctcgaaaacatcgtgggcttgatatctttcgtgttaccagatttctagggcaaacttttaagttttacagagtctgttcagtttttctgcctctgaaagcagttctggtagtttatatttttctagattattatctgttgggatactgtagtctattaacaaagttatatgtgttattcttcaagaaattttaaaacattttttctgtattatcacctttcttatttctaccgatgagttttcttcccctttttggtcttccatccaactttttggaaagaaaaagcctttgactatcaaattgttacattatattttatttctcctactttatattttatttttctaaattcttgaaatcttttctatatttaaattggatatatatatgtatatatatatatatatctatattttttttttttttttggatggcgtctcgctctgtcgcctaggctagaatgcaatggcacagtatcggctcactgcaacctttgcctcccgggttcaagtgattctcctgcctcagctcccaagcagctgggattacaggctcccgccaccatacccagctaattttgtttgtttgtttgagacggagtctcacactgtttcccaggctggagtgcaatggcatgatctcagctcaccacaacctctgcctcctgggttcaagcaattgtcctgcctcagcctcccgagtagctgggattacaggcgcccatcaccatgcctggctaatttttcctattttttagtagagacagggtttcactgtgttggccaggctggtcttgaactcctgacttcaggtgatctgcccaccttggcctcccaaagtgctgggattacaggtgtgagccactgtgcctggcctggaaatttttttgactaacagcccaataggttttgatatctgatattcccatattagtatagttttttatttctttggctcaagaataatttagagccatattttaaattttctaagtatttaggttggaagatatctctatttataattcctatttgtattacagtgtggtcaaagaatatggccaatattatttcagtcctctggaatttgaagtaagttttcttcatttcttggcactgtcagtttttaaaaaatagcccataagcattttaaaatacacataaactctcttaaccaactttattttagagataagagcaatcagacttagaagattatgtgccttattctatgtcacaattaattataaatgatgtatctagctttttgaattttaatctcatcagtttcccattagatttaactgcctccagaatataaatgtttatatttttggtatccacatactcacatatatatatatttggtatcttcatatatatatatatatatatatagagagagagagagagagagtttacataaaaaattaagtccataagaagttataaatttagaatatggttttacagtattacttagaaaagtagaaaaaagtctaggtagaaattatttgcatctttagaactgaacaaggtctcaaaagcatgacttaaactaattttgctgatgggtcatctgtaggtagatggggaatgaacaagaaaggatatcacacatatggagaacttaagaaacaaaggcatgtgtgcatttgtgaggagacaagcctaacctagataggagggagatccttgttgcaggatgataggaaataagattgaataaatggcattaagcctgattaaaggtctagtgaaaaagttaaaaaagttaaaaaaattaaatagcagttctgtcatctaatgactagtatcacatttcattttgcacatgcgtggtgatttcattgcagtgtctgtgataattaacttaaaataattagcatagaccgccaaaaaatatgggcaaatataattctagaacaggattctgaggaggtagtatgagacaaatataatgttaatttactcataatggcagattgtgtagaactctgctaaatatactagcatggaacatctgttgagaatttgaataaatatgattccagtatattttaaaagccaaaaatttcttaaggaagtgtgtaaaaaatagttaaggaatgcatttatgctagtgaaaatgtttttttgtatgtttgaaaaacagcttctagaaatttagaaggtaatttcttaagaaggaagtgtataaaaaatagttaagaattgcatttatggtggtaaaaatgttttcttgtgtgattgaaaaacagctcctagaaatttagaagtgtctttctacctctgctggtttaaacacctatatactgaaaaatactgtgactttggcaatttgcttgtgaaaattaggagagtcttaaattcagcaaaatcaagaggtgaacatataatcttagagtataagaggttatatatttcagttctataatagaaatctgctatttattaaaacagcttctattttgaaagtaggtaggggaatgatgaccatttagtggaatcactccgtgcatgtaaacctgcaatattaatttaagagactcagtacaaatttgttttattttggtcatgctattttgtactaaagtatgatatacgaaatatttgaatattctaaaagtctattacaggttgagtatcccaaatccagaattcaaaatctgaaatattgcaaaatccaaaacattttgagtgccaacatgatactcaaaggaaatgttcattggagtatcatggattttggatttttggattcggaatgctcaaccagcataatgcaaacattccaaaatctgaaaaaaatctaaaattggaaacacttctggtcccaggtatttcagattagggatactcaacctgtagcctgtgacaatcattatcgaaggttcatatcaacaagaacagtaattgaattgttaatgttttagatttattctcaaattcttcctactttgattattatgtttggtctccccccttccccgtttttttttttttttccgaatttggataataggaagatttttaaagagctctaagagaagcttatgtgtgctacctaggcacacagtaagcgttgataatcttaaatattaaaatacagttgatatttatggctgttatttattcacataagactttggaatgacatgtatatcctcaaaaaaaaaaaagtcagttttttcaagggaaaagtattttaaaataatttgttctcttattctatttataatcttatgctgcatagaaagaacatattagccttcctttttaatgagtatgatattacataactagaatatttcatttaatgtttatcagttattttttctcccatctgtacaatacaaccatatagatcataacatctagacgtcaaagaattacttaagaaaggcatgcattttttaaattaaaaaaactttttaattgaatggattttttgtaatcttgcctgaagcccaaaatgtttatgcttattagagctagaatttacatataagtataatataaatgaatataaaaagctttatcttaatcatatggtcctcttgtacatagcaatatgtacaatatgtgtaaatctatacatatttctatatggtcagatattttctagattttgcttgtatattaaaacatgcattagtatttgttatttcccattattatttgtatattatgaggtatttttgtttataaagaaaaactaagtttaaaccttaaggtaataatagtgataatatattatcattattattcttacattaataaaatgtacgtactgttggagcaataaatacttctttttgtgataattataaccccggggcttgatgttgcattccttatttgtgggctattcagctaaaagttaattgcaataatacgactatgcatttaagaacaattttctttcagatttgagtattgttgggagctatatatcaactctagaattttagtgttcaaactgatgcttagaaaggtaaaacagaacgggaaaacttaccatctccatcttatgatgtctgtgaatagactttgactaggctctgataaattttacagaattactcacattgtaagtttagacatattttaccgctttcatgtgtggaagcaaaaagaacgtttatatagtgaagggataaagaagggcctttgtggccaggcacgtggctcacgcctgtaatcccagcactttgggaggccaaggcgggcggattatgaggtcaggagtttgagaccagcctggccaacatagtgaaaccccatctctactaaaaatacaaaaaatttagctgggcgtggtggtgggcgcctgtaatcccagctacttgggaggctgaggcaggagattcacttgaacctgagaggtggaggttgcagtgagccgagatcacgccactgcaatccatcctgggggagagtgggagacttcttttttttttttttttttttttaaaagaagggcctttgtggtcagttattcagaaaattccttgagtctatggaacatgggactgtgttcttagttgtactgccttgtttgtgatactttaaaagccaaaaaaaaaaaaaagatttaaatgcaagaagaattaaactcataatattgaaggattttttggtgttcaaataattaaccaaaattatcattttcattgcattttccaggcaattaagttggaatatgcaaggttggttaagttggcccaagaagacaccccaccagaaaccgattatcgtttacatcatgtagtggtctactttatccagaaccaggcaccaaagaaaattattgagaaaacattactagaacaatttggagatagaaatttgagttttgatgaaaggtaatttgaaagtataaaattcatatgctcaaatcgttctttttttttttcctgcagattcccaggataattttttgagtatttattttatatatgcatgggcacatattttaataaatacgtaacaaaatttgaactcaatgtgactagttgctggagtctgtggccttttgaagtttgaactgaaaataacttagatcattttaataaattttaattgtgaatcaagtaatcactgcacttattacactcaatattttagaaacaaaaatgggcttctcaacctctgtactatatagacagtttaaattagataaatctttgttgttggggctgtcctatgattgtaggatatttaataatatccctcatctcttcgttagatgacagtagcagctcccaagttgtggcataccaaaatatctccaggtattgccaaataactcctaggggagcaaagtcacccttattagagaatcactggagaaaagttttcagtcttgcagataaaataattaaacattctttgacataaagaggaggcttagaagggttaaattagattcacgcagacatattttctctggaaagagaaaatattctatagaaatttctgtagaatttctgtagaatatagaaaatattctatagaatatttccagagaatgttttctctagattatattagtagttttataaagaattattcagaaagtcctattaaactactaatgttaaaaatcacaatttaattagaatgagtgacactagaaaataatttcagggcccatgtgaaattttagagtattgaaagttattttcatatataaaaacatttatgctgttgcagttcattgtaattttaattctgaaatgatcatccttttatgagtgtctcaaaaatactgagttaaaagtgtatagcaaagaatatgaggggaggcaaagcatctggattgatcctaccttattagatatgtgccgtgaaatgtaggattctgtgcataatacaaataaatagttgtgaacaatatctgataggtggttgaatgctcagtgaatgttggccactactgtttatattagtagcagtgtggacatcatttattttgatacatgcgactgcagagagttcagaaacagggttgttgtgaccctcgttatctgtgctatcagtgtactgagttccattggatctatgctgtttaatttggagaagatattaatggagtaatcacattgacttttcagtcttttgcagttctctgactataactagttaatctgttttgataacctgacttgtgcttgaaagacagagttatgcacatgtgaataaatacatttcgtgaggatttctttatcactgattctgatcataaaatccagtgggatgtttccatttttacctgagatgataggcacgttttagactctttagtatttaagaataaataataccatgtggggggaaaagaagatgcagtgtctcttgagcttgcttaatagatgcacattattttttaaaagtttcatttttttcctatgcaaactgtgttaattagaatgtaatttaaaagccatatatcaatacaacacagtaaatttgaattagaattattgctcctgtcttctttgtaattccccaacattggtcccaaaaatgtttttcacttaaggttatttaggagttgtttctatacaaaagtactgctgtttttgctcagtgtttatggattttgcttttgatttacaaatatatatatatatatatacacacacatacacacacgctcatatgtatgtgtttttttttaaggtgtcacaacataatgaaagttgctcaagccaaactggaaatgataaaacctgaagaagtaaacttggaggaatatgaggtaatgtgctttcttagaggttaaactacagatttagggattctgtaattcactgatattcctttcgtttcagcccaactgaagttgaatttgttatgaatgatgagtaaaaaaattaagtttccaagtcaatgctcaagtaattaataattttatatgtgattttaggattaacatgatatgatagcatgtagaccaaaaagtttaaaatcaaaaaaggaagatttttggttttttatttcaatactaattctcaagtactttttaaatgaacttttctagcttaaaaacagaataacaaatgcattgttaattttgaaatcaacttagaaattgctgttacataataccaacaagtaatatttatcaagaccctactatatgccaggcatttgtctaagccctttacatatattaactgatttaattcagacagtaacactgtaagataggtagtgttcttattcccatttgacacacgagaaaataaggcatagagcagtgaagtaacctgcctaaggttttcacagccacaagtttacagcttggctaatagaacctacattcttaactgttgcactacactgtgcaactgtaccctgtgggctgtattttttccttcactttgattcatcagatatattttggggaagttaattcattttagtccctatatgccatatatgtttgtcatgagacagtgttgtgtgtgagagagcacttacataggtacttgtacatgtgcttgtgggatttttttgtgcacaaaattattttttgtcaactttggctttaaaatattctttattttaattgatgaattcatacacctagtatttcttcacatttttaaatttaatcttatgcattgtcttttttttaatttataagtctagtaaattttaagttgttttcttgggtgcctttgcttaatatttagttccatttacaaacttaattatggtactttagattccctaaataattagtgtaattcactacacaaacagggaagaggaaagagagagaaaacactcattattgatgaaaaccttagctagtttggcgtataaggtaactaccttaattcactaaagagtgtctctaaaaacaaaaataggaaataataaaactgcagcaaatatatagaattgtgagcactgaaagcttaaaatttttgttgtcaaaagcaaggcaatgaaaataagcgaaaagtaaaatactggaaaagaagaaacaaagacatcattatttgtagttttttttaccttgaaattcaaataaaatctacaactgatgtattagaactagtaagacagctttgcagcatgcaaacttgtgtcagacatcaattttattcccttttgccagtaaaaaaagtatgagaaagtataaaagtgagaccatttacaatagtatctgaaactatggagtatatagaaataaatttaacaaaaggtgcgtgtgacttctgtggggaaaattataaaacttattgggagacattaacaaagacctaaataaatgggcatacatatggtatttggaaaacttgatattattaatatatagatatcacttttcccccaaatgctttataaattcagtgcaggctgtatgaaaattccagcaagatgttttatggagcttgataagccaactgaaaaatgttacggaaatgcaaagatcccagtccacctcccatctctgacaagcaagttagtgaacagtataaagactttttaataaatggttctgggaaataaataaaatttgatttcttctttattccatatgcaaaaattcatttcaattgtgaaagactcctgtgtaaagctgtttagaagtcaacataggtagaagcccaaagacattcatttatccataagaggcactcactgaccagatatttttgaccaggatatgtaatctagagccagagaaattcaaaatttgttttctcttgaccctgaggagcaagtcaagtcatcttttagctaataatgactccaaatctgtgccctccacattgattgagagctcttcccttgtccccaagattcgtgttcatggaacttgatttttaattgtgacttgattctgcaatgcttccttcagtttgcttcaacagattggactcattatgttttttttcataaaatcttctcatattctaactgcagggctgttaaatcatacaagtatttaaatgacttgtttttagattctgcatattcctcctatctttgtcttgctctaagttcagggttcagtaaaccatagcctgcagaccagcttaccacctgtttttgtaaataaacttttattggaacatggccatttgtatacatattgtctgtggatactttcacactgcagttacagagttgagtaactgaagaagatgaggcttgcaaagtctaaaatattatctggccttttacagaaaaagtttgcctactcacaacttctaaggtgattctaatgacaacaaggaatgacagtttgaataccttccccagaaaagctaacttcatacttgcaggacaaattttacctttatttgttatgaagatctactaatagcatgaaaattatgtcttgaaaattaaaattaagactggatgtggtggctcatgcttataatcccagcacttttggaaatcaaggcacagggagttgtttgaggccaggaatttgagaccggcctggccaacatagcaagaccctgtctatacaaaacagattaagtaattaactggaactgggagcatgcacctgtaattcaagctacttgggagacagaggtaggaggattgctggagcccagaaggtcaagtctgcagttagccgtgatcgtgccactgcactgcagactgggcaactgagtgagaccctgtctccaaaaaaaaaaaaaaaagtttatattcaaggagaatatcgttggctaataactatgtttcttatttttgtttataatgtttatataaaagccttaacacttttgttatcagtattcactttccaatttatcctacattgaatttcagttatttttcttgagtcaattattataaagtaagctaagaaaatcttgactttggtatcaccttagaattatttagtcctattacatgccctatagttgttttgggggtggggaggggcattgaaatgtgaactgcagttattcttttaccatatctcatgtaaataaactattcgcctacacacttaaagtcaaatttaccacatatttgcgaagttaaaaggttaaataaatctaactttttttagtttcttaaaattatgtattaagtatgtgtccaagctttgattcatactcagcgtaatatttcattttcttccatcagttgatgtagatataataatagttcaataatatgattttatactgatgaatttttgagatgacctgattgattatcctgcctttatatttctgttatctgctagtaaaatctttattgtttaaaacatttcatatccatgcctaataatttttagatttaatgttgtattaataaatagtcttgtgtgccagaaagtaaagtcttgttttagttctgatgtatcttcattttgaactctttatttctattaattcagatagtagcgaaacagtgcattactttttgtacagtttcatagtactttttaaatcttactctgaacatttttaatattttctttcacctacaggagtggcatcaggattataggaaattcagggaaacaactatgtatctcataattgggctagaaaattttcaaagagaaaggtaaggcaaagtggacaaatatgaaaagagcataatttttgcacttaattctattcaggtgtgacctcatccatggaaaagattttattcatactctgtatttttaataaatgttttattttagatcagttttaaatttacagaaaaattacacagttgatatagagacttcccatataccccacataaaatatattttccatttaaaactccgtaaggttggcattagtgtctgtgtttattagctctcaaacactacccttgaagctgagtctgatcttgatatcaagtcagagatagtgtttgcagtctgtctttgtgaactttcaggttctgtaaaaagtgtagctgtagaaaatttttgtgtactgtgactttaaacaaattttggattaattttcatttaaattaaggatggtcttaaaggaatatctacttatttaattatactattattttaattgttattaagaagaaaggatacattttgctttacttacattttaggttatttactagtttgcatgtatttctccacatatttcttaatgcgtgttgttgaacattaacttccctagtgattgttttttgagaaaatgctttattttcaatgcagtgtatattgcagccaagtaaaagggatattgaatttttcctttcttttttgttttatgaaatttaagaagctcccacttaggtaatgatgcttctttttcaaaaaaagaaacaaagatcagtgtttaattctggagctatgctgtccaacatagcggccacctgacaaaacttaaataactaaaacttttaaaaccaaagttcagttcatcggttacaccggccacgtttcagtagttcagtagcctcatgtggttagtggcctctatttttagccagcacagaacatttccataatcacagaaatttctattggacagtactattctagaggacagtactttcatttttatattaatagttatcaaaatttttagttatcacacaaaaggaaaaattaatgttttacttaacaatttgtcttaagtacttaagtacaaattatttaaagtcctagtcattgtgctatttataagataatttcactttagtcattgatgtagaaaacttactttgatcaatacctccaatttatgagttatgtcaatcaagattttatttctttaataggaatattcaaatgtactattagaatttatatttgtgctgatttgagaaaaataatgtgatcgtataattcaatagagtgagatataaaaaggcatttcagtgttacagataaagaaatcagacttcacagagatgtagtaactttgtcaaggtcacacagctaactaggagaagaaaaattaaaatagagacctcgtattcttgtataatttaatgaaatcatgtaagtacaaaatgtattcatttatctcaataagaattaaaaagatgaaactgtcactttgtacctatccggatagcttctgtattagttgttcccagttaacatacattaaaggaatttgagatataacttggaaatatgtttaaatattacaatttgcttgtcagttttcaaatacatacttattcagaaagttaatattctagtatagtaaatacttaccaaattagaaggattaactagaaaatcaataatggtgacagatattacttgtggaatatcttttaaagaaatattggtgtgtgtgcgactgtgatcccagctactcaggaggctgaggcaggagaatcacttgaacccgggaggcggaggttgtggtgagccaagatcgcgccactgcactccagcctgggcgacagagcgagacactgtctcaaaaaaaaaaagaaagaaatactgttttttttttttttttttttttttttactttaaatctttaaatatagcagttattgtagctagctgtttgtaaaatattgccaaaagattctgtcaaaattgtttttaatgaaaatgtaaacatttaaaggcttgaatgaaatactgatggacccttgtgagtcctgagaacagtgaagtgaaatcatggttgcaagaaccataattttatagagtgtaccaggctacatgatcttattttatcttagataagaatatggtaattggactgctaaatcttattctaaatttatttgaatatacattcgtaagcactttaaagtttgataacatatggaacattttgcgtacctcagtagagaattggaacaaggtcatggtttcagagcaattctcaaagaggtgactcaggtctagaaagccagatgtcagtgtcattcaggagagatcttcttaacaggaaactcagtagctataaaggaaaagatagatgtgctagttacttattaattaacgaactactacaacttaatgttgtaaaacaacttttaatattatcacttccttcgtttttcataaataacatctttaactgagaatatgtttattaacctaatatcatttcaaaataaaatgttatacttaatctcaaaaacaaattcctagaaagccgttttcaaaaaatgtataaaatagacctatttatcatgacaccttcaggtgtgtaatttgatttgccatgaatgtatacattaatttttaaataattttacatttaacatttgggatgtggaatggatttattttgtatctaagtacatgaattaagtaataaacagtaattattggcaggagcgtctagagtttaaaattgtgtttctttacaatatttcattttttaaaatatatttttccatattaatctgtgaaaaaatatattaatgaaaaactgacgcaaaggaaatattttaaaataatattttttatttcagttatacaaatacttggctagatatagtttttattttgacatgttagaaggatagttttgaggtaaaagtaattctttattaaatatttttttcttccatttttgttttgttttgtatttttgagttggggtcttgctctgttgcgcaggctggaatgcagtggtatgatcatggctcactacaacctcttaccttctcagctcaagaagtccttcctcctcagcctcctgagtagctggtactacaggcatgtaccacgatgcccagctaatttttttttttttaatgtttttgtagagatgggggtgtcaactatgttggccaggcaggtcttgaacttctggcctcagctgatcctgtcaccaccacctcccaaagtattgggattacaggcatgagcgactgtgcctggccccttttcttccctttttaaaacctaatttgaatttcataatatctagacttacattaatataacacatatgcctaattctatcacttcttttttttttgagacggagttttgctcttgttgcccaggctggagtgcagtggcgtgatctcagctcacctcaccctccacctcccgggattctgctacctcagcctgccgagtagctgggactacaggcatgtgtcaccatgcccggctaatcttgtatttttagtagaggcggggtttctccatgttggtcaggctggtctcgaactccctacgtcaggtggtccgtctgcctcagcctcccaaagtgctgggattacaggtgtgagccgccgcacccggcctctatcagcttttttatgtttgcaggctttttgtttttgctttattccactaggtttcccagatttagaagaaatctttcattgtccacttcctctatttcctttagatattcttatttctattttttttttacatttttctcagtaactaaaactgtctgcacatagaaaagaacctgtctaagttgtcattgaacaaaccaaatgatgtttgtgatcatttacttcatataaatgtgacattgcgttaaacaattagattgttggctttcacattagctccaattttgagtttaaatggaagacatcaggaaaataaataccaaggaaaacagaactatctgactttatcagttattgcctcttttcccagattttttcttaatttatagctcttctttttttacttttaagataactatctctgggtttcagatgttgctgttgctaaaaaggcgctctcaagcatacactgcgtcagatgatattttttattataatgtagattatcaaaacttaagcatatacttaaaatgtttcataattatagctgactttgtttctacaaaggtgaaatactaatgttatatgtttctttttaattttcaagttatatagattccttgctgttcctcatctgtgcttatcagaataacaaagaactcttgtctaaaggcttatacagaggacatgatgaagaattgatatcacattatagaagagaatgtttgctagtaagttgaatgcatatagtatgatcttatcattttgtctgacattgggcaagttttccagactcatatataagtgattgactccataaactctgaggggataagaacatgatgatgtctataaactggttctagtcccttcagatggaaaagtacactcagtactttattcttttctctttatgaatcccaagtactataggtgataaatgagaaatgttcttaaaatagcatcagtttgtttacatttctgtatttagatttcgtcatcacactaccactcctttttttggtgggagaggaagggatgcatagataagccttaaaaaatgttttatgtaagtctataagaatatgcaggctggcgcagcagctcatgcctgtaatcctagcactttggaaggctgaggctggtggatcacaaagtcaggagatcgagaccatcctggccaacgtggtgaaaccccatctcgactaaaatacacaaacacaaaaattagctggatatggtggtgtgcgcctgtagtctcaactactcaggaggctgaggcaggggaatcgcatgaacctgggaagtggaggttgccttgagccaagatcgcgccactgcattccatcctggcaaccaggtgacagagcaagactctgtctcaaaaaaacaagaatatacatagaatgtattagagtaatttgtttaacttaaaaaattgaattttcaggtacaagaatagtatagctgactttaaacatacatagaaccaaaacctgatggttcctctgaaaccttcaaaaaatggtataatgtttctcatcattttttgtagtaacccagccacatttggttatttgttttacataggaattgaaatgaaacctcgtcaagattactttagtgttcctttcagattttttcacgttgtatatttacaaagtgtcaggttctgagggatacaaacatgagtaagatgtacttcctgtcctcagaaaactcagtctggtaggagacataattgtttgttctggaataagtgccattatgagaaatatgcacaatgatatgcctgaaatatttgggaagaaccttaagagacaaggtaaacctcgtctggatcttgatggataaatagaagttttattcatgatagagaagggagaatattccagtacacaacagaaaatcaagataaattcactgtggctatccaggttatgaggaagtggggtaaggtggaagtgatgaagctgacaatacttgtcgatgtcagatgatgaagaaacttagatgacattcaaatgagtttgcaccagtgtaagtttgattaggtttggcataatgaggtttgttttcagaaaataattctggtaataataatagcattctagaggatgaacaggaaagaagtagattgaagtcaagaaccttagaggggaaagtcaagggacggagagtgaggacctcaactcatgtagtacggtaggtatgatggtgaaggaaatgaaatcggcatgtcatagctgttgggtgagtgggaagaaggaaatggaagagtcaaagctgccaaacttactagtttttcgtttaatattagggagtctaataggaggaacaaggttggctttgaacatgttttatttaagagatttccaggacattctttgattcagtgaacttaacattaaacttgtcattaaattttatatatcatttaatgcatacttccaaaaattgtagtaaatacttgaagatttatctcattttattctcttaacccctatggttggaagataaaataccctattattaatataaagaaagtgaagctaacagatttagctaatctgttcacgattggtgtattagtccgttctcacactgctataaagatactacacaagactgggtaatttataaaggaaagaggtttaactgactcacagttccacatggttggggaggcctcaggaaacttaaaatgatggcggaaggtgaaggggaagcaaggaccttcatcacatggtggcaggagagagaagtgcaagcagaggaaatgccagatgcttatgaaaccatcagatctcatgagactcactccctgtcacaagaacagcactggggaaactgtccctatgatctgatcacctcccaccaggtctcttcctcaacacctgggggttacaattcaagataagatttgggtggagacacaaagcctaaccatatcaattgggtaattgattcatggccaagttggacttaatagcacaaccatctttccaaaatcaaaataaattgcataagaattatgtggtgtaaatctaaatatataactttttttatttgaaattcagcttaaaagtcatgtttatcatgctgtaaacataagattttaaataagaacccttaaatattataggtcttatacctgtatttatctcttatgtttcttattgcatggatttctctgttctactagatcagtgatcagcacactatggcttgtgctccacctaccacttgtttttatagataagttttattgaaacatagccatgcacattcatttatatattgggtattattgtctttgtactacaatggcagagttgaatagttgcaacagaaacttcatggccttcaaagcctataatagtcctcgtctggcccttcacagaaaaagtttgccaatccttgtaccaaattgtaagctccatgagagttttctgtattaatcacttgagtgcccctgcatctgcagaaatttctggcacgtggtgttgactctgtaggaagtttttgaagggaaaagtgaattgattacctttatatttctgtatcaaggaatacaatagtatatattcagttgccattaatggagatgagtttttcaaaaattaatatggattctgaatttctttatttttaaaactattttgagtgcttatacaattttataatttggggaagttaatctctagagaagaaaaaatggcccctgtgttgatgatcggcataagccaaacatgactgaaaaacacaataatgttttctccaccgctgttgcttttgtttctgttgttgccatatgcatagctttttctaaagagagattttcagttctagataggttgagattgttttctctaaataccgtttgttctaatactgtttgtgaacatatttatgttgtcttccttattaatacttacagatccttaatttaaaaaggaaacaaaaacctattcttttttttttcctgcattgcattaagaaattaaatgagcaagccgcagaactcttcgaatctggagaggatcgagaagtaaacaatggtttgattatcatgaatgagtttattgtcccatttttgccattattactggtggatgaaatggaagaaaaggatatactagctgtagaagatatgagaaatcgatggtgttcctaccttggtcaagaaatggaacgtaagtttaaacaatggtagtaggcacctgagatgtccggattaaatgcagttagaattagatgttatttattcttgccattttttatattaaatacaatattaagtattaatattttcacattcacatgattactctttttccatattgatgaactaagctgtgtgcattgcagttgccatttatgtttttgtctccccaaaatggcaattatcttacctattagagtaagttaatattagtaaatcatgttgacaatgatcgtgtaataatttctatctttagttagatttaattgtttgtatttgcagcacacctccaagaaaagctgacagattttttgccaaaactgcttgattgttctatggagattaaaagtttccatgagccaccgaagttaccttcatattccacgcatgaactctgtgagcgatttgcccgaatcatgttgtccctcagtcgaactcctgctgatggaagataaactgcacactttccctgaacacactgtataaactctttttagttcttaacccttgccttcctgtcacagggtttgcttgttgctgctatagtttttaacttttttttattttaataactgcaaaagacaaaatgactatacagactttagtcagactgcagacaataaagctgaaaatcgcatggcgctcagacattttaaccggaactgatgtataatcacaaatctaattgattttattatggcaaaactatgcttttgccaccttcctgttgcagtattactttgcttttatcttttctttctcaacagctttccattcagtctggatccttccatgactacagccatttaagtgttcagcactgtgtacgatacataatatttggtagcttgtaaatgaaataaagaataaagttttatttatggctacctatgtgtttgtaagcaggtatattgtatattagtgtattagtaatactagataaatgaattttgtctggggattaagattggatagttaatagattaatacaatcttttaattctgctctaatgctagcaaattggaaaatgtttaagtctttgacacttaaatttatctatatttttaacaaagttcttgaacttagtatggcaccggaacctgttttgaattcagtcaggtttttactcaagtaagtggttgattttttttaagtcaaactacactgaaacttttatccttttcttagattaatcttactttttaaatgtatttacaatatacagcaaggtgattatttcaagagaatcccaaagtacttgaataagggctattgtaaaatttaaaagaaatatttatatatacacatatatacacatacacacatgtatatatatattcttcataatggaggacaatgttttgcaatatataaatcattctatttttgtaaattgtatatcactttaattgaaaatgttctctactaattaatactgtgaaacaaaattgatgttgtttaactagaagttatgagtatcttaactgcctttattccttttcaaaaaggaaaaagctgtagaacattttgtagatgaaactactgtttaagattaatgaattaatattgtgaatgaaaatcaaaatccatactttaaaggtaatcatgttactaacaacctatttttgaattcataaaaatttctttataaatgatgttttgtgaacatagtaaaatagaccattatactatgtgtatgtttgatacagcgtcgccaaaactagtgttctttattagtgcctctcacaaaagatcctggatggaggagtaagatgaaatattatgctattatatgatgctgtttgtaaaggtattaatgtactagtaaggtgttaatgacaaggaattagtactattcctgttgtaaagttagattttgcatattgtatctatcaaaatatgtttgggtttagattttaagttgtctactgagcagatttctgcattggttttccagtcctgttaaaagtttagaaacttcatatgtgtcatcacagcttttgtaaagaaagtatccttaatattttatgacattctaccacagtggtaaagttgtttgtgtttgtgtataattgactgctgagatacaaagtgcccaaacactatatggaaattattccttcaaagtcacatccagagaatcatgtcactcttgtgctgaaggtaagtattataattgtatttactatgtacttaaaaaccagattatttattcctagtaatgaatttgaaataacttatttaaagaaaagtgacctttttcaagacctacagaaacaacttattttaatattggtttttaatctaattgtaaggtttagatcattgaaatttctttttttttttttttttaaatttccaacttttaagttcaggggtccatgtgcaggacatgcaggtttcttacagaggtacatgtgtgtcatggtggtttgctgcacaaatcatcccatcacccaggtattaaccccagcatccactagctattctaactgatcctcttcctcctcccagcccccaccctctgccagacaccagtgtgtgttgttccttccaccattgagtccaatatgttcttatcgtttagctcccgcttatgagaacatgcagtagttggttttctgttcctatgttagtttgttcaggataatgatctccagcttcatctgtgtccctgcaaaggacatgatcccattcctttttatgactgcatagtattccatggcgtatatgtacgttttctttatccagtctatcactgactggcatttaggttagattccatgcctttgctattgtgaatagtgctgcagtgaacatacacgtgcatgtttttataagagaacaatttgcattcctttgagcatatatccagttacgggtttgctggctcaaatggtatttctctctttaggtctttgaggaaccatcacagtctttcacaatggttgaactaatttacacttccaccaacagtgtaaaagtgttcctttttctccataacctcgctaccatctgttgtttttatgacttttaataatagccattctgactggtgtgaggtggtgtctcattgtggttttgatttgcatttctctaatgatcagtgatactgagctttttttcatatacttgttggcctcatgtatgtcttcttttgagaagtgtctgttcatgtcgtttgcccactttttaatgggttttcttttttcttgtcaatatcataagttctttatagatgctgcatatgagacctttgtcatatgcacagattgtaaaaattgtctcccattctgtaggttgtcttttttactctgttgttagttttgccatgcagaagttctttagtttaatcagatcccgtgtgtcagtttttgcttttgttgcaattgcttttgacacttcgtcatgcaatctttgcccattcctatgtcctgaatggtattgcctaggttttcttctagcgtttttatagttttgagttttaaatttaagtctttaatccatcttgagttgatttttgtatatggtgtaaggaaggtgtccagtttcagttttctgcatatggctagtcagttctcctagcaccatttattaaataagaaatatttttcccattatttgtttttgtcaggtttgtagaagatcagatggctataggtaggtgtgtggtcttatttccgagttctctattctgttccattggtctctatgtgtctgttcttgtaacagcaccatgctgttttggttactgttgccttgtactgtagtttgaatttgggtagtgtgatgcctccagctttgttcattttgcttaggattgccttggctactcaggtttggttttttgtttcgttttgttttgtttggttccatatgaattttaaaagttttttctaattctgtgaataatgttattggtagtttaatgggaatagcactgaatctataaattgctttgggcagtatggatatttctacaatattgattcttcctatccatgagcatgaattttattttccatttgtttgtgtcctctctgatttccttgagcagtggtttatagttcttgaagagctccttcacgtcccttattagctgtattcctaggtattgtattctttttgtggcagttgcgaatgggagttcacttgtgatttgactcttggcttgcctgtttttggtgtatgggaatgctagcacttagtgcacattgattttgtatcctgagattttgttgaagttgcttatcagcttaagaagcttttgggctgagatgggattttctagatacaggatcatgtcatctgcagacaaagatagtttgatttccgtcttcctatttgaatacctttatttatttctcttgcctgattgctcttgtcagagcttccaatactatggggaataagagtggtgagagagacagccttgtcttttacaggttttcaagggaagtgctttcagcttttgcccattcaatgtgatgctggctgagggtttgtcataggtggcttttattattttgcagtatgttcatttaatacctagtttattgagaatttttaacatgaagtgatattgaattttatcagaggccttttccacatctattgaggtaatcatgtggttttcgtctgtagttctgtttatgcaatgaatctcatttattgatttttgtatgttgaaccaaccttgtatcccaggaatgaagcctacttgatcgtggtggataagctttttgatgtgctactgtattcagtttgccagtattttgtttaggatttttgcatcagtgttcatcagggatattggcctgaagtttttgttgttgttgttgacgttgtatgtctgctaggttttggtatcaggctgatgctgccctcatagaatgagttagggaggagtccctccttttcaatcttttgaaatcgtttcaggagcagtgatagcaactgacccttctttgtacctctggtggaattcatctgggaatctgcctggtcttggactttccttggttggtaggctgttactactgccttagtttcagaactcattattggtctgttcagggattcaatttcttcctgtttcagccttgagagggtgtatatgtccaggaatgtatgatttttttctagattttctaatttatgtgaatagaggtgttcataatattatctgacttgtctttctatggggttagtggtaagagcccacttatttctgattgtgtttatttgaatcttctctcttttcttcattagtctagtggtctcctagtggctcacgcctgtaatcccagcactttgggaggccaaggcgggtagatcacgaggtcaggagattgagatcatcctggctaacacagtgaagccctgtctctactaaaaatacaaaaaaaaaaaaaaaaaaattagccgggcatggtggcgggtgcctgtaatcccagctactcgggaggctgaggcgggagaacggcatgaactcgggaggcagagcttgcagtgagctgggatcgtgccactgcactccagtctgggtgacagagcgagactctgtctcaaaaaaaaaaaaaaattagctcctggattgtgtgattttgatttttttttgaagggcttttttttgggggggtctctatctttagttcagctctgatattggttatttcttgttttctgctaagctttggggtttgtttgcccttggttttctagttactttagttgggatattaggttgttgagatctttccagctttttgatattgtcatttagtgctataaatttccctcttaacactgctttagctgtgtcccagagatgctggtatgttgtatttgaaatttctttatataatttaccatgttaaatataacttatagctaataacttcggaatttgaacctcatagaactgtagtccatagcagatttcatttgatttaaatgactcttattttggttactatgttattccttcctaccccaaaaaagttacgttttgaaataattcagggtagaattcatatagatagaacttcagacatctcaggagaccagtacgcatgaatgaacatgtagggacccctctaatacgtttcacatccattatgatacaacaatgaccatacactttagtagttctcagtgtgtgttctccagatcagtagacagcttcagcagcttgggaacatgttagaattgaaaatttttgagtcccacctcagagctgccagttcagaaactcttcacgtaacctgtgttacaacaagtccttcagataattttgatgtttactagtttcagagccactgcactaaatgaaactattggtagcatttgtgcactgtaaattgatgctgtttaattttcattcacttgtgctctgttggaagcttttttgtgtttccttcacttgggatttcaaggaagtatctaatttttttttttttttttttgctcaattacatgtaattgagaataagataggtatctgattctccaaaagttcagcatctttattttatgatttaaacttgtcgagttatgcctctgggtcctgtcattctcccagcgaataaaaatgtggatgcttggggaagtggaggtggatggtaaatgggaatactcttgtttgaatttttaaaaatttacattgtaaataacattaaataccatttgttgtgcccatgataacttcatccaaaatatatatattagtctgctaagatatgccataacaaaataacacaggcttggtgccttaaacaacagaaatttttcttctggttctggaagctggaagtctaagatcaagctgttggtggatttgatttcccctaaggcctctctccttggcctgcagaccaccaccttctctctgtgtcctcacctagccttttctctgtgtcctcacctagccttttctgtgtgctgcatccctggcctctcttccagttcttataaggaccccagtcacattggatttgagccccatccttatgaactcacttaaccttaattatctctttaagggccctgtctccaaacacagtcatgttagggggttagggcttcaatttatgaatctgggggacaatttagtaaaaaaaatagtatgtgacagcccagtttatatacctgctttccagaaacaagaatatggttgttaatgtcttctctttagcctcaagatacagtgcaaatatctgtagttccgttcttacgtaagctttattttactttttctaaaaactatattgaaagtatagcaatccgagttagaaattgcttataatgcattcatctaatcagctcagtgttcttactgaacaaacttttatttccatgtttactcatgtttatttcatcagtttcacctgacattataccatgaatatatttctgttttgctagtgtttttattcttactgatcacatgtccctttttcgtcttccataccactcccagcctagagttaatgaccactaaccaccgtagccacatacttttccatgtttggataaccttatgcagcatatacacctaaagggtggtggtttttttagggggtggtggtggaaggggggagacggtcattgtttttacaaaaattaaatttcatctattttacacatcctttcccctgtcttccccttgtactttccaaccttcagtttcttctttttctaattagctttgtaggagtgacttaaaatataataaagtgaaataacatagcagtgataataatagaataaaaataaacgaaacgtgattggagaaactgcacacatgcacaccaagatttcagatattcttattccttccatgtacagttctcagtgggtatttcagaccttcactcccatcctcagcctctcctattcagtgccagcttctgtaacgctggatgatcttttctttgcctaacgaagaaaactggagatgttaggtatgatcctcctttcaacttttgtgcctcctatctaaattagttgttaaccagcttgtaatgaagggataaacattgataacccaatattatttagaaaatagaaatagaatcagaatatactatgaaatgagcttacaaatttcaacaagtgtccactattttgggagtgtgtttgctcttctccagcagtaatccagaaagctcactttttcccccgagactatctcatacaacatgtttgccctgtagcaaacagctccttattttttcagtaatgtagagctagaccagtattcttctgttgtttttattttgtggagtttttgtgtgtatttttagttttttgaaacagggtctcgctctgtttcccaggctggagtgcagtggtgcagtctcctctcattgcaacctccaactctctggctcaaacaatcctcccacttcagcctctgaagtagctgggactatatgtgcaagccactgtgcttggctaattttttaattttttgtagagatgaggtctcactatgttgtccaggctagtctcaaacttctggactcaagtgatcctgccacctccgcctcccatacccctgcgattacaggtgcaagctactgcacctgacctagacccatattcctaacctagttcgtcaaaagcatatgaggaacttttttttctttaaagtgtccagatgttatctctcatgtgtattacagggcttcaaatgtgagaattggagtttagatagttgtttttccaattttaatttaagatttgcctgtggccctactatgtgattgagcctagctaaagtagtgtggaggaatttgctttttacagtactgtatgtcacatgaaagggcaggggtcttcagattgctgatgttccctcagccatagaccatgcccacttttgacgtgctctagccaaagctgcatgaaaatatttttcagtccctactggatttttctcttatgaatggttaacagtgcaggttctggaaccaaactacctggattcagattctggctctgccgtttattcgctgtgtgttgaccttgaatgagtgatttaacttttccgtgcctcagattcttcatctataaaatgggcattatgacataacacaccttagaggattttttaaaagattaaatgggtttccagatataaaacgtttagaaactgtctgccacattaagtattcaataattgtgagccctttttatagtttgtcagtattgtttactcctgttctggttttgaggatctttagcttccatcctctacctgcattcctagtgtttttttttttctccctacttcttaaagttgtgctcaaggtttggtacttggccccttcctcatgcttttcactttttctggttgtgtctgttagtttgtcttcttattctgcctccatgaatcacaggtcattgttttctaatcatacccatgtgagttctaaaccaatacatatttgcagttgtcttttcatcacatatacctggatgtttcgcagacactttcgacttggcacatctgaattcatcactttttcccaaatctgattgtctcatactcccttgatgaaatgatgtaataatcccaaaatgaattattctcaattctacttttacctcccattgattaccaagtgtcagcatgtcagattttttaatactccttagtactatggctgatgaggtccgtcatctcttagtttgactgttagatttgtccctgagtagcactgtctttgattttgcccctgaaattcatcttcacactgttgacagaataatcttttaaagtggtttgttttacatgtctgtcttccactgctggactgagctcttaacaggagattgtatctcttgtttttgtaatcctagcacctgttaaaataactagcaacttagaggtgcagtcttgcaggttttctgaccctccagtcaccctagacctgcactgatacagttttcgttagccatttaaatttaaataaaattgaacattctgttaattagtaatactagctatatttcaaatgctcatagccacatgttactgttgactactatattggacaacattttagaacatttcgattatcataggaagtttcattggacagagctgccccagcagacctttgctgatgtggatgtctttctgtattaacatccttttaacattcagacacctcccaaatgctaaccttaatagattggccttcagcatttatgtctctctatcttgatcctgcaattgatgactttactatgtctgctctgcagagagcaccactaccagcatgtgtccaatcaggaaagccgacactacatatttcaacagaggagatgtgagtacagaggcattagagagtaacccggggatcacaactgtaggatgcagctactagtcctaagggtaagaaaacaaatgggaaaaaattggggctgccagagccttaaagctccaaaaagggtcatcatggcattagtgctcagacccctgaggaggcttaccacctacctgctcatggtaattctgaggggtaaagtaacgacagttctagaagtttcgaagtagttgaaggctggaatttgctgccgttattacaaagctgataggactagccatcagagatgaactagatcttttttcatcttcctgccaacttccctgtagtacttcctactggcagaacctaataagcagcagtcagaggggtcagagaagtgtagtttgcagagtcccggcctcagcacacagagcagaggacagaagggtggaattggagctgagaaacaatagatgaagaaccagcacactggtttccttcaaagactcatttttatctaaaggtattagtccctaaaacgccagatactcaggaatttgtagagaaattctgggccctcaagaataagtgtactagttcgaattgaaatcttgttactcttttctgttaaacgagactgtaatgctgctatatagtgcttaacttttaaaattgacagtggatgaatctgcatattatagtcaggtgttcatgtccatccattcatttattgagtgcctaccacatgccacacaatctatcaggtggtatgtatataaaataaaacttagataataagacaaaagtaataattcacccaaattcatctataaatccagacttagggactgttgacatttttgtgttcgtgcctgtggacatctttctgtgcatatgcatgtacacacatcacaatatcataaaaagtttataaatgcagatgtttccaagaaagtgtgtattcatctacctctctcctgctgtatagtatttgattataaggagaatgctccattactatttacctgtggacatagagcataggctgctacatatgtctctatatactttatgcactttgtctttccactaaaatttctcaaggtataatttctgtctgggtcactgaatatgtagatttaaaattttgagctacatttttcaaactgcccttcaccaaagatgttacagtttacactgccaccaatagtacatgagactgttctttcatacattcaataacagaatattattgacctttaatttgtttgatagccaaaagtgtgttcttcgcatttcaaaatttttagtgagagcatattccaatatgttaattgactatttgtatttcttgtatagttaactacctgtttacatcctttacactttttcttttgggtgtttatgtctgtaacttggcagtagctcatattaggaatcattattatacacgttgcaaatatttttacaattagtttatttattattgcattataaccatgcttacgtagtggtgctctactatttctgccttaggtataatgtttagaattttctctggtcagggttataaaaatactcatgtttctcctgatatttttatgatttcatttttagatcagtctttaatgcagttgacagttacattaaagtagtgaaatagtcaacattttctgtcagtattatctggttgtcataataccatttataaaataattc

SEQ ID NO: 33 - DNA, 4950 bp, Homo sapiens
acagtcggcgtttcgccgcctgcccgcggtgcccgcgcacgccggccgccatcgccttcgcgcctggctggcgggggcgctgtcctcccaggccgtccgcgccgctccctggagctcggcggagcgcggcagccagggccggcggaggcgcgaggagccgggcgccaccgccgccgccgccgccgccgccgcgggggccatgaccgtggagcagaacgtgctgcagcagagcgcggcgcagaagcaccagcagacgtttttgaatcaactgagagaaattacggggattaatgacacccagatactacagcaagccttgaaggatagtaatggaaacttggaattagcagtggctttccttactgcgaagaatgctaagacccctcagcaggaggagacaacttactaccaaacagcacttcctggcaatgatagatacatcagtgtgggaagccaagcagatacaaatgtgattgatctcactggagatgataaagatgatcttcagagagcaattgccttgagtttggccgaatcaaacagggcattcagggagactggaataactgatgaggaacaagccattagcagagttcttgaagccagcatagcagagaataaagcatgtttgaagaggacacctacagaagtttggagggattctcgaaacccttatgatagaaaaagacaggacaaagctcccgttgggctaaagaatgttggcaatacttgttggtttagtgctgttattcagtcattatttaatcttttggaatttagaagattagttctgaattacaagcctccatcaaatgctcaagatttaccccgaaaccaaaaggaacatcggaatttgccttttatgcgtgagctgaggtatctatttgcacttcttgttggtaccaaaaggaagtatgttgatccatcaagagcagttgaaattcttaaggatgctttcaaatcaaatgactcacagcagcaagatgtgagtgagtttacacacaaattattagattggttagaagatgccttccaaatgaaagctgaagaggagacggatgaagagaagccaaagaaccccatggtagagttgttctatggcagattcctggctgtgggagtacttgaaggtaaaaaatttgaaaacactgaaatgtttggtcagtacccacttcaggtcaatgggttcaaagatctgcatgagtgcctagaagctgcaatgattgaaggagaaattgagtctttacattcagagaattcaggaaaatcaggccaagagcattggtttactgaattaccacctgtgttaacatttgaattgtcaagatttgaatttaatcaggcattgggaagaccagaaaaaattcacaacaaattagaatttccccaagttttatatttggacagatacatgcacagaaacagagaaataacaagaattaagagggaagagatcaagagactgaaagattacctcacggtattacaacaaaggctagaaagatatttaagctatggttccggtcccaaacgattccccttggtagatgttcttcagtatgcattggaatttgcctcaagtaaacctgtttgcacttctcctgttgacgatattgacgctagttccccacctagtggttccataccatcacagacattaccaagcacaacagaacaacagggagccctatcttcagaactgccaagcacatcaccttcatcagttgctgccatttcatcgagatcagtaatacacaaaccatttactcagtcccggatacctccagatttgcccatgcatccggcaccaaggcacataacggaggaagaactttctgtgctggaaagttgtttacatcgctggaggacagaaatagaaaatgacaccagagatttgcaggaaagcatatccagaatccatcgaacaattgaattaatgtactctgacaaatctatgatacaagttccttatcgattacatgccgttttagttcacgaaggccaagctaatgctgggcactactgggcatatatttttgatcatcgtgaaagcagatggatgaagtacaatgatattgctgtgacaaaatcatcatgggaagagctagtgagggactcttttggtggttatagaaatgccagtgcatactgtttaatgtacataaatgataaggcacagttcctaatacaagaggagtttaataaagaaactgggcagccccttgttggtatagaaacattaccaccggatttgagagattttgttgaggaagacaaccaacgatttgaaaaagaactagaagaatgggatgcacaacttgcccagaaagctttgcaggaaaagcttttagcgtctcagaaattgagagagtcagagacttctgtgacaacagcacaagcagcaggagacccagaatatctagagcagccatcaagaagtgatttctcaaagcacttgaaagaagaaactattcaaataattaccaaggcatcacatgagcatgaagataaaagtcctgaaacagttttgcagtcggcaattaagttggaatatgcaaggttggttaagttggcccaagaagacaccccaccagaaaccgattatcgtttacatcatgtagtggtctactttatccagaaccaggcaccaaagaaaattattgagaaaacattactagaacaatttggagatagaaatttgagttttgatgaaaggtgtcacaacataatgaaagttgctcaagccaaactggaaatgataaaacctgaagaagtaaacttggaggaatatgaggagtggcatcaggattataggaaattcagggaaacaactatgtatctcataattgggctagaaaattttcaaagagaaagttatatagattccttgctgttcctcatctgtgcttatcagaataacaaagaactcttgtctaaaggcttatacagaggacatgatgaagaattgatatcacattatagaagagaatgtttgctaaaattaaatgagcaagccgcagaactcttcgaatctggagaggatcgagaagtaaacaatggtttgattatcatgaatgagtttattgtcccatttttgccattattactggtggatgaaatggaagaaaaggatatactagctgtagaagatatgagaaatcgatggtgttcctaccttggtcaagaaatggaaccacacctccaagaaaagctgacagattttttgccaaaactgcttgattgttctatggagattaaaagtttccatgagccaccgaagttaccttcatattccacgcatgaactctgtgagcgatttgcccgaatcatgttgtccctcagtcgaactcctgctgatggaagataaactgcacactttccctgaacacactgtataaactctttttagttcttaacccttgccttcctgtcacagggtttgcttgttgctgctatagtttttaacttttttttattttaataactgcaaaagacaaaatgactatacagactttagtcagactgcagacaataaagctgaaaatcgcatggcgctcagacattttaaccggaactgatgtataatcacaaatctaattgattttattatggcaaaactatgcttttgccaccttcctgttgcagtattactttgcttttatcttttctttctcaacagctttccattcagtctggatccttccatgactacagccatttaagtgttcagcactgtgtacgatacataatatttggtagcttgtaaatgaaataaagaataaagttttatttatggctacctatgtgtttgtaagcaggtatattgtatattagtgtattagtaatactagataaatgaattttgtctggggattaagattggatagttaatagattaatacaatcttttaattctgctctaatgctagcaaattggaaaatgtttaagtctttgacacttaaatttatctatatttttaacaaagttcttgaacttagtatggcaccggaacctgttttgaattcagtcaggtttttactcaagtaagtggttgattttttttaagtcaaactacactgaaacttttatccttttcttagattaatcttactttttaaatgtatttacaatatacagcaaggtgattatttcaagagaatcccaaagtacttgaataagggctattgtaaaatttaaaagaaatatttatatatacacatatatacacatacacacatgtatatatatattcttcataatggaggacaatgttttgcaatatataaatcattctatttttgtaaattgtatatcactttaattgaaaatgttctctactaattaatactgtgaaacaaaattgatgttgtttaactagaagttatgagtatcttaactgcctttattccttttcaaaaaggaaaaagctgtagaacattttgtagatgaaactactgtttaagattaatgaattaatattgtgaatgaaaatcaaaatccatactttaaaggtaatcatgttactaacaacctatttttgaattcataaaaatttctttataaatgatgttttgtgaacatagtaaaatagaccattatactatgtgtatgtttgatacagcgtcgccaaaactagtgttctttattagtgcctctcacaaaagatcctggatggaggagtaagatgaaatattatgctattatatgatgctgtttgtaaaggtattaatgtactagtaaggtgttaatgacaaggaattagtactattcctgttgtaaagttagattttgcatattgtatctatcaaaatatgtttgggtttagattttaagttgtctactgagcagatttctgcattggttttccagtcctgttaaaagtttagaaacttcatatgtgtcatcacagcttttgtaaagaaagtatccttaatattttatgacattct

SEQ ID NO: 34 - protein, 1053 aa, Homo sapiens
MTVEQNVLQQSAAQKHQQTFLNQLREITGINDTQILQQALKDSNGNLELAVAFLTAKNAKTPQQEETTYYQTALPGNDRYISVGSQADTNVIDLTGDDKDDLQRAIALSLAESNRAFRETGITDEEQAISRVLEASIAENKACLKRTPTEVWRDSRNPYDRKRQDKAPVGLKNVGNTCWFSAVIQSLFNLLEFRRLVLNYKPPSNAQDLPRNQKEHRNLPFMRELRYLFALLVGTKRKYVDPSRAVEILKDAFKSNDSQQQDVSEFTHKLLDWLEDAFQMKAEEETDEEKPKNPMVELFYGRFLAVGVLEGKKFENTEMFGQYPLQVNGFKDLHECLEAAMIEGEIESLHSENSGKSGQEHWFTELPPVLTFELSRFEFNQALGRPEKIHNKLEFPQVLYLDRYMHRNREITRIKREEIKRLKDYLTVLQQRLERYLSYGSGPKRFPLVDVLQYALEFASSKPVCTSPVDDIDASSPPSGSIPSQTLPSTTEQQGALSSELPSTSPSSVAAISSRSVIHKPFTQSRIPPDLPMHPAPRHITEEELSVLESCLHRWRTEIENDTRDLQESISRIHRTIELMYSDKSMIQVPYRLHAVLVHEGQANAGHYWAYIFDHRESRWMKYNDIAVTKSSWEELVRDSFGGYRNASAYCLMYINDKAQFLIQEEFNKETGQPLVGIETLPPDLRDFVEEDNQRFEKELEEWDAQLAQKALQEKLLASQKLRESETSVTTAQAAGDPEYLEQPSRSDFSKHLKEETIQIITKASHEHEDKSPETVLQSAIKLEYARLVKLAQEDTPPETDYRLHHVVVYFIQNQAPKKIIEKTLLEQFGDRNLSFDERCHNIMKVAQAKLEMIKPEEVNLEEYEEWHQDYRKFRETTMYLIIGLENFQRESYIDSLLFLICAYQNNKELLSKGRGHDEELISHYRRECLLKLNEQAAELFESGEDREVNNGLIIMNEFIVPFLPLLLVDEMEEKDILAVEDMRNRWCSYLGQEMEPHLQEKLTDFLPKLLDCSMEIKSFHEPPKLPSYSTHELCERFARIMLSLSRTPADGR

SEQ ID NO: 35 - DNA, 4848 bp, Homo sapiens
atgaccgtggagcagaacgtgctgcagcagagcgcggcgcagaagcaccagcagacgtttttgaatcaactgagagaaattacggggattaatgacacccagatactacagcaagccttgaaggatagtaatggaaacttggaattagcagtggctttccttactgcgaagaatgctaagacccctcagcaggaggagacaacttactaccaaacagcacttcctggcaatgatagatacatcagtgtgggaagccaagcagatacaaatgtgattgatctcactggagatgataaagatgatcttcagagagcaattgccttgagtttggccgaatcaaacagggcattcagggagactggaataactgatgaggaacaagccattagcagagttcttgaagccagcatagcagagaataaagcatgtttgaagaggacacctacagaagtttggagggattctcgaaacccttatgatagaaaaagacaggacaaagctcccgttgggctaaagaatgttggcaatacttgttggtttagtgctgttattcagtcattatttaatcttttggaatttagaagattagttctgaattacaagcctccatcaaatgctcaagatttaccccgaaaccaaaaggaacatcggaatttgccttttatgcgtgagctgaggtatctatttgcacttcttgttggtaccaaaaggaagtatgttgatccatcaagagcagttgaaattcttaaggatgctttcaaatcaaatgactcacagcagcaagatgtgagtgagtttacacacaaattattagattggttagaagatgccttccaaatgaaagctgaagaggagacggatgaagagaagccaaagaaccccatggtagagttgttctatggcagattcctggctgtgggagtacttgaaggtaaaaaatttgaaaacactgaaatgtttggtcagtacccacttcaggtcaatgggttcaaagatctgcatgagtgcctagaagctgcaatgattgaaggagaaattgagtctttacattcagagaattcaggaaaatcaggccaagagcattggtttactgaattaccacctgtgttaacatttgaattgtcaagatttgaatttaatcaggcattgggaagaccagaaaaaattcacaacaaattagaatttccccaagttttatatttggacagatacatgcacagaaacagagaaataacaagaattaagagggaagagatcaagagactgaaagattacctcacggtattacaacaaaggctagaaagatatttaagctatggttccggtcccaaacgattccccttggtagatgttcttcagtatgcattggaatttgcctcaagtaaacctgtttgcacttctcctgttgacgatattgacgctagttccccacctagtggttccataccatcacagacattaccaagcacaacagaacaacagggagccctatcttcagaactgccaagcacatcaccttcatcagttgctgccatttcatcgagatcagtaatacacaaaccatttactcagtcccggatacctccagatttgcccatgcatccggcaccaaggcacataacggaggaagaactttctgtgctggaaagttgtttacatcgctggaggacagaaatagaaaatgacaccagagatttgcaggaaagcatatccagaatccatcgaacaattgaattaatgtactctgacaaatctatgatacaagttccttatcgattacatgccgttttagttcacgaaggccaagctaatgctgggcactactgggcatatatttttgatcatcgtgaaagcagatggatgaagtacaatgatattgctgtgacaaaatcatcatgggaagagctagtgagggactcttttggtggttatagaaatgccagtgcatactgtttaatgtacataaatgataaggcacagttcctaatacaagaggagtttaataaagaaactgggcagccccttgttggtatagaaacattaccaccggatttgagagattttgttgaggaagacaaccaacgatttgaaaaagaactagaagaatgggatgcacaacttgcccagaaagctttgcaggaaaagcttttagcgtctcagaaattgagagagtcagagacttctgtgacaacagcacaagcagcaggagacccagaatatctagagcagccatcaagaagtgatttctcaaagcacttgaaagaagaaactattcaaataattaccaaggcatcacatgagcatgaagataaaagtcctgaaacagttttgcagtcgatcatgatgacaccgaacatgcaaggtattatcatggcgataggtaaatccaggagtgtatatgacaggtgtggccctgaagcagggttctttaaggcaattaagttggaatatgcaaggttggttaagttggcccaagaagacaccccaccagaaaccgattatcgtttacatcatgtagtggtctactttatccagaaccaggcaccaaagaaaattattgagaaaacattactagaacaatttggagatagaaatttgagttttgatgaaaggtgtcacaacataatgaaagttgctcaagccaaactggaaatgataaaacctgaagaagtaaacttggaggaatatgaggagtggcatcaggattataggaaattcagggaaacaactatgtatctcataattgggctagaaaattttcaaagagaaagttatatagattccttgctgttcctcatctgtgcttatcagaataacaaagaactcttgtctaaaggcttatacagaggacatgatgaagaattgatatcacattatagaagagaatgtttgctaaaattaaatgagcaagccgcagaactcttcgaatctggagaggatcgagaagtaaacaatggtttgattatcatgaatgagtttattgtcccatttttgccattattactggtggatgaaatggaagaaaaggatatactagctgtagaagatatgagaaatcgatggtgttcctaccttggtcaagaaatggaaccacacctccaagaaaagctgacagattttttgccaaaactgcttgattgttctatggagattaaaagtttccatgagccaccgaagttaccttcatattccacgcatgaactctgtgagcgatttgcccgaatcatgttgtccctcagtcgaactcctgctgatggaagataaactgcacactttccctgaacacactgtataaactctttttagttcttaacccttgccttcctgtcacagggtttgcttgttgctgctatagtttttaacttttttttattttaataactgcaaaagacaaaatgactatacagactttagtcagactgcagacaataaagctgaaaatcgcatggcgctcagacattttaaccggaactgatgtataatcacaaatctaattgattttattatggcaaaactatgcttttgccaccttcctgttgcagtattactttgcttttatcttttctttctcaacagctttccattcagtctggatccttccatgactacagccatttaagtgttcagcactgtgtacgatacataatatttggtagcttgtaaatgaaataaagaataaagttttatttatggctacctatgtgtttgtaagcaggtatattgtatattagtgtattagtaatactagataaatgaattttgtctggggattaagattggatagttaatagattaatacaatcttttaattctgctctaatgctagcaaattggaaaatgtttaagtctttgacacttaaatttatctatatttttaacaaagttcttgaacttagtatggcaccggaacctgttttgaattcagtcaggtttttactcaagtaagtggttgattttttttaagtcaaactacactgaaacttttatccttttcttagattaatcttactttttaaatgtatttacaatatacagcaaggtgattatttcaagagaatcccaaagtacttgaataagggctattgtaaaatttaaaagaaatatttatatatacacatatatacacatacacacatgtatatatatattcttcataatggaggacaatgttttgcaatatataaatcattctatttttgtaaattgtatatcactttaattgaaaatgttctctactaattaatactgtgaaacaaaattgatgttgtttaactagaagttatgagtatcttaactgcctttattccttttcaaaaaggaaaaagctgtagaacattttgtagatgaaactactgtttaagattaatgaattaatattgtgaatgaaaatcaaaatccatactttaaaggtaatcatgttactaacaacctatttttgaattcataaaaatttctttataaatgatgttttgtgaacatagtaaaatagaccattatactatgtgtatgtttgatacagcgtcgccaaaactagtgttctttattagtgcctctcacaaaagatcctggatggaggagtaagatgaaatattatgctattatatgatgctgtttgtaaaggtattaatgtactagtaaggtgttaatgacaaggaattagtactattcctgttgtaaagttagattttgcatattgtatctatcaaaatatgtttgggtttagattttaagttgtctactgagcagatttctgcattggttttccagtcctgttaaaagtttagaaacttcatatgtgtcatcacagcttttgtaaagaaagtatccttaatattttatgacattcta

SEQ ID NO: 36 - protein, 1085 aa, Homo sapiens
MTVEQNVLQQSAAQKHQQTFLNQLREITGINDTQILQQALKDSNGNLELAVAFLTAKNAKTPQQEETTYYQTALPGNDRYISVGSQADTNVIDLTGDDKDDLQRAIALSLAESNRAFRETGITDEEQAISRVLEASIAENKACLKRTPTEVWRDSRNPYDRKRQDKAPVGLKNVGNTCWFSAVIQSLFNLLEFRRLVLNYKPPSNAQDLPRNQKEHRNLPFMRELRYLFALLVGTKRKYVDPSRAVEILKDAFKSNDSQQQDVSEFTHKLLDWLEDAFQMKAEEETDEEKPKNPMVELFYGRFLAVGVLEGKKFENTEMFGQYPLQVNGFKDLHECLEAAMIEGEIESLHSENSGKSGQEHWFTELPPVLTFELSRFEFNQALGRPEKIHNKLEFPQVLYLDRYMHRNREITRIKREEIKRLKDYLTVLQQRLERYLSYGSGPKRFPLVDVLQYALEFASSKPVCTSPVDDIDASSPPSGSIPSQTLPSTTEQQGALSSELPSTSPSSVAAISSRSVIHKPFTQSRIPPDLPMHPAPRHITEEELSVLESCLHRWRTEIENDTRDLQESISRIHRTIELMYSDKSMIQVPYRLHAVLVHEGQANAGHYWAYIFDHRESRWMKYNDIAVTKSSWEELVRDSFGGYRNASAYCLMYINDKAQFLIQEEFNKETGQPLVGIETLPPDLRDFVEEDNQRFEKELEEWDAQLAQKALQEKLLASQKLRESETSVTTAQAAGDPEYLEQPSRSDFSKHLKEETIQIITKASHEHEDKSPETVLQSIMMTPNMQGIIMAIGKSRSVYDRCGPEAGFFKAIKLEYARLVKLAQEDTPPETDYRLHHVVVYFIQNQAPKKIIEKTLLEQFGDRNLSFDERCHNIMKVAQAKLEMIKPEEVNLEEYEEWHQDYRKFRETTMYLIIGLENFQRESYIDSLLFLICAYQNNKELLSKGRGHDEELISHYRRECLLKLNEQAAELFESGEDREVNNGLIIMNEFIVPFLPLLLVDEMEEKDILAVEDMRNRWCSYLGQEMEPHLQEKLTDFLPKLLDCSMEIKSFHEPPKLPSYSTHELCERFARIMLSLSRTPADGR

SEQ ID NO: 37 - DNA, 135462 bp, Mus musculus
  misc_feature (1)...(135462): n = A,T,C or G
cttgccaggcagccttaactcactgcactcatcctcagggctgatagcagcttgtctcactgcacaaaacttcctatagtgagctgtatctgacatgccaatttaaggtgttcttaaaaaattaacatgggatcaaaacaatcatattgtagacatttgagaggaagagttcttttcaaactgaaacagaaagttttacctacaagttacaaaagcaccttggttgtagtaatcgcccgcgcacacagggcgcagtcaggtggcttgctaggtgacttttcaggggggttcagatgaagcagaaccatgccattacagtcagctttcaaaatatcatggcaatgtagaaaaataagaagaatttgttacagaatgcagcacaataaaaagaacctgatttagcttatgaacacatttgcctaggggttaaaaatgtataaaattaatttttctgtaaaggaagcctagaggattgaaccttggctgtagacactgaaaaatataaagttaaacgtgttatataacagagccctggatgtcctgggcttggtttgtttttttcttttttctttttttctgtagaccaggctgatgtcagactcaacctgacagagatcagcctgcctctggctcccagtgctgggactaaagctcaccgccacctcatgctgtaaaggaaagcttctcttaatcacatgctaattaatgtgagcaaagcctttgattggcctaaaacacatcacgtgggttcatgacactgtcagttttgattattctagaacatacttgtatatagtaagaaagaatagatgtaaagttacaactatattaaattttggaatgattatgaagtagtgggtatggagccatttgctatgcattacagccgtaattcccctcactgtcaacacaacttgttggaagtaaggattgagtgctgcctgtattgaacgtgtcctgtgctctctaccatccttgctatggatctaaccttctgaggttacctgcagttttcagatgctctgcatcttcgatgctcttcaaacgtctcacccctcctttacgattcagtctgttgttcgaccgcttgcttctctggaaagctggtcttaagtgattcccatgtatttctcttttgcattagcctggtgcctaaggcatcagtcagccctagaaagctgtccagctcactgaggaacctctgcctttttctatcctgtggcccttgcttgccattgtgctcaggtttgctcctgatggacaaggctgccctcaatatatgtatgctgatctagcaaagagaacaaattattttcatctgtagtgctgcctaaaggtttgcttccccccccccctctctcttttaaatggagtagaggatattactggctagttatgctgggtagatttatttcaactccacacaaactgtagtcatctgagaggaggaaaccttgattgagaaaatgcctccataagattggcctgtgggcatcttcttaattagtgattgatgagacaggggcccaacccattgcgggtggtgctgtccctgggctggtggccctgggtttgtacgaaagcaggaggagcaagccatgggagaagccaataagcagcagctctccaggttcctgccttgtgtgaattcatcttagcttcctacggtggtggaataggtggtgggttatgatgtggaagtatcaggcaaataaaccctttcctccccaactggctttttggccatggtgcctcttcacagcaattgaacattgactaagacaccaatatatcagaattgcctttaatgatcccttgatgctgccttttgaacaaggtagtattgagtatatatatatatatatatatatatatatacacacacacacatatataatatatatatatatttttctttcgagacagggtttctctgtgtagccctggctgtcctggaactcactttgtagaccaggctggcctcgaactcagaaatctgcctgcctctgcctcccgagtgcagattaaccctccatttttatctttaaaaattttaattattattatttttttattttatgtgtatgagtgttttgcctgcatgtatgtctatgcaccacttgcatgcctggtgcccagaggagggcgtcagatttctggaactgaagttatatgtatttgtgagatgctgtgtgggtgctgggaattgaacctgggctctctggaaaagttgtcaaagacaccattccagttcctttaatctttttaagcaaaacaaaattggaattttttacaaaggggtttaaacacagattaagtatggatatcgagggagtgagagagctggaagaagggtagtacacagcataagatgcaggcagagagagagagagagagagggagagagagagagagagagagagagagagaggccctttttctcctctttttcttcttttggtagtttgcctctgcctcccgagtgcagattaaaaatggaggattaaaggcatgcgccaccacgccccgcagctacacttatatttttaaaacttgttttatgtgtatgggtgttttgcttacatatatttctgtctactatatgtgtgcctggtgtctagggggcggggcagaagagggagtcagatctcttggaactggagttacagttcgttccgtgtggaagccagttcctctgggggctggggggaacccaaaccaacaaaacagacagacaatcaaacaaaccaacaaaattcataccgaccaatctctctagcccaaatgaaatacactttaaaactctctctgaaattaaaaaaaaaagggggggggtgctttccagctttttagaacccctttttagtgtaaaagaatacaggaaatgtccattgcaagtgactgggtcagccacaggagcaccttacctctggtgcccttaagagtctggcatggtacctgggtggcctcagggtatctctctgttccctggttcttctgtctcacacccatttgttaccaggctttgcactcaggtgggtatatatataggaagtcattagctcaaaacagataaaaaagagatgaaaaaatattttctaatgttattttttattaggctgacaaatgtggtatcatgggctcctttgtctataatatcccaggatattttataacattaagtaagattagcaatcagtaagttttagaaaattcatattagtctttcttcagtctttagcaggatggttgagttaaaaattttcttcaacttaaatatgttaatttaaaagtatttatttctggatctgcctcttagctcttctatcttctgtattatagttagactctaagttagagtaactcagaataacattaaaaagttagcttagatagacagtttacagatacattttatttgtgtacaaggataccacatagtcgtgtatacagatttgtgtgtgtgtttgtgtgtgtgtgtgtccttgtttctcttgtgctgctcagtgttgaaagctgtggtgttattagactgtgtgacagacaggcttctgtggggccactcgaagttgcacgaaacaagacgaccatgccgaattcgtttcattggtatggtaggagatgtgtggcctctgggctaaggccagggtgctgcctgccagctcatggtctggcttcaaggagatggcttcagggagtgaacattaaacctgggctgctaagtgtgaaggcctttctctaaaggttgtaattttctgttcttgtaccagagtggcacaacttggggatggggcagttttgatcatttagaaaaaatgcccagggccttaagcgtcttaagttgttaggtcagtgctatttgttacctttacagcaattactggttctcagtaatgggggttgggaggttttcatctgaaaggcagtttagaatatccagccatctcaaggttatgtagaaataactgaaaggtttctgcaagaaacctgtgaaacagtacgttatgtaacatggcaccagactattgttaactgaaatcttttgccttaagaaaacgatcagtaagcagatggacatattgtaaaccacccttagatgtccactgcttagaacctattaaatattcaagtctgccactaagaactggtgaagctttttggatgaagtcatcgttgttggtcagttgcggataccagaaccttcttttcctttaaaagctttaccattgtattgcttggttggtttcctggaacaagtgtcacttgttattgtttgttctcacttcgagtggtcctccaacctgccactgaggaaaaactcctagactgagagcaagtgtcccaacattcatatgcagattccacgtgcagggtcaagggtgggggtggggctgagggatgctctgagactgtattttgcaaagtggctgaggtctggttttcctgtccccagacccccaattcaaagggcaagcctctaatctctaggaagagtgagggaaacatcgtacagcagaatgcacggtgctctgtgacccttggctttaaggctttcacacgaagcaagccatgactcattgagtcagtagtctacagaggattggccgttctcgggactttagagaacacgcaagggcctgactccgtggcagagtccagctgagggagaaggagcaggaggaggatgtggtcctgcagggacaggaggatggtgaggtggtctaggtctagacagacctgagacagcccagcaaactgagcgagttcggaatcctccaggggatttactagagcagctggctgcctggggacagggccacatctgtttggttgagtgttggatatgcagggtgtcggatgtcttacatcatcatgattggttattatctggtgaaaaaaaatacacgccgtccctgcaatcattgttaaggtttaaaactcactttatggttctggggatcaaatccaaggtcatatatttactaagcgtgccctccatgtgaagttgcatgaccagtctctcattcataccttgtttgtttattcactcctttatttacttctgtggtggtgtttttaagacaggctctcactcagtagcactggattgggattggataagtagaccaggctgaccttacactcacagtgaactccacctgcccctacctcctgaatgctgggattaaaggtgtgagccacaccacttctagctcccaggtttatttttaatacattatttggactaatccatgccttcaaaaggaacaccaccattctaaataattttctgtacagttcagaattattcctaaaatgatcaaaatggaaatctgtgttaggaaattgaggaaggagagatgtggtaggttgaaagtgtagttaaaatgaacatatagaaaaataccacatagtatagcgcaggggatgatattggcctttgaatcaatacaaactttcgtgaccaagattgtcactattcaaaatggtctttctccaacgggaccttcaggaagcagtgggtagcgtttttgtcggtgggtttctgcaccgccacaggtgttacatctttgccctgtctgatgagtagcccttgaacacttgaattcatgtggtttttaagagtcagaactgcattttaaaattcatttatttttaatgattttaaaaggcaacacatggctggcttagggagcacaaccgtagcgtaccccacagtgcccagggacattaacgtggaggaaaatgtgatcttggccagagagttccggaagggccccgcttagtccaggaggcagatttgaagctgcctggtgatgaactgaggttctgatgttgtgatttggaggcacttcctgatttctttatctggatgtttgtcatctggagagatgccttgcccaaaggcaagccttggccccactggacttgcctctttccaagttggctgttgaaggctgtgttgccagtggggaggtggctgcccatgggctctgtttagtactttcagtttgaattcaggctcagcagcgaaccctttatcttctgtgtgttcacttatcaccatgtggattccgttcttgtcttgatagtactgtctccttggtgacagagtggcctctttctgggttgtggggagggtggtgatacactgtgttccagcggcagggcatgccttgggaaactgatgtatacttccctccatgcagagtctctgccagttcttttcaggacctttggaggtaaaggagagaagttgagcaagccacccacagtggagctagcagggagcccggaaatcctcagtatctcacgggcaaacaccctacaaaacttcatacttgccaaagtgtgctggacattcagggaagagctctgctgtccgagggcttgaactagaggaattatttgcatccgaaaggtgttttgaattcgtccctttcctggataggtttctgatctgtgcctgtgaataaaacctctgcactgtggtactgcattaaagctcgggcacaaaggcccgagaatttctagaatttctagaatctgcattaagtagaacatcagtgtgacactgtccaataaaaactaacttagaatgacatcatttacagctcaaggatttctaactcctattgccttcgtgtgtatttgttgctcttagtgctgattttgatgtctttaatttcaaaaagatttagaaatctcgtggcactcgggatggagcccagggttttgtccgtgctgggccaaggctaggagctaccttctcagctcactgctggttctttgtgctgtttacttgtttagacctgcctgttgattcccagggaaatgaccagcagtccccacttggtcctcttacccgctgttcctaaccgtgcgctctgatggagttccttgagaggaatgtgcttctgtttggtgaagaagctgtgcttcatggcctggtctctgaccaaggtggagctgatgtgagcccctgcccgccttcatccctgctcattccttacagttgcctgtccattcagggaactgtttgccattcaaactttaatctaggttccattaacttatataagggcttttttcatctgtgaagaggagcatgggccagaggcccaacagtgcttgccagctctgagctgcttgcaagtggcatcgagcttctgcccatgctgatggtccccttcggtcacagtcctgtgcccccctctcacctcggcaccagtgcatcttgtgaactctctttgagttacaccccagttattaaaatgtttctctagggtgcatttaatgcataactactaggaagtgaagcattttttctgattgttactcttaggtgtggccctctcgacagtgatataggcacaggtggcattcagtgtagagaagggtgcagccttcaaagtggagctttattttaaacatgttataaaaactgagactcatgttgcagctgcaatttgggaaagtggtcattcacgtggtcttaataaaaaaaaaattgaccaaaatcaattaattaagttaggtcagatcgaaagtatggaccatggttaccagatggattcctggcacagttgccagttggtctgaggtgtcagaaaagattcaaggtggccttggtggccggagagctagcaatcactgatggtagatttcgatccacaggtttttaagtcctgcctgggccacacctgaggtggtcacagctgcagtgggtcacatgctcacttgatgccgtacaatgctggcatttttcatgcctccgggagtggattcttaatgggaatgaatagggaaccggaaggagggaaacaaagccaagcgtctggtataattactctcagcgagcctggtttgtctcttcttgtgcccgtacaacttcttttccccttctgctgggtccttagctgataaaaagcaagcgtcaagtccactgctgctacttcaagcaggctctgcagggccccgggcttcggggtgtgccccagcagacgaagctgttgggaaatgaaggaaggtcttccagaacatataagtgctattaccttccttaaactgcgtggtaagctggctgcatggctggcttaagctgttatcaattacattgtaacatttatttccttggaagttaagagtgagccttgagcaaatgaagactgactttttaagtttttttaggttacgcacaaattcagtttatcaatatttgttgcacttggcactggaatttctactccctgctctggacttttatttgttctggggggaaaaaaaaacccagcatatttttagagaaacagctttcctatgtacttgattctctcctgtctgacctctgtatttggagaaggtagatcagaaaatatatggcaggtagtggcagagtgaggcgacctttgacgttggctgacagctgtcacctgaaagctacagaccctctcaggtgtcatgtctgtagtgctgacagtgagcaggaatgttgtttacatttccataaacagagtctcctccgtgttacgaatacgttaggatagggcaggtagaagagagggttatctgtctcatgggtgactccttacagagttggttatatgcatattcttgtggcaatccgcagtagaattcacaactgagtctgtccagagcatctctggaaattctccatcgtgtgcttctgtgtgtcgcaagtgggtcagtgccacccagtgcttaatgtgctgtgagaggagatcagctggtgacagtccaaaggagtctcagggtccaggcatttttcttatgcgaaatcattcttgattagtttgttgattcagtaagcattgaacaaaaccacttttctgttttggttgttaaagcagtcttcaaatcaaattggttattttaatatgaccccagatctatcagagtttatagctaaggcagaaagctgggatgctattcggttagcataggaggtgaagggatgtgccagctagccccactccctcctgctgtgtcctgctttgtcctataaggtttttaaaaggtctggtggatatttttaactttttttctgttaaagtaccatccagttttggctagtttctgaagaggtctctgtctctaccaacaggaatagtcagttgtctacagctagtctttgagtagtcacttagccctcaccacagccagtggtggggtaaaatggagcctgtgtcttgaccctgctaccatctgccccacaatcgccccacaattctggaacgtgatgggcccagagccatgagtgaaatcggtcctcacggagaatgaaagcttcacttgtggtctctttctgaatcttgcctattcctgctattaagcataatgaaattatgaatttattgtgttttcaagctcgcttttcaacctcattacgggtgctttcttgttagatgcgtctgttgccgttgcagagttgtatgtgggctgtaaatatctaatttgtacaaaatgactgattttggtatttgtataatcctccagtcaatttaactaagttgggcttttcccagtcctcggtgccacgctcgccgctcatctgattaccgctcatgggagtgaggttaaggggtgctgttgggaaccagagctttagcccagcagatgggctgccggctatattcatacatctgcttgcctgctgtggcagctgctgctgcttcacgttgtgtccttttgttctgttccatccaagaacggaatgtgaggaagtgtagtgaatggattaatttaaggttaggttagtgttgtgctgcctttccacgtaaccgatcagagtgcttctggtagaagctaatgagtttcccttaaactgaactaggtttgtaaaatacagctcagcaaggggcctgggttggcattgttgatgggaactaaattcaaatgtgtaaaataccggcagcttttatcatttgttcctaattctttgtttccttttttctctcttctcaccccccactcctttccaggacctatatccagacttcgcccgcccgcctgacactgcagggtccgagagaattaaggaaatctagaatgacacgaagaagattagttaaggattataggttttgaggacaagcaccccagaaaagtgaagcacagacaagctcccaggctgtgttcggaggagccgtgtgttagaagaagatggcggacccagggatgatgagtctttttggcgaggatgggagtctgttcagcgaaggcctcgaaggcctcggggaatgtggctaccccgaaaaccccgtgaaccccatgggtcagcagatgcccatagaccaaggttttccctccttacagccatccctccaccatccttcacctaatcagaatcaaaccaagttgacccattttgatcactatagtcagtatgaacagaagatgcatctgatggatcagcctaaccgaatgatgggcagcgcccccgggaacggattggcgtctccgcactcacagtatcacacccctcccgtcccccaggtgccccacggaggcggtggtggcggtcagatgggagtctatcccggcatccagaacgaaaggcacgggcaatcttttgtggatggcggctccatgtggggcccccgggccgttcaggtaccagaccagatacgagccccctaccagcagcagcagccgcagccggctccttcggggcccccggcacagggccacccccagcacatgcagcagatgggcagctatctggcacgtggggatttctccatgcagcagcacggccagccacagcagaggatgggccagttttcccaaggccaagagggcctcagtcagggaagccctttcattgccacctcaggacccggccacctgtcgcacatgccccagcagagccccagcatggccccttccctgcgccacccagtgcagcagcagttccaccatcaccccgctgctctccacggagaatccgttgcccacagtcccagattctcccccaaccctcctcaacaaggggctgtcaggccacaaacccttaactttagttctcggaaccagacagtcccctcccctactgtaaacaactcagggcagtattctcgatatccttacagtaacctaaatcagggattagttaacagtacagggatgaatcaaaatttaggccttacaaacagtactccaatgaatcagtcggtaccaagataccccaatgccgtgggattcccgtcaaacagtggtcagggactcgtgcaccagcagcctatccactccagtggctcactgaaccaaatgaacacacaaactatgcacccttcacagcctcagggaacgtacgcctctccacctcccatgtcacccatgaaagcaatgagtaacccagcaggcacgccgcctccgcaggtcaggcccggaagtgctgggatgcccatggaagttggcagttatccaaatatgccccaccctcagccatctcaccagccccctggtgccatgggaatcggacagaggaatatgggccccagaaacatgcagcagcctcgttcgtttatgggcatgtcctcggcacccagggagctgaccggacacatgagaccaaatggttgccctggtgtcggccttgcggatccacaagcaatccaggaacgactgatacctggccaacagcaccctggtcagcagccatctttccagcagttgccaacctgtcctccactacagccccacccaggcctgcaccagtcttcacctccacatccccatcaccagccttgggcacaactccacccgtcaccccagaataccccacagaaagtgcctgtgcatcaggtaaggggtgcagacgcctgccctgtggcgtgaaatgcaacattgttaacttgtctacggatatcgtaggttgcctcagagtcgtgaccttccccccaccccccccctgccaaattggttcattcattcaggagttctttaatcactgtcctgagaattgtgctaggtctaaagctgtagtgacttagtgttgactgagcctaggtccactggttagaaaaagattctttgttcctctcctctcccccacccccttgctctctgtttgaagactacactgtaacttggtttccagcagttgcttgtgcattagcatccactatagctccttttctttaccttctgtgggtagctgtgaaatatgtgtttctgtggtccttaattgacctactgtcgagagagtgggaatgtaagttgtgagctgtaggaaatgacagcgaatggtaatttataggagttgctttgagatttgtgtgccggcactgaaggatcacagggttttataagttaagacttttgtagctttgccaatttgtatttacaaaggcacccctccccctttttgtggattttggtctccacggccttgacttgtgaagagtagtgtgtgtatgaacagatttttctgaatgcatcttcacctccccctgggcctacaggtcttcatggggcacagtggttgatttcagaattgtatggcatactggttcttcctgatggacttaatcaatttgggaaactatgacctgtgtgtgactgcaaaccagagtgaaagatcatgagtgcttatgtggcagatgtcccggaagaggaagtacctgggaaggaagagtgcttgaaattccagtaaatctttgcttagggaagtgacccctgcagacatctcatgtgctttaaggtgatttccccaaacatgtatgtgcacctggagttgagctctcttcagggagaagcagctttgagagggaaggctcaggccagggagaggatgctaggatcctgtatcctgttttacggaatttgacttaaatgaggaattactcctggtggccatgtcatcgttggaaaacttgggtgagcaacaggaagtgggaaccagctgtccaggcttgcgaagaaagttgggatcagagatctggtagtggaagcagagaaggttgaatctgggtgaaggaaaggctttgccttcacggtgagttcagtccacagtcaacagtcaagtggtgctggggcttcagcctgactttggctgccagagcaaaggtatagttgcttcagcctggtgcgcccagtgtctcaggagcactgcagagatggctcaccgtgcccacccatgcatgggggcagagcagacttcccatgagacagagtggtcagccttctggaaagatatccaggaagtctcccctcactctttcctgcagcatgcccagaggctgataggaaatgggaagacagctgccatcagagctgtatgtcctgatggagagccagcctcggagccagctctgaggtttcccttcctgttgactcagggacaaacacctgatgggtctgtcctaaggtgggccaacctctgttacctccaaggcagaaatgaatgtggcctagttttgggaaagtattgtgttagtaaagaagggatcgtgctgagaggtggttgtatacacctttaatcccaggcagaggcgggcagatttcccagagttggagactagcctgggctatgccgaaaaccttgtcttgaaatacaaacaaacaaacaaaacaaaagggagggggggaatagaggggtctttacaatgcttgtttccttgtttctgacttttcatcccagcagtgggaaggccaacagtttgttggggctccctgaggacattctggtggcccccagaagagaagtgctctcttacttactacttacagttttcagaggacagtagcagccctggcttctgagccccatgggggccagtgttgtgtgctatatagtctgggagaccccgaggggtctgtggtctaagtgggcacctcaaaagacaaagtcagaacttttctaaggccgcaggcccgggcatttgagctggtgtttcttcataggctcagctctgtttgtatttttcttggcatttacttccctatttgtgtttaacttggtaacctctttagttttgggggcaatcagttgatttgaaaaataaaatcagaagggtgtttgaatctctgtttgcccctaagcaggttggtgacacaggataagtgatttaacctccctgaacctgatccttcagtgagaccagaatgagagcagccccagaggctcgggtggggtaacgcccctcgacaatgaactttcatctctagggtgtagcttatgacctttaccctcgtgttgccaggtgtgaagaggttggttgtgaataattcagaatgctctcatgtgatctcgcctctttctgaatgactcagcctgggcaactacatcattctaactgtgctttgctcgagaactaccaagtccatactgaatttcttgtaagataccatgggagttcaagattgaagtatgcaggaatgcccaccgaatttccacagacatacaagcttgttgagtttctcatccaactcacccagccctgagccctggcagtcctagaactcactctgtagaccaggctggccttgaactttcagagatctgcctcctgaatgctgggattaaaggtgcacacaaccactgtccagcaggttttatacttaaaaaaaaaaaaaaaaagaaaagaaaaaagaaaaaaagttgtattcctgaactatttcatggagagaaagcaaacacttggtgtcatctcaaagcagttctgacattacaggccccagccatagaatttagaaacagtggtcagagccagacattccaaccctttaccttgagcaacttccttagccacagggccttcatttcatttctaaagaaaggggcttctctactttctgggtggaagtgcagtgatattagcagtaccatcttgtgaaagcccagtggggaccccaaaacaaaccactgtcctgtagcaagtgtccagagttacctgtcgccaagttagcttcactaattttagcgtcagacattgttttgactttatttcctgatttcatggaacattactcaaacaatggaggtgctctctgtgcttttggttgaaagacagaaaacagctttgcttttagggaaagagagagcccaatggggaagtaatgctccttatggaggtatggaggatcagtctgagtcgagggagagtggatagaggctgaggacaacagctaaggcttagcaagttgtgatacgaagttgatagaatggctcaggccttgcctatctcatgacctgaaacatggcattgagcacagggtacaccctctgctctatattcctgcaaccctgaggaatatgaagggagagaaggagggcttagtccaggggtaggcatctatccctgtgcaccaggagttgttcatttgaagagcttctctaaatgggtcttctctcatgtagctaagtcccaagttgctgaaagactagtgtagcccagttccgtgttgcctagttccagggtcattctctctgatagaaagttccggtggagtttttaggatgtgaaacactgtgtttttagaataaatgtaatttggatgtatttgtgttccattccttagtttgtcccttaaatactgaccataaaggagaatagaagttaaggtgtagacaatgggtaataatgctctgtgctatccccacatcgtgctgaggtttctagaaataaataaaagatctagaagactcagtggttgttgttgttgttgttgttgttgttgttgactatactgtgccatcttgtgaacattttaaaagcctctgggaaaccttttcctggaaacctgacttagtccttgcctgacactctgctttgtttttggttttttttttgtttttgtttttttttggtttttcgagacagggtttctctgtatagccctggttgtcctggaactcactctgtagaccaggctggcctcgaactcagaaatccgcctgcctctgcctcccaagtgctgggattaaaggcgtgtgccaccacacccagcttgacactctgtatttatccaatatgatagaatcgttagccactgttgtaagtatatggggaaatttggccgtatatcgcaagccacctaaatggaaattgtaattagagaatgcagaacgctttttttttttttttttttagtgacaggaacatgcatcatctgtgactactacatatgatgtcgcccatgcctttacacttgtaaacttgtctgcgcaagctggaaaataaaagacactgtaaagaaatccagcttctaacatgagtggcgtttctgggcgtttccatgtgcacacacctgcagagcatgggcctcctgttgaacgtcctgggagcagctggcccttgcttggcagcacagtcgccccgcccgcttgctggggtctgcttgcttcttcatgagcactcagtaaagctccacgtttgccctttccttcctttccttgtagcagcctagtgactctcatgaagcctatcttctgactggagtttgcatatgctcagcttcctgagagatctcctgacaccttttcctcctccccagagcggatttacctcagaggtcagaattttagtgagtttaaaatagaaagtgccaagtatagagttaaagtgctgcagaaaacacgatgccttggagatagctgtgtcttctagatggcttctgttttgtgacaagggacaattttctatggctatcaaatttgtcacataataagagtttagtttttcagttacctgtaaagttgcatattaggccactgttaaatgtcacaaggagctaagtgactttgttaacggtgtgtgcttgtgtgagtttatgtgtgtcacatgcatgcagaagcccatggtggccagaagagggcatcagatctctaactggggccataggacgttgtgaatccccatgtggttgctgggaaccaacaacctttggtcccatttaaggacagtgaatgcgctaagtcctgggctgtatctccagctcccaagttttaaatattgttgagacaggggtcttgctgtgtggctcagactaccttctaactcactgtgtaacccacgctaacatatgatcctctgtctgccccaagtgctgatatatactggagccttgtgcctggagtccattgttagatactgccatttcatcttgagtcttgggttcttccatttaacaacaccttagaaaaattagcatttgctctcacccaagcacttgattaaaggcagggatcgacagtgtgatgtttggggagggaggcaaaggcgtatccttaggtaagcctggggtttcgttatttcagtctaacgtactgcccagcatcgctcaagtgtttattttgttctgcataagacacacacacacacacacacacacacaccttatatagaggatatagatcagaaattgtttaatgtaattatggcacaagtgacacacacacacacacacactccttatatagaggatatagatcagaaattgtttagtgtaattatggcacaagtgacacacacacacacacactccttatatagaggatatagatcagaaattgtttagtgtaattatggcacaagtgacacacataaacacacacacacacacacacacactccttatatagaggatatagatcagaaattgtttagtgtaattatggcacaagtgacacacatacacacacacacacacacacacacactccttatatagaggatatagatcagaaattgtttagtgtaattatggcacaagtgacacacatacacacacacacacacactccttatatagaggatatagatcagaaattgtttagtgtaattatggcacaagtgacacacatacacacacacacacacacacacacacacacacacactccttatatagaggatatatagcagaaattgtttagtgtatttggcacaagtgacacacacacacacacactccttatatagaggatatagatcagaaattgtttagtgtaattatggcacaagtgacacacatacacacacacacacacacacacacacacacacacacacactctccttatatagaggatatatagcagaaattgtttagtgtatttggcacaagttctccaagacagcggttcccatcctttctaaggatggacaagtgtccacattgctaggtagcgtcagtagatgagtactgaaaggtctgcatgcatgagagttctcagtacctttcttgagggagaggtcactgagaggtcatttgtgtgaacctgtaagaatcactggtgtgtttctttggaaggtggcttccagccattttcaagattctagctgcaagtggtgtatggatactgtgagcggttaagtgtctgggtcagtacaggcctgttctctgctgctttctgtaatactgttgcctgaaaggaaaaagccttacttttaccagaaatctccagcaaccttctgcccctctctgtctttcaccctctgcttgtttattctctgtcttagccaccattcagaaagggagactctggtactgtagaacatagttggctgggaagtagttaataagcagactgagagaaaatgagggagtaaacattggtgaaagtaacctggggaagtcacctcgcagactccgtagttggaactgtcaatctgtagataggctctaaggacacagagagatggctttcatcttcccgtgcagcagtgtccgccctcagccctgtggctctgtcacagcagaagccagtgtcaagtgtggaaggaactcgggcttctgtctgacaaacaggcgaaaacccactgaatacttgagtgtaattaccagtgggtgctgggtgaggtctcagcttagtttaggttggtttgtttgtttttaaacttagttcttagaatggctttttaaaaaaaaaacaaaaaacatttaaaaacaggagaaattaagagaaactgggaaagtaccaagaaacagataaaatcttacagagccaacacagaatcagaggtcaccattctagctttctgggaggccatttccaatacatacaagtgacaggcaggttctccagtttccttgcctcttggtttaatgtttgaatgaaagttctctccctctcaccnnnnnnnnnnnnnnnnnnnnnnnnnnnnnnnnnnnnnnnnnnnnnnnnnnnnnnnnnnnnnnnnnnnnnnnnnnnntccctccctctctctctcaagtaatttggcatcataggtttcaggagattctcaagcccttagtgaggattgtgtaagcaaaagcttgtactttaaggtgtgagctaatcccagcaggttttctgtcttgtctgtttgagccacaggctgtgatgaggtagtagggcaaggaggcatgctgggaaacctatgacgtttcagaaggacacctaatcccgaagcaattcccaagtggggaacagaactcaggatctgcctggctcctgataggctcggccaccagtttgcagcagtacataggaatcttgtcctcacccactgatgtttctgggcttctagcagccatactgagtggtaggggattgcagactgtttccctactctgctgagggaaggaactgtaggttactaggtcactcatcagtgagggagagaacagataggcttaaaattcttactgaatatgaggatattggaattaaagttcaatttttagagcatgtttcttgatggattttttacagcctgaatattctttttaacttaaaagaatactaacttgtgagattatttcatagctatgatatgcttggtttcatcttcaacttaatttatcttaaaacatagtttatttttattgaaagtctgagttttgggttgttgtttctgtgtgtatgtatgtatgtataccacatgtgtgcctggtgcctgcagaggtcagaagagggcatcatattccctggagctggaattgtacatgactgtgagctaccaagtgggtgctaggaactgaacctggtgctcttaacccctgagcacctcagcacttcaccagtaagtgccagcctgtgtgaggagacaccctgcttttccttgggtagccccagatgtgggcggtgaagaactggctggagcattacccagtcctcaccgtcctcgagcagaggttgagcaggagacacgcgctgggccacaaatgggagctgacagctactgtgctttataagctggctgtgtttctgactgcatgcatgctgcagagacagtctcatgaaggattccttctggagactgtggaggtttccccagagtaacagaggcaagtcagacttctgcaggcaccgtttgatggtttagtaaggcaccaagtggtagttcgctcccatgggccattgctctctccttcccctttgaacatgtgttgtggggacagggggtcctgttaagggaacacagccatcttcacactggagcaaggtgctgtggcacatcctgtgtctagtgtctgactcagtaggttatcctctcgttggaaacaatggctgaagacttagctcagtgaggaagtattttgggattctaagtttggaaagatccgtgcttagaactaagctccaagtcacagcttttgtttttacaagagagttaaaagtcaaagttcacatagaaataaagtccctcctctgggaataatcaatgaagaaaacaaaaacaaagccagttaagagacttcataaaatcaaagccacccagacttgtagattggtttctacccgctttctatgaactcaagtctaagaagcaaagtggaagagatgtcagcatgcctctttgcctgtgtcacctgatgccctctagttgatgttatgccccagcctgtggcactgtcaatcctctcatccctggcagaggtagctggtgggggcaggggcttcatgggcaccaagagctccattttccccggctctccagtcgtttttaagtcatgtagtgtacttagttcactaacctctagtttcctgaggatgataatgtaccagtttcacaggattattatgggaattaaatgagatgttggcgtggagctttagcccagcatgtgacatgcgataagtgctcagtaagcattaaatacctttatcatctctgttgccccagtggccgtggaagagggctcttggagtctttcttgtttcgttctctaccttttcacttagattatgaatacttcattttcaaaaccaagacatcactaatgccaagactcctcagatttgtttttgtttttgcttttgtttttgtttttgtttgtttttttcaagacagggtttctctgtatagccctggctgtgctggaactcactctgtagaccaggctggcctcgaactcagaaatcaatccgcttgcctctgcctcccgagtgctgggattaaaggcgtgtgccaccacacccggccagatattttttataaggcaaatggaaattcatgattttaggggcactatagggatgtatgtttcttcactgaattttaagaaacaatgcatataacataccatttgcggtctagagttttcctggtttcactcgagatgaaagcaactcctcttagagcgtagaaccccacgtggcaggctaagttggcatcctgtttcatattgctagggagttttgctgggatccttgtatccaacaggttaactcactgagccggatgtgggtcaacgcactgctgtatgtagttcagtagtacagagtcttcactgtgcagtgtgtgcttaagtctcaagtcccatgatccactccggtcttctagtgtcttccgtgtgtccccagaagcctgggatgacggtcaactctgtgcggtgaatggctttctttctaagcacagtgaagggatagctgggaattcagtgaaagctgtctgactgtagatctttttcatgtttttctttcccttaagaagtaacttcacatgctttaaaacaggagaagtgtgaaaactttgcagcgtagcgtagtagctaagttcaaagtctccatgaaggcagctcacattttcaaaaagtgagatttcatttttggacgcagcttttgcataacttgtgggcttgtacaagcttttgcacacatggtgggcttgaattagaattgggcctggagtctagtgttgtgtttgtcaggagacaatacagctccatcaaagataatgattctatccagggagaaagccttttctttatcatattcaaactttatgtgctacagtttaaatatactgaatatatttcttaatgtctttatgcactatacatttttaaatttgtgtgtgtgtgtgtgtgtgtttgtccttttttgaaacagagtctctatgtagccctggctgtcctagagcaggttggccttgaatttagagatgaacctgcctctgcctccctagtgctggggataacggtgtgcatgtggcaccactgcctggccattataagtattattttcaataaaaatgagataaaagtgaactaggaattctgttccctgtcagttggagatgtttataaaatttttgttcatttgcatatgttgctttattgaaatgtagtatttatataatttatgtataagatgcaatattccctatatttataaaaatgctatagaatgatttcattctaggctgttacatacttttactgaatttgaagtttaagaaaaggaaaaattgtaatattgtgaactaaagtttgtccagaagtatctcatgttttctaagttgttgtgaacaagagcctgtcccgttctttgacatcagattggtagtggatttttgtaaaattcctgtggcctagtcctctgtgtgaactttttgatgaaaccgtctttatttactatcccgagttcggtggttgctgccacacatggacactgtgtccttgaagctgaatgagacctagggcctgaaggagtcactttgtttagctgttattttaaatgttcactttcttttaagggccagtcaagtataacaaaacaactttttatttttaattgctggaaagtaagatatgggcgacagttaatattaggactttaaaaagttaatggtatagatatctagtgtaagttttatgctcctagttttcatttatttatttttgaacacagtaagttcttcctgtctataagccccagggctagtgataggctgtggtcggcaacacaccatatgctaactcaactcatttaactacagtcgggtagccaagttaatccgccggctcctgtttaccatggaattctttaaaacaacacaaaacaacaacaacaacaacaacaacaaaaaaccatgaccaggtgcaggtgatactctggaaggttattaaagcattttagtcacatgtgtaatatgaagcgtttaaaacgaaggcaggtacaggggcattgctcttccgggttgttggccttctgacttcagtcaggagagactcatttgacaggtcttagtcagcaaaaggctctcacatgttctcatgtgagcatgttgtatgtgatcagattttttgtgagttgtatgtgatcaggttgtaactgagtgcaaaatgcttagttttatgttgtataaatctcaggttttagaaagttgaaaataccaatttgtatcttgttgctggagaggagagcccctaagaaggatgttatggcggctgaattcctgacccctgttcccacctggatgagctgccctgtaccccttacccccagcctcccaagctttttgccagccttgagggcagagacattaggtccagcttcctttgttgaaaagtgagtgggctctttctgctgtcaggccctggagctgctcttggaggtgtctaggacagcagcctgtagctgcctgttgttaggaagctcttgggacacacagggatggtttaaggagtgcactttaaggtctgtgtaacagttcaggctgtagtaagtgtatgcatgtgctaacagctgtaacttgtgtcagcacagggtccagacccataatcgatagagcaaaagtctttaaactctgttatctgccaaaagaatttttaaagttttaaaatctctgactttatctttatgtttgcattaatatgttaacattcatctgcgcagcagccaatatctcacttaaacagcctctgctcactggatggagtgaggcccatttggatattttttttaactacaatgctgcttggctcttttgagatgaatgaaactggggttcttatactttgggaccatgaactgtaataagactggggacacaagaaaggacgttctggtgaagataaggattgtgggaagaaaggggcagcagacaggagcagaggagccacatctcctggatgctcacctggcctgtctagcgttttctttatcctggttggaaggccaaagagaagaggcactggtgtctccaatgctgtttatttgctcatgtcttctccttgtaaagaaaagaaccccagctgccagtgtggcccctgacccatgttcaaagggcttggtcaggaggctcttgagtgtattgtggccagaggagctgctgtgcgcccacacaggtttagcctggaggctcttgagtgtattgtggccagaggagctgctgtgtgcccacacaggtttagcctggaggtgttcggaacaggctttaggtggagaacttgagtctttctatgaagtggggtagctaccttagtacatttcagtgaagtgagttgatagcaaccagaccaaagcaatgggttgactttcccgggaggtcaggcaccagcggtgactgctggtgctaggaggagtgaacttggacatggattctgctttctctctgatgataaagcaaggcaggagagtgagcaagaacatacatctccccagttctcagaccatcccatcctgagacaaaggtctgcagggaggaaactgctcgtccgttcacacatgagttagcttagagcggatcccaaggtctctgtatttttaatcgttacatctgtaatttgctacaccagagattagaactgaggaaattgaaaaaaaattaatttacttaaaataaaccattacattaccacaggtaacatctgaaaacaaaaacaactattttcaacaaaagaacagaatagcaggggatcattgtttaatatttttgctaatgattacatgtcctgttttctaggaggcagccgggtcctgggtctgctgcttcaggctgttgttttggttgagatatgtgaaagttatcggccctcacacacatgtaattatgagaggaggagataattatagatattccaaaactctacaagtgcttgactcacctggactcttaagtgtcagtgggaatgtgggggataatgccataccaattaaagatttatagactgttaattagaatgtgtgggtctgtacccaattctgagtgccttcatacccacccctgattctgtaacgtacgttattttgaaaacatttcattgaagaatgttcatcttctgaattcagtgtacattttaaaaagtttatcagaagtacttaaagattgaaaatgcatggaagcaggacaggcccagctctagggatgtaaatgagggctttgtgcagagagaccaggttttacagtcagaaacgaagagtgggtatttgtggatgcagtccacaggtgtatgcaaaattctgttttttttgcttaaaagtttatatttacatactgtaagtacacagtgttagttagcttctttgaagggagaatttatttcaagacaatgcctggcaaattcctgagtgtgaatctcttcggcttgcctttcatcctttcaaattaatgttccatgaagatgggcagcctcttcagttccagccaagcatggaggacatgctgaggaggtggccctcctgcttctgtgtgtagctgttctgttccatgtggactctcataatctccatgcaaaagatcaaaaattatgagtaattttaaaaaatcaaattttcctgtgtcgtccagggcattcttaagtcggctcccttcgtttcccaagtgcagatttgtagccataggagtgatagtgcttacttgtaccgtgtgctgtcctggtggtggcggtggcatatgtatcattgtgtcggtgccagtgcaagggaacagacaggccatgtccttgtgtgttataaagaaactgtgtgtgttacagaggccctgaaagaatgtcggcgattgccaagtatctaccaagtgtacattctacagacaggtgagagaaaattcctagcaccaaaaagctttctttacacaacagaaaatatatttttatttggaaagtgggcaggtaaaacagaatagaggtgttcacggtcaggaagcaaagagggatggagggcgactgttggtgcttagcccccgttcttgggtgattgagccagggacttgaacccacagtgggtcttccttcggtcctggctagcctagaacttgctctgtagaccaccctggtcccaaactcaacagggatgcacctgcctctgcctaccaagcactgggattaaaggtgtgcaccaccatgcccggcttgaacatactgttttgttttgttttgttttgttttttgttttgttttgttttgttttttaaatcatagcctgtggctctcagaagctcatataatgcaagatgtactcatgctgatttcaaaattccctgtagtctctaatagccttaacactatttaaaggtccaaagctcaggggccaaagatgcctccctcaataaggtgcctggcctgcatctatgaggacctaagtttgattcccagagcttttgtataaaccagctgctgtggagtgtgtctgtaaccccagcataggggaggctatatgtgtgtgtgtaaccccagcatgggggaggcaagacaggaggatctctgagctgactggccagctaggctagccagatattcagtgaattcaggattcaataaatgaccttgtctctgataaacagagaacccagggaagacacccaaaactatgccatggtctccaacagcatgtgtacccaaatgcatttgtgcacccacttacatgaggcagtccataattacatacatcccacgtttcttctgagactcaaggcagtctgaactgtgagcctataaactagaagactaagttgcattcttctacttacagcggtgatgggtaaacgtgtccactgtagtagggaggagagggaaggtagcaagaaagactgaacggaagcaagactgcaggcaggagtgcagacaccaaaccctgtagccacagttctggcatctggggttagtgacagaatcaactgggagtcagcagccttagaagccctcttagctctgctgcagcagcagcagcagcagcagcagcagcagcagcagcagcagcagcagcagcaaatgccaatggtctcctgggctagttctatttcatgcctgcagctttccttgctgggtatgttacacacccccacccccatatctggagtctacattacaatgcaggtttcatcttcccagatttatgccagtggggctatgcccctgcctcctattgcccgatctctggccttctggactattgtcttaggtccccgcgctttcacttctgggcctaccaaactagcacagggccctcactgctcagttctgccacctcaagatgctgccgccctccctcggatgacagctacaagcccctgagtggcatcggagctgacccctgggaacgcttccgtaggtggccttttgaatgctgaacccttcagtggtgttctcatttccgtgtttctaagctggagccttctgtgtggggtgctgccctcaaggtttctttcctcctgtccgtaatgtagaatatgagaattgtctgaagtattagcccctgtacaattagccttctctgggaaggagcgaaggcagcgtgtgtctagtggctggcgtgctgaatggtttccaggctggagttcacttgattgtatcaggtggtctctgcctttagggtgaagactgcttcttagcgaggttaggtttacaggtcagccacttcacggtctcacatgcatccatagttttttgttgctgttgaattataacagagttctgagtctgagctagccagttcaccatagaccaagcatggaggtgcatgcctgtaatctcagtatttataaggcagaaggttgtgggcatgagatttgtagtccttgctaatgatgaattctgtccagaagctcatggtacagcaatgctactagctagttgttattaccaatatcacaagcaaggcgtagggccagttacagtgcctgctatgcaggcataaggacccgagcttaaatccgtgtaaagagctaggtatggctgcctgtgccttgactggcattacagcacaggtcaccagtggggactcagtggttagcccacctggccaaaatgagagactgtggcttcaaggcaggaagacacaatagaggaaggcccctaatgtcctgctctggtctttgcctgtgtgcccatctgtgcacgtgtataggtcacagacacaaagaccgtcagctttcagtctccactcccactcctccaacggttgcagtctttacccatacaaagcaaccagttcccagccccccaacccccactttttgtgagccaggatctcactgtctctagccgagactggcctcggacttaagagtcttgtgtttaatcctcttgagttccaccaggcccagcataaagaaatcaccagccttaaagtatgtgaaagtatttatgagaggttgttcatttgacaagcaagtaaccactctcctttacagagcacaataggagaaatcctacagtcaggatgaaaagccagatggtcctaggggacctcagtgtcagaccagtgtgctttgtgtgtcccactttctgccatgctaataacgtgaagaataaactgaggtgtttggggtcagatagggaaacagggaggttagggtggcccttgaattggcgacataagaatttcttttaaaaatctcagcttttatctttacaataaaggtgttttgttgtactggtgctacatttgcctacctgccccttccccacatcctgatataaaagtcctgctgctttagaccctacggccacaccccacaccccccaacctccagagttatgtaatgttttctgcatggcgtttcttgtgctgtgatcagataactgacgaaagcagcttaagagaagaagggtttatttttggctcagagttggaaggagatggaatatgtcatggcagggcagggaaggcttgccagtggatactcaggtgccgagtttatagtctccgcagtcagccactggggccaggcgggtgctgcggaatgggtgctttccccttcctccttttcatttactcccagtctgtgggatgctgctgcccacattcagggcgtgtcgtcctttcttacaaacatgcccagcggtgattccaaatcttgccaaagtgaccgtgaaaacaaacacaacacatcttctcacgattttcctaaaatgtagatgtttgcatttgttaggtgagtaggcagggtcttcagaagcctttagcctagtgctggccgagccgctctgcctgaaggtacatgtcggggacgagggcactgacgtcccttcacacaaagacgctaaggttggttcagggctgagaccaggaataaggcaagtcctgccctcctggtgcctgagctttccatgtctccttggcctggtgaaccagttgttgtttttagaatgttttccctccagagccctcagtccagagcgtgcacccataattagaaatctctccctctgcaaggctgtgcctgcctcccagtgaacacagatctaggcttgttgcctgcctgagtcagtcaacactatctgggtagtgactactgttagcagctcaccagccatggatggcagtgtaacatgggagtaaagaacatggtgatggagcccagactgtcatttaggaagatgtggtagaattaaatgtagtttttctgggtctcagtttctcccctctaaaatgagaattgtacgtggacctgatgatgatgtagaggactcagatgaagccagtggtgtgccacgcctggcccatagcagttgtccataagttactgttgcagttagtgcgatattgttgcagtatctcttgctattgtattctgctagtgtccttgacccaatccccgccattgtgttctaagtggagtgaggccagagcttgtgcccattgtctgggccatcacattcacagggcacagcacacggagtctgtctgaatttggatatggagtgtgtttattagcagggtgttttgggggtggtgtcagggacgtcctactgaaaggaagggtccttgctgattctccaaatggccagggtgaacccagagccaatgctacatggtagctccctgaaagaagagtctggagggaggttggggggttggaggagacaggagtgctgagtgaggttagcacagaacctgtgaatggtcatgggtggtgctgtgctgtgtgaacaggatgtgaaacagaatcatccattatgttaaaagcgcaaagtcaaacaggcgaatcttagtgtgtgtatataaaatatgtatatagtctatttagtttatacatatgtgtagtatattttattgtttatttaattatagtatatgttatttagttccaaatatacacaaaatatttttaacgtgtagcatttgttgtcatttcaacaaatagcaattaatataaaatgatgttttcgtttgttttgactgtttgtttgccctgagtctttgatatgtgttgtgatttttatgcttgtggcacatctgtcgtactctgggctagactgcttcaagaacccatgcaaccgatgacatgggcctcagcaaaaaagacgtggccgtaagggtggggagaaggtgagggctgatagctggacagggcaggacaggactggaagactggcgtgctctctctgtgttcctgaggcaagtggtcggcagtttagaaaaattcaggagaaaaccttgaggtttatctatgctctcaggaaacaaggcaagggggtgagctgaggagtcacactgtagaaggcatgctgctgcaggaatggactccatgcaagtaaacctggggccctgtgggctcggagtcctgggaaaaggagctgatatgctgtgaatgccctggggctgtccctcccagtcagtcctgctctgctcctgccctgctctaccttaagctatggtcgagctccaggaaataggcacccaccccaacccagggctgtggccagagataggagctcgggggcattctcacacatgccttacccttttgctgaaggatcacggaaaagctttacagtcctgagggggacagggagcaggaagggcagagggagggacgcacgcatgcaggagctcttcagagaatggaacctgggacttattagataactacactaccactgtaccctctcagccccttttaattttaatgtcgtgaacaatcacaagccatttttggtattaataaaaagtatgctcattgtagttcagctacagtagaaaaaggtctgcacctagttaggggatgaaattctgagaccgcttccggatttctgttgaggcagggtgcctctgtaaggcagtctgtctcttcaggagtgaagggatcatggttactgtagggagttatctgtcaggtctctcacgcagggtgcttttctgttctgtttctatgcacccattcagtctccagtcatcacattgttcatttacaatgtgccagtctctttacaagaaccagaaataagggcacagaaattagctttttatccttttaagaaaaatcccagttatcacttagtggttggtctgcatgacaaaaactaagtgcagccatagtaagtctgtggagttgctccataaatccacactttataccgccaagttatctgtggggctggggagacaggtgaagcttgagccgggtggaaggggcaaggtagcaatttatcagtgcacagctccgtgctcccagacccaaaggctaaagtgtgccctcatttacacatcaccactgggcgtggtggcgcacgcctttaatcccagcacttaggaggcagagacaggcggatttctgagttcgaggacagcctggtctacaaagtgagttccaggacagccagggctacacagagaaaccctgtctcgaaaaaaccaaaaaaaccaaaaccaaaacaaacaagcaaaaaagaatctttttgctcaactaaacgtttacttccctgggctgggtaccagaggcacagagagcatgtgagatgttgctggacccagactgagggttgagagcggacatctgtgctcacacctgagggtgtggtgagacttgatgttctttgcagcactcagcctaaggagtgcatctgtgttccatgctcctgtccatcctcctatccttcagagagcagagaaccagaaggtgtcagtagtcaggcagtatggtatgctgagaggtccttggctttgggagggccttggccctgcccgtacagatcagggaaggccccatgaagagagtggagtgagtgaactgagtgttgcagagcaagtgtggatttatggagaggatttggagactgcttccatctgtccaagctctagattgggaaagagcaaagtgccttggtgtgactgccatggtggtgcatgggtgaaggggctggtggccagctggaacgtagcacaggcaaggccctaatccttggtgctgggggattctgacttgtgtagctggcagggagccctaggtggactgtgcagaagtgtagtccatttacactgatagtggccattcagaaagactcccggggcttcaaaaccatgagatgaatgagaagcagttctgtcccggcctggactgcagaaacatggaagagacatgttacctggaggacttgggggaggcaagtgttaactggtaatggacagagccaggtagagggagggaggcagatttctgattgggtcaggaaacccaggtgtggaagtcagtttagctgagggaggtgactttagtgtgcagatcctgggatgtcaccaggcagcctggagtcttcctgggaactgagcacctggctctgtcctgtggtgaatggactcatgagtgctgtcagaacctaagagagtaaagagacaaattctagacagcatgaatgaggggagccatgcgggtgagaggatccagctaagaaaatggatcagtgcagtccctcgcttggagttttacaaatttcaaatctatagaactgttgggaaaatattacaataagaaccagatgacaattctgggtcctggaggtggatagagaaccaggaagtttttcctcccctctctcagatgactgtggccatgtcagagtggatattgggcaggactgttggagagaggggcccacagcttagggtagaggtctgagctggaggcaggactttgcaaagcaccaggctagaggtagtatgcggacttggaaacatggtagagatgagactggcgcaccgcagaagtgacaggtggggaagataagccaggcagaaagtgtaaggaaggaggggaaagggccatcctggccggcttgaaagaggcagccagagtgagcagctgtgtgggctgttgctggtaggtcaggtgagctgaggagccagccagtgggggtggggtcaccttggcaagagagagagagagagaaagagagagagagagagagagaggcgctgtggaatattaatgtggttagagcagactgaagagcactggaggagaggaagtgaagacagcaaatgtcgttgctctttcaaggactcttctctacaggggaagagagaagcgggtgagagtgggaggaagatgtgtcaagaggctcagtaaatacctgaaatagttagcgcacgacacggggcagaaggctgtgcagatggggaggactggccatacaggaggcacacgaaggaggaggttggtggatactccccaaggcagacttctaaaccattactttacagagttgctgcaagggtcctctgtcaaagtggccagaatagggatagccttggctgtgctgaaggcttccaaggctctgggcacctgccggtgctcatcagtgctgctgtgccctggcccctgactcctggttctgctgcatgcccctggctcttctgtgtgtgctgggaagaatttgggagcctggaggcttcctggtcacaatgtcccaaggccagtgtccagcctccaaggtctcactagagcttttcccagtgaaccttctccacctccagtctcctgaccgcatctggtcttctgctggggttgaggctgggcagcctcgggccttcagtgccttctgcttctcctcctgtctgaggattagtcattagggtgtaagacttctcagttcacaacctgtgtggattttgtctacctaagccttactattctgggcataatgggcaccattttatacatatcgtgggaggactggaggcccggtgggggcctctcagagttttccttctgcacctttgagttcgtcactgtccacggcctagtgttacgtgtgacttctcatagaagtatatactgtaattggatatctcttcccgtggctcctctcatccaagctttgcttttgtagtggaaaaaaatacatattactggaaggtttcacttaggtttccagttctggaatattttaatctagtcttcatagatcttcagattaattttgtttttgtttgtttgagaaacttcactagtacttcctctgaaattacctgtactcctcacagcccatcttactggtgcttattttgataactctaacccaacagtgccaaacgaccttgagaagattgtgtagcaataccgatacataaatattgcttaaaacccctctgaatgggaatatcagtcttcttttcctttttctcttaaattatattttaaatgagaatgttagaatacaggtgttggtactttaggcaaagtgaaaatatctgatcggaagtcacctgaaatactatattttcgacacagtagtgaaggtaacagaaatagattactcagtgctaaatattttcaggtggacagtatctcagtgaagccaagggtgttgctgagtggatgctggtcctaagaccacgctgacttacacagctgtttaaactctagcagcttgactcaaagggtactgctgttttataactgtatttaaaaatctgttcctcttttactccctcaaactgagctcggagatataatgggacccattataggtaaaaggtctgtgactcagccatccagctactcaaactctgggctcttttaattgccaccattaaagctttagtacttttatctcataaaaatagatatcattgatgtaaaatgtgtgcctgttgaagatacatgtgtacctctgccctcacagttagctaatcagccagccatctgagttctaagttagttgggttttatgcaaatgagaacatgacatagatcacaaattttgttctgagttctttaattaagaagacattccagtggtactcagggccgagcctcactagaatctcaatctcaatctcagccctctctctctctctctctctctctctctctctctctctctctctctctcatagaaccttactttcttcgctttgtgttggatagaagctgtatttagttgatagaacagtggcgggtccctcggttccttgatcccaagagtgcagtgcttctggttcaaacactgggatttcaagaatttgatggacacacacagattactcttctgtctctagctgaaacatcagcttaaatgtaaatgtggtccttgaggtatttctctctgctggtctgctggtgggttcctgttgccaaaaatataagctctatgatgaggaaattccaaagcgcgatggaagctctgataattcattgaagccaaatattaaaatgtggacagcctgtttgttctgaacgttttttccagtgtgctagcaggctaccttcattcattattcacattgctgtgcacagagatgacacctctctagatgtgccatgagtgtattgcagcgaagtttagctccctacccagtcatgctcacatttacttctctgttgtgaaaatagcaactaattagtggggcatctccataggcgggcgagcctctcctgctctcacagtgatagggtagccctcagataagagaacagagtcttgactctaagaaggactcaaatccaaacaattctaaaatacaaacccacccacacaaaacatatgtgagctacacagccggcctctctccttgcccagctgtgtagattcaattataataattttctcagttgcataacattgctatttgtttattactgcgttattagtcagtgaatgaacctccctctttttgacccctcagcagtgtttataaaatacttaattgctttggtatcttctgttttgtgtgtaattccagctggaaggagccatggggacagagtttctctgtaagtgtataacagaatgtttctaatgtgcagtaaactttctttaaaaaggtgtgtgtgtgttttaagttgaaagtaaagttgttttgtttcaatctccttgtgaccctaagtagtgtcgtgggagccactggccgctgggcagctctgcacagggggtccgggaggacctgatgggagcatggccaacagtaaggaggcagttggcgctgagcttgagaaagtggactttgcctggtgtcagtcctgtctcctttttggtttttttttttttttttttttttgtgacttgggcaagttttttgtccccttggatgtattattctccgttagtgaatcagagaatgtatgaccacactcaatgaccccttcagcatagcgtctttacagagacacagggaaactctgcagtgtggtcaaggtgtgagctatctcacaggggaagaaggaccctcggggaaataaaccaaaaagaaggaagtgcaggttagaaataaggggaggtacttctttgaacgtgtgtagtgttgtgtggcatgttaccacagacttcatggcttatagccatgccctgctcctcctcagcattttcttaggtaggggtctgggcatggtttacccgaggccactcagggctctccaggatgcagagctcaggcagagtttctcactggaatcttcctgctagctccattgctagctccattcaggttgggcagaagtacttatggctacctggggcagtgttgctgggtgtctttcaatgctacccttagctcctggagactacctgcaagttatgcctaagggttccccccactcccctatggccactggcttcttcacagcctagataagattcttccctcctctttaaaaggctctctgatttaaggcagacttgcctaggataattacccctttgaggtaaccccaaaccagtgatttctcaccttgatcagacctgtgacgacatccttttcacctttagctagaagtcaaaggtcctaccactcttagagataatggggcagattaagagttctgcctcccacaacatgcgaatgagtttttatagaccacagtagtctatcattaagcatttattgtgagctaaatatgctagattcccagtctcgaactgtggggaacttgtctagagtgtataaataaactttatcactaaatcctctaatttttccccctttcaaaaactcccagttctgcaaaatccctggtattggtcagtgttactaagagacctgttgtcatcctttgaagttcgagtttttaaagccgtaagaatagcagagtaggttgctttttaatattaacacacgtaagcagcgtaaattgcttttctggggccaaactctatacctttcctttttataaagcaaacttgctgttgaatgtaccagtggcggcaaagcatgctgtcaagtgtgcaccagtggcttaatgcactggattcattttgttttttaagtatgtaagtttgaccttcgtcttcattgtctgtgaatagaattccctggtgtctgtgtgtgtgtgaaatattttgaccaacccggaggctttgttgaaggcacatacaagagtgtttcactgcgcctgagcactggcagccacgggagtttggggagtgcttgtttatggcacaggttgtgggacagggagagccttactgctgaagaagctgtgctgtggattctcattcgtgagtgctaaggagagggcaggggaagagaggagaggcgggctccacggggttagtctagggcgctgcagagctgcctttgctggccttgcctctagaaagctgagctcagaagcacagcacccgaagcctgctgtcagcagcccagagatggcgaatgaggagctgaaagcaaagccctgtgtggcagggctctgtaatgggtccatcctcatgagcagccagagctgtgcaccccactttccctaagatgtccctcctgtggaacagtggccatgcctgctcttctggcccaggcaacacagaaaattattactcttactaacatggaccctttaaaaaattattattattttcattaggatgcgaactcctaggctttcctatagatcttgaattgtggtgtgcttgtgttgttttgtgtctttcccatgacgcagaagacagttttgccacccctgtacctctcttaccaaaaggacttttcaggaaggaggtggtccagcctgggcacattctgcttacctgtgcactagttttgaacagggatcacgtgggggaacagcactcagatttcacataaacaactaagctaatttttccaaacatttctgaagccatggagacacatcaaaacatgttcaatttaacatcagattactttgtaccctaggagtgagtgagtgagtgagtgtgtgtgtgtgagtgtgtgtgtgtgtgagtgtgtgtgagtgtgagtgtgtgagtgtgtgtgtgagtgtgcgtgtcagtgtgtgtgagtgtgtgtgtgtctgtgtgtgtgtgagtgtgtgtgtgtgagagtgtgtgtgagtgtgtgagtgtgtgtgtgtgtgagtgtcagtgtgtgtgtgagtgtgtgtgtgagtgtgtgtgtgtcagtgtgtgtgtgtgagagtgtgtgtgagtgtgtgactgtgtgtgtgagtgtgtgtgtgtgtgtgtgtgtgagtgtcagtgtgtgtgtgtgtgtgtgtgtgcaggttgtttcaactctgtgagttttgcattttccctaagaaatggcagttggcttaccagggggaggaaagggtgggtttagagtccttccccagagatagactgcagtagatgagtgagacacacgcaggtccatcctttaggatctgggtagttttcaaggcagggcagggaggcagggagctaactcgtcttttcctggtcccttcggaattgaagtggctcggggggggggggggggatgttcccgctcattgctcttaagcacctggcttgtaccgtgaacctctccacatttagataccaggtccagcagcccttccctgtaatcccaggtaaccatcaggctgaggcagggggatcacaagttcaagggcagcctgggcaatgtgcaagaccctgtccccaaccgaaagttatgaaacaaatgcacagacacccacccgtacccctgagggggagacaggagagacagagacagacagacagacagatgaacacgtatctcagcttgagttctcccacccccgtgtcccagcggttctgttatttgtttaaatatgtgttgaatgaacaaattagcctcttaataacaagtgcagttttaaaaattaactttcaccccaaaagtctcagtagcacttactgaacccttgctgtgtgctctggatctttatattttggcccaaaggtagaacttcagatttgataccagccttactgtcttaagggagtgtagaggatccaaggcccaggggagacaaaaccaaaagttcagaatgtccaaaaacatttcaaaaaaggttcataaagtgcatttccaccttatgtgactaatttgtagtttgcaaacggtttaaatcatggttggctgtgttgtgagcccatgtttcttgctaccgagttcccattggcggccacttccttagcagatgtcttgtctctgagagctccgatggctctttatgcctctccatagctaatttgcggggggtacaagttggcagaaacagtctctccatggtccagccagtcccggctcttcttttgtgaggcattactcggaatctgtacttgtttgcatatgtgtaaattcagatatgtaaatgtatgcttgtttgcaaataagccttcacccacaggcctaccgtatgtgaagtactgtgagctttagaaattgtatgtgttgtatgttggtgctatgactctatattgcttataattaaggcaaaatatgaaaagaagatagcttttttaaagctagaaaaaccttagaaggaaaggacacttaaaacagtcaagaaatctctcctctacacttttccaccgtctcatctgcggtgcttcctaagtttgacatagcagagggatttgccctcgcttccccattggctggcctttgacagtgcatctggtccttcggcagctctgtacaagtgctgacttcctagttgatgtactgtcagcagaagagttaagggtaaaaccaatacaactgggttttttctttatataaaacatacaccttgggccatttttacttatcatttaaatatcagtccgctggcttaagacccaagagtccatactgtacttcttacagacaccacagtatgtcaaaaggaatatcatgaacgatgtcgggatgtgaagtctgcatggtatctaaaatccctcaccttcgttttaataaatgagaggtttaggaatggcctatatggtaatatcagatgttaatggcattgattacctgtcaggcagtggggattgatgggaaaatgtccgctgtaaaattaaatagcattagagaagactgtaccaagcatttggtgggggtagccagggaagtggggggcctgagggactgtcagggttttactgggagctccaggttttttttttttcttaccccacatgattaaggcagaccatctgttctttgttaaatgtttacaaaaacagcttccctctaaaagattcaaggagaagtaggtctggtaaacacgcatttccctgagcaccttcccgccctccttcagatagtaccaaaacaattctgccgtagagcagacgagattaatacgtttctatgttccatctttacttttcccctccttgtgggagattaaattttttacagagtccctaatttatggcctcatttatttataaaagaagcatctaaagtgatttgtatgctaacatgtatagatgaattttcagctttttttgtgtttttattttgtgtgtgtgtgtgtgtgttgctctttttaattcatacatgtgcgctggaaaagctctcaggggacactggtattctgtaactggagtggaagccatgcaggttgaagatgggtacatatccctcccatagtaagtacattgctgtcctacattggagccatccctccgattttcccttggtttttaggaataacttttcttctatttttttgaatgctagattctcccacaaaagtttcatttctatcctccatgcagaaagctgtgtcttcctcctgctcagttacgttaggaaatgtaagtaactgagcttgagctgtttccatgtagaaagtggaaatcaagtcagccaactcagctagtagccggggctttggttgctcgggtccctgaatgtttgtgagggaatataggccagtagtgacccttcagggtttgctcagttcagtgttggctccatgttttgtcttttccagaaagaagacttcaagaggagtgggttggcatcagagaagtgctaggtttaggaaacacttcacctctttcccttacgtgactcctgatagcctcatcacctcctagaacgcacttcctgtctggaagatggggtagatataaccacatgctgttgtcctgtgggacctgtgtgcgagtgtgtgtcggcgtgctcctcctcccacggtgcactcacctctgacttctgacatgcctttctgaattcatttcctctttgctgtgaccaaaaaagggcaacatatatttttaagattggtcttataccaatttgttgttgttattgctgctgctgctgctgctgctgctgctgctgctgcttttagaacgatggggatcacaaccggggcctgtgcctgttaggcaagcactctaactatgagctatatgcccagctcaccccataatggaaagaaacttaacaagtagagaagctgaactctgggtgggggaaatgacttccccagaaagtgtaactgtcattagagtagccagggcaggctttggttggaatggtgggttaccttcttaagcttgttctagtttgtcatgttgttttggagatgatcatggagccccttggagataggatgaaacttgaggcacctctctagaaatactcctgtgtgtaaggttttaggagctggttggagttttaagacattggatgaagaaggaaggctgcattcaggtgtcacctccagtccttgtgtggcctgaaagacagagataagttctacgatttccttgtagattcaggtatatggacacataaactcactatagggcagaagatatgcagccataaagattttatgttgagttgtgatttctgtaaactgtgctaaacatgagcttctaaccttccttcgtgttgagtctgtggactaagcctgggccctacactgctctgtttttgtgggttataagttgtatcacctttgatattggttccgttatgacttttgtttcctcaggcaggttactttatgttagtgtgtcattgtccccaactgtgaaactggaaggttcctcatagtccagagacctggtgtgggaatatagtgatgtttcggccatgaagcctatgctgggcttgttggaagatcactcagctctcagggatatagggaaaaggcagaggatgactgaggttgcagatgggacgttttcagttattcatttgaaatgtgaagatttctcaggtgcagcagtctgtcggatggatgatgcgcctgcgctgtcgctgccctgtcttgggtcctgggctttgaggtcactctgtgcaggagttatttactctgttctcacttgacttctcagcatctcatcttatttgtcagtattttttaatgtgtactccccccccccaattaatgtcagcattgatttcatttgtctatccattcatccatctatccatccacccatccatctggcttcaagaagttagggaaaaaaaagattgtccacatttctaattacttcaagaaacttagccaatgcaaaatcattctttcacatgacattttaatctagacaatttaatgttatttaatccatatatgacctgtgtactctgtaaaggttgtattgtacttagctctatctttttagtactagaatctttcaatgttggatatgcttgttctttgtactctatctgtgtctttgagtccccccccccaccccccattcagagagaggcctctgaggctgagcctgtgttttcattttacttcttgccctgtgttcttgcagttgaaaggtgtggaatgtctagctctgtagcctctttcccttcctgcactaatgcttttctgtagtaataaactggcatttaaagcattccccttaaagaaactcgtatgtttctaggctgagagaaaaatggcgaatcctgttacccttagtttgtagacgttgcttccttgagtatagaataggaccatcagccattgactcctagttcctttcttcatcgtgaagaatgagactaattcagtcccatttgtgtctcttagcattctccatcggagccctttctagagaagccagtgccggatatgacccaggtcagcgcacagaacgctcagctagtgaagagcgacgattacctgccgtcgatagagcagcagccacagcagaagaagaagaaaaagaaaaacaaccacattgctgcaggggattccagtaaaggttttggtaaagatgacttccctggtggggttgaaaaccaagaactgcgcaggaactcactggatgtgtcccaggaagaaaaaaagaaaaagaaaaggccgaaggtcaaaaaagatccgaaggaatcgaaggagccgaaggagaagaaagagcccaagaccccaaaagccccgaagatccccaaagagccaaaggaaaagaaagcaaaaactgtcacgccaaaacccaaatccagcaaaaagtcaaggtaggctgtgggtgatcaaaggctgcgcatggggcagaccagcctcacgctgcagggtctgggtgagtgggggtgtggagtgcctgtgtattttagatcatttgtgaccaactttggctcatacagtgcaaagctaaggtgtttgtgtattccaaactttaggactctactcttacgaactgctgatttatgcagagttttactggataaaaaaaatgttattttgcagccggcttctttttgtaaaaaccacaacggtgcttggttctctccgtaactcataggggaggatttcagaggaaagcaaggccactgaatggctctgaacattttactgccaactgcagaatttgaaagagagttgattgtgtctgcttagcaggataggtctttcacggcaggttgaagtccttgtggacagtgtgggaaaacacagtggaactcatcattagatatggcttcaagaacaggcatgggctctgggtataggaaagagcctctcttgctctgtatgccccaccaagtctctggccccctagaaggcatatttattcagtaagaaaatccgagagaagacattgaggactaatttttttcatttgtcctgaacatttccaacaactgttctgaagcagttccagacatctgaatccgtctttcagaatatggctcatgttagaaaatattaaaatatggtttccagatggaagtgtagccggactcggttaatctgagcctgttcgcatactctgatagaaaacacactccactctctagcccacgtgcacatgtaaacatttatgtgctcacacactcagttgggtcattgcctcgtactttctgtgtggagctatagccctttgctgatgggctacactgtgtcatgtgcagacacatacaccagtgcacagaggaggtcataggtgccgagagagagagagaagggggcagcttcttcagtgtcccgccagcaactcgaccgtattccgtgggttgaggctgtgagttttctttttaccatggattacttgtgtggtatccaaaaagccaagtatagacgttcactcaaacttaccagtgcccttatatttacagacaaggcttgattgtgcagtcttcattgaaaaggttttttttttcctccctgtgaatattttctaagcccagaactcattacaaaacctttgcatttattaaagaggcattttattgaatgcttatttgtaggtaagtgttcggactataatgataagtaagatacaggtaaaatttttagtccgacagtatgtgtttgtttttaaaaagctgctgcatgaatgtaaatactgggctttggtctgaggaagcacatcccccagggagagtagtcaaatccaaatctgaaacagaaggtgtgccctcttttcttaaggtgtaggtgtgtgtactaaaggggtgttctggactttagcggtattatccccaacacttttagtaccagaataatttcagttcagttttcttttgttgttgttactattattatacttaatggtaaaaatggatcgaatcattctaggattccgatatagatttccaaccatcttcagctcgtgtctgatcaggcagggtctatgttcccagcttacttgggcatatccttaccagctgtggagtggttcggaaacagactttgaaatggtgtatgtagtagtgacccttgtatcgtccctgacacctgcgggaatccagcctggtcagcactgggtgtgtagcatttccttggtgcagctagagatcctgtgtccacacagagagctattggggctgactccagggtagccagagactgtactcctgagagtgaggtctctgccgagtgtttagcacaacttttttttttttttttttttttttgtagggacaggagggaatttttacttaagaagaaaatatactttcttccttctccctgctggcactcactagttgtctcccttagagctatacacaaatgctgttttgagtcttaatggtttgggaacctttgacaggagcagggtgatgtgtgtggagatgtacaggggtcaggaagccgcatcaggtatgtgccagagacttaaaggccatgtttaggggtggtgctgggagatggagggagttggtagcacctctgtttgcttggatcacttcacacgcatgtgaccactggctgatttacagtgaagtgtggtaagggctatccccagcagctttcccgttgttgatggtctttcaggattggctgtccaaacataggataattgcattgagatgttaaataaattaacaaaccaaaccattattttgtcaaaccacgttgttgctattggtcagatgaattgagtatgtcaattgtggtctccttgttcagttacatctacaaggaaatagcatccttgaatcaaggataacgagaatgcatacaactccatgtagattttgaatagcatagcagaataattatgtaaattggatatgcagtgatgaaggtaatggggggtttgggctgtgttagtgctggggctcaattgccagagcagtttgcgtctacgccgtgaaacacaacagtggcaattttgttttgcaaaatgctatgtgataccggttatttccatccttgaataagttaacttgatgaatttgtttatacagaaaataattttcctacagggggctgaaacagaggaaatgagcaagtgaaatgaaaaatttagcctagtagctcctcacttctttccgtcggtgtgagctgtgtcgttgctgccacactgccagcagacatgttgtcctttgagtgttgatgaggaagtgacctgctggtggtccgcatcattctcacacccttggtaatgagggatgcacagaggtgatgggcgtgcagagtgggtcctctggtgcccacgtggctctgctaaaagtcagttaaatttgtggacatcctcaacaaccaagatacagtcacatgtgtctttactgtgccagggaagctacaatagtctgcctagaagcagttacgtgggatggtggagaaataggagaaacagttgctcaacacagtaggataaagacactttgtaccctaacaacagggtgggggtgggggatgggctacttctgggcccaactcctctgatagagctatgttccttttttttttttcttacttataatatatttttcctatacctgttttttattgctctccatgggtgtccttatagctttcaaatattggctgttaatattgaaaataaaggcaggccctcggcgggcgggcgctggagaggctgcgttttgcatgtgcttggattccgggctttgcttttccctctccgggctttgcttttccctctcagtgctctctgttgtgcatgcgcgggctctgggaagagagagtttggaggaagcgcttcctctgaatgactcttgaagggtttagtggtccatttagctacataaagattctttgaatgtacagaagaaggggacttggccagagcctgtgacttgactactgaagcctgaattagccggagcagtgtgactgccgctaatgtagtttctaggaacacgtttggttcattgctcccttccccacccccactgttaaatttagcagaaatgaaaatgttgtttttcaatcgagtgaagatagcattttattttaaaccagaaaataaacatactactctcatttttaaaaactacacaaaatactaagaacacaggccatgcattttttgctagctcctgtaattatcattaacagtagtagttaatatttatttagcaccttcctcctgaggaacttattttctcaattataatcttacagagttagggtgttttcacccaagaaacacttattcagtcagcagactcaggtcaactaatatatcttcgcattgtgctctctgtcaagcttctcgagaggggtcccaagtaaaagcaactctgtaagccagcctaaaactggggccaaacgcatctgacatcaggtgtcttcacagcggctgtgggaacgaagttcctagattctagtcttttcctatcttgttccttctttccctttagagcacttacgtgctatgatttagtttgattcaaaacactggaaaatcagaccttgttttggctcatgcctgccagagaggctacacaaacatgcgtgtgcatttcaagtgtgtaaatcgcaaaagaagctttgagcccctttagtgctggtggggaagaaagaagcaccctgggtgatcatgctggctctgcctccgagcctgtcttgctaagtctcttattgtcaggacacgttagagatgaggtgcatgtgcccacccttctgtcccaaagctgcccttgtcttctcagagccattaacaacgattcaagtccccagacgttccctgctttggggtggccacctcagtccctctgctgtgggccttcctctctagttcaaagtaggagaaccatcaggcagcttggagagcaagtgctgccccactgcgctgtaagctacatgcaggatgtccctggtgggggcatctactctgcagtgagcttcagtggactggaaagcaatgacctgctacaactttggtttctgcaggaaaggagagtgtgtcctcccctcccccagtacaccaccaaatagcagtggaaggtaaggaggccctgagcagaagtgggtagaagagggagacttctctagagatattttttgaagtctttctgaaggagagtattacagaggagtgtattttgctatggtagacttggctttcatgttatctctgggaggaaggggcaaagaggaccgcaggctgacagtgctgttggcattggtgctaaaatgtccttactgtgtcggagtgcttgggaaaaataggaaaatgggtacaatgcagtgtcccgtctctggctgtgtaatgatgcttgccgggctagcctgggcctagccagagtactcctggtatcagtggatgtcagagagaaccaggcagcttcctcgctggcttctcctcacctgtgtgcctttagctctgaaatgttagataaggaaaagctatgaattacggaaagttaggatcgcaacgcccttaaatattcaatagagtatggttttattttattttattttactttatttttagtcctgaactatagtggagcaatgtagttcgcttcccagtggtctgccttccctgtttgggtagatggtggcagttttctcctttgtgcccttactgttgatccatctaattcccatcctgctgatttgacctgattgaaatatgggttggtaacatgacctctcctgtgtcagccaccctggcaggtcagagaagacaattgtgagcctagagagtaggatagtgagtgccagggtgaccctctgtggagtgtaaacatggtacaagtagttgaatgtgcgtctagcagcccggcactaccataccatagaggctccggttggcatcagcatcgtagggtagaactaggctcaccctctgtgctgtactgcaaggcccagcagtgccatgtagcttaagcggcctgtgtcggtgtcgggcttcagtgaaaagacagcatcttagctgactgcacttcttttccaggttccacatcttaattgagtccacaaaacaatgtgtagattttcagtcttaattcttgacgacatgacaaacatctttgcttcagaatatattattgttaaagatttagttctttcaggaaaattttctgttgttttcccaggtgaacttatgaatgatgctctttagaaaatgactaacactatagcaactctaaagacaaggtcctgatattactggcttaaaatgacccagggactacaccatgcagagcagatgtttacagggaagttggttaagacctgccagatgccatgggaggccatgcagctctgggcctgacactccaacacgcacacatgggctctcaggcaaggtatctggttctggacgacagtgcctggcgtttgattgttgaatgccaagatgtcccacgtattcaaaacataaaatcagattagtccttgcaatctttcctagttttctttgctattctttctttaaaatgtagcacttggggataaagaaatggctcagcagttaagagcactggctgcccttccaatggacctgggttcaattcccagcgcctgtgtggtagctcacaactgtctataattcagtatctgagaccttaacacagacatacattcagggaaagtacaatgcacacaaaatagataaacaggtaggtaggtaggtaggtaggtagatagagagatagctattttttaaaaatctagtacttacagtatcagcaagaatcttttctacagtagctataccttttaaggcaacaacgaataggactgttttctgggtgttttatgtaatgactttcatagaactcaatgctagtagtttttgttcacatcctgtgtcatttctagtgagccaccacgtggttgctagaaattgaactcaggacctctagaagagcagtctgtgctcttaaccgctgaagccatctctccagcctctatgttttctagtacacccaagctttttaggttgccctagtgggtgagcaggtcacctggtcccagcgcaggtgtcagggcgtgcattagaggagagtcttggtgtgctggtgtgttaccttctactcagtgtgtcccaactgctttctcactagtttattctgctgtctgcagtttattatgcagtttatgctgttagatacctttgggcagtaggacttaaattttatttttgtcttattttgtagggctgattttactttctcatttactgcattttatgctgctttaattaatcttttaaaaaaatttgtgtcccctcccctgcccctaagacaaagtttctctgtataacagccctggctagcctggaacttgctttgtagaccaggctagccttgaactcacagagatcttcctgcttctgcctccaaaatgctggtcgtaaaaccgtgtgccctcatacctggcttacttttgtgctttttaaaaataattttcatgtggcttacgaaatgggtttcattatgtaattttcacagatgcacattattgtatttgtcttgtatctgtcctgattcttctcacatccactcttttcctcaaacagcacccctcttctgaatatctagggtgtatgtgttcgcacacgcgtgcttgtatatgtgcatagtgcatggatctagatttcccgtaagagagaaaacatgaagcacttgtctgtgtgcctgcagcttattttgtttaacatgggtgttatttagttccattaactttttctgaaaacggcataatttcatccttatggccagataccattccactgtgtgatacacacacacaaacacacacacacacacacacacacacacacacacacacacacacacacacacacatatacacacacacatacaccacacactcgcttgagagcacctgggatggttccatgtcttggctattataaagagtgctgcggtaaatatggatgtgcccgtttctctgtggtgcaccgacttagatttgtccaggagtggcagaactgagttatatggaagttctatttttagtctcttgaggaacctgtacactgatttccacattacattctcacccagagtgattagggttcccctctgcccgagttctctccagcatttgttaatgttgctatttatgatgacagccacttgaggagagatgggaatctcagcacagtcataatttgcatttccctgataggtgaaggctagggaacccttttcacgtagttagtagtcagccatatgcagttcttttgggaattttttcttccattcgttcacccatctgagtggatggttgtttggggttatatattaaagaagttaacaacctctgtctgacgcacagttggtgaagattttctcccattctgttggctgtctctttgctatataggaatttttaattgtatttgttctcatttgtcagattttggaattgtcttacactgttggggtccttgtcaaagaaagcacccttgtgtatacctgcgtcttgttttgactctgttgtttcagtttcagcactgaaaataaaacaatggttctttacctgtgggtcttgaccccttcataggggccacctatcagatatcctggagatcagatatttatattactgttcacaacagtaacaaaattacagttataaagtagcaacaaagatagccaccacaacccgaggagccatcttaaagactcacagtgttaacaaggtcgagaacccctgcagtaaggtccttgatacattttgaattgggattttctagggtggctatcccatgttcccagcaccacgtgctgacaaggctgtcttttccgagtatgtctttgagactgtagctgtgtgagttcatcactgggttctccgttccattcccctggtttagatgtgtatttgtgccttcctgttgttgttgttgccactgtggccctgtagcacattttgggatcaggtattcccttttctgccctggattgcttggggtggggggtgcacactcgtgctcatacacgtgcgtttccatgtgatttttgagattcctgtttcttttctgtgaagaatgtcgttggaattttatagggattgctttcagtaatatagacattgtcacaagcctcaattctcgcagtcaaagcgtgtggggtcttctagtgtctcgttcaccatcttcaccatcgaaaaattacctaactacactgggtggttttattcttagttacattttttatttttaattaaaaaagttcttgctgggcgtggtggcacacacctttaatcccagcacttgggaggctgaagcaggcagatctctgagttcaaggccagcctggtacgcagaaactctatctggaaaaaaaataataaaacaaaacaaaagtatttttaaagctatcttgatttctccactctagttctttctgggcaaatttgttgtcaacccacggaaaagctactggtattgggatgctaattttgcatcctgttactttgttgaaagtgtcaagagtgagcgcgttagagcctgtggtctttaggcgctctgaaggaccagctcatatcaggggcaagtagaggagacttgacttcgtcttccctcgcttttgtatcactcgatactttatggctctacctgagacttagataccaattccaaacacacacacacacacacacacacacacacacacacaagaatggaaagacgtccagatccaggcaggttgcacatgcctttaattctaacacataggagacagaggcaggtggatcaccccaagcaccaggctagccagcactacatagtgagacacccccacacaccccactgctaccaaataaaagaaagagacacttttgggtttccctatttagtagagcattagctgtagatttttcataaagcttttattataccaaagtaaatttcttctgttgctagtttctgtggtgtgttgttttttttttttttaaatctgttactttttattttcactatttaaaaaccaagtagtaagggctcagagggcttctgatttttgaaactagatgcacttttcatcaacgttgagccctgctgtccaccaagtatactgtgttctgttatgccagcctgaatctttagaattgtaatactctgttatgccagcctgaatctttagaattgtaatacctctgacccacatcctatgtggcagttcttattggttaacatcagtaaattgaaaagtctgttgttgttggatgcattacttcacacctaatccaagctgtctgggaggttgaacaggaagactgctacacgttcaagtctagcctagcctactaagattatgcttgctatgcaagtatagggacctgaatttgaatagccagtagctatatgaaagctgggtgtggtggcatgggtttgtaattgttgctctggggaagcaaaaccaggttgagcttgctgtgcagtcagcctagccaatagctgagctccaggtctgggagagactggacagggaccgactcatggtccgctcatgcgcacacgcccctccagcatatcagttcgaagaatctgtctcagtgccctttttaaagaagatggtgtaatattttggagaagcttgaatcctaataatgttcctgattaatcgtcctgacctaagtttcaaggttgatttctcccactgtaacgagagtcctcattaacttactttatccttggggcctgccaggtcactagctcccgcccactgccagtcacctttattaactgactcactcctcatcacatttggtttcatgatatgggtcctttttaaagtttcttctgagaatgaagatctgtaggttgacactaatgactatttaactgcattctgttttgtcgtaaatcaggctagcccaggctttctaataagctctggctctttggataaagccttgtttagaaagcctgcaatttctcacacaagagttggtcagctctgatccaccagccccatcttaggcaatggcttccactctgtgtttttggtgtgttatgtcttcagctaaataggggtccttccagaagtgaactcccgaggacatacctgacaacagtgcagctctgaacgtggagtttgtgattgcacctaagcattctcctccaggtggtgcacggcgctgggataaccatggaactaatgagctgtggggctggccgctgtgagtctgctcctataataaggtgtgaaacacgaggcttcaggagcaacagtggcctttcaaatttccagggtgtcactggatttatgtttgatttccaggactcactagaacgagtagaacctctgtatctaagtctgtggggcaggatagatagatcagtatttgtatttctctcgtattgctgattaaggaagataggaggaggttggatttttgacttggggataaaatttataaatggtaatttattgtattgattttgaaaacttccctgtttccctcaagtttattatcacctcatttcacactgtcatcctttggggnnnnnnnnnnnnnnnnnnnnnnnnnnnnnnnnnnnnnnnnnnnnnnnnnnnnnnnnnnnnnnnnnnnnnnnnnnnnnnnnnnnnnnnnnnnnnnnnnnnnnnnnnnnnnnnnnnnnnnnnnnnnnnnnnnnnnnnnnnnnnnnnnnnnnnnnnnnnnnnnnnnnnnnnnnnnnnnnnnnnnnnnnnnnnnnnnnnnnnnnnnnnnnnnnnnnnnnnnnnnnnnnnnnnnnnnnnnnnnnnnnnnnnnnnnnnnnnnnnnnnnnnnnnnnnnnnnnnnnnnnnnnnnnnnnnnnnnnnnnnnnnnnnnnnnnnnnnnnnnnnnnnnnnnnnnnnnnnnnnnnnnnnnnnnnnnnnnnnnnnnnnnnnnnnnnnnnnnnnngcagaggtgggcagatctcttgaatttgaggctagcctggtctacagtccaggacaaccaggactacctagaaaaaccctgtcttggaactcttccccccccccccacacacacacacacacatacacacaaaagaactttgtacttgctattaaattgtttaaataggaaaagaaacataagcagcctataagcccatcttaagcaggcagtaggaattcagagatagttccttttagctcacaagatcgttgatgaaagatacacagtgctttgattttaatacaacccagtaatgttgacatccatttttttagtgttttaagtatttacatgttgtgtgacacctaagtaggaatttgtaatcatacctgatctagactgctgtgtcgttctgaaaatgtttcttggaactcattccaagatctgtcagctaagccttgcagaggagcaggtaggcttcaagggagcagaggccacattgcatttgcctgccgagcatggctgtgaggagcagaaagaagcgaatgttgtgacttgtataggttggaaggagtggcaccccagtactgagatttgcagacatcacacactggggatttaatttaaggactacttcctgagattttagtaacctgcggagaggagatggcattggtgatctggctccatcaggatgctgagcagagtaagagctaacagtggggcctgtgcgtggctagctttcctcgaggtcctgcttttagaccaaggttctgagaaggcatcgttgcaactgttggaagtacaccagagctctggatctgcaccacgcagcctccagtgtcatagtgctggcttagggagtgcctaacagtattctcatccctacaaccagcgcagatgtcctgtttgcatattccagctttgaacacagtttggaagaagaacgagtatatggctgtgtttggagtctggcagtataagaacagtttgaaccttacagatataaacaggatggtaggtggactctgctcttttcccactggtctcatgctggggacccttgccttggggcgagagtgaagtgacaggcagtgactgttgtcatttaggttggtatggcaggtgcttggctgaagcagtggtagtggcagggtgaacgtgccgtgtgttctttcagctagtgactaacgctatcatcggtgttccttctgtgaacgctctttaagtgagctgatactcgaagcttgtggattttctccatgtgttccgccactgaattggcactggtgggtgtgggtctgggtcgcagagagagagcatgcactgcacagatgtgctgcttgtcttccaggggtgtgcagagagtgaccatctctgtccaacgctgtctcctttcttgtcttttctcattcaaacccacagaaatactgagcggtgcagatcttgccctcatgggatagatgagggaatgaaggtgcagggaaactagatgtgatttatccagagtcccagttggagctgtggcggttagagctcaggctgactcctgtctggtggaaaccagcattctgtagtacttcaggtagaagaaaaaaattgacttgtgttttacgtaggtcaaaacagtttgaatattacacttcataggagtccagattggcttattccaaaatcataatgatgtgatgtaagtgattgaatattgtcctggtttataaagtgtctgggtggccactgaagaccccttagtctttttctgacttcttagggtgcttgattgtatactggtgggtgggagaacctagctgtgcctcagcaggaatgtcgtgagctctaatgagtttgcctcttgcagtaatcagaactgaaagtgcttgcctgggctgggaggtttttgtctaagcatttggagaggccctgcctgtctgacttccagccatcttggaggttctgtacagtgcatccttggatggagcagatggaaagtcattagtgtttctgtcccccagcaaatagatgtttcctcaaacctggctctgggcactaagcagacaggcagcctttgctcctgcagggtgccgcttgcacagcccgaaaccccacaaacttgaactccatcctccgcgctgcttgatcgaggtcaccatggaaaacatgcaccgccgctcagtttacctggcagtggttcagctctttgacagacctacctctgatttaaacaaattcgagaaatatgtaaagttttggaagcagttttgcactgatttgataaaagaaaccacaaaacactgcagcgcaggtgttgagagtgtttgaaagctgattgagggaagcagatggctttagtcagtggcatccagccaaaagagcaggtgctggtcacgtgaccgctggttaccagggtaatctgattgctcttggcgtgcagatgaaaggaaaggggcccagtgttcagctgtagtattgtataatttgtggcagttagagcggaaataaatgctggaaatggagcctcatggtaggggagacttctgtcagtgtgtagcgtaaacaccaggacactctcctcaggaactgctgcatgaattttttaatttaaaaaatattctgctgtctgtggatttctctgacttagtcacaccacctctttttattttttaattttttgtaaataaaatcaatttttgaaatgtaactgctatttgtgatcatcttgaattgttttcagttgtttcctgatgtagctgtttgctatgctaaaatgctcatgtatcaaaataagctctgagtatgtaaaaaacaacaggtttaagatgatcaaaaacatattagtggagaacgctgccctaggtgtgtgccggaaacgctattgacacactttggaagggtttaacgtgacacatctgtacttagaatcattagctgctgcagcctcttcctagtggctcaacaacatctttcttagggcctctcttggtgagcttctctgggactttataacatttaataaatgtggggttttgaaatatgtatctttagtttttcaagctacttagagcttgaggcaccctagaaatagtaaaaaaaacaaaacaaaacagaaggctggtattcggatcatacattttctgtgttgtatatataacaaacagtcatttgatggtaagaagtcttgggtgcagagtgtagatgaaagggaacactgagtgtttgctctaaaagtactgtgaggaacggttttgggggtggggataacccaagaattttatttttcctgtgttttggtttaccattcaactcctggtgtttctcaggaacatggaaagcgagcttcagttattggtgagaaacaagcacacgcttataatttcaaagacttagcttttggtagaaatgctaattgtggggctggtggtggcctcagtggtagagagagctcttgtccagcatgtccagttgctagcactggaggaaatgaaggccaagtgtggctatccctccaaaatgcttagcaccaaaaggaaacttactcatagacaagaacaccgaattaaataaaattatgtatttctaggaaattaatttttagtaaaaatgtaccggtcaccattggacttaaaaaatgactgtgtgaaactctgtgccagagaaataagggtatagtcattagatggtatttttcccccctttggttaaaagaattggtcttcacccgactttttagcaaagagacatcctaggttttttgtcacagctttgtatgtcagcaggggctgggggtagaattctgtgaagtgttcaaagttctacatccagttctgtttcaatgggtgagaaatttgctgaaggtcatcaattataagttttgttgtcaaaccttaattaggagtaccatttaatgaaaagcgcccaagacccatcgacctggcctttgccaccactctttattaacagaaagagaaggtttggggcatgtgggaaaccacaccgaaggtgtacgctaagtgatgtactttgaattctagtaataagaaaccggattcagaagcaagtgctttgaagaagaaggtcaacaaaggaaaaacagaaggttctgaaaattcagacttggacaaaacacccccaccgtcccccgctcctgaagaggacgaagacccaggtgtccaggtaacaccattattcccttcggggctccagctggggagtggggtaactttagccacatgtaaagcacgccaggtctctccaggctttgtttgtcaggtgtgtgtgtgatggccttattgttgtctggaacattatatccacagtgaagagagccagagcccacagaaacccagcttactctagggccttctgagctttgagattactaaagcaaagagctgccctttatttccacaaatgtatgttttaatggttatgctgttttaagcatttttagcgttgctattatatcgcttcatttaaagtatcattcacatttaaatttttttctaaattttttttggtcaatttttatttgatttctccctctccctcgagtgtgtgtgtgtgtgtgtgcgcgcgcacatgtgcacgtgtgtacattcatgtggaggcaagaggccaccctcaggtgtcattcttttaggagctaaccaccctgtgtttttgagacaggctccctcactgatttggattagtgaagcatgctagccttggctggcctgtgagccccagagatcttgtctccactccctaatgctggaattgtgagcatgtccttttatgccttgctttctgttcaaaggagcaaggctgaggcctcttgcttgcaaggaaagcactttcctgactgagccacccatcttgcccttgttaattttttttttttttaataaaaaccaaaacatactttgtagcttatttatagcacatggttggagatgtgatatattcatgatagaattttgatcaataagtcagtggtatcccagatggtaactggttcagtgttagattctcctgaggtctaaaagtgagtagtaggaattcgggttcttgtgtatgaagcttgctgccttcactatttggactgacagaggtctcaaaagtatgcatgacagttgtgagttatttccttgataggttccgtggatgcatgccagtctggtcctttgggatggctgggaatgtggcttgtgcaagtgacatctgaattatcagggagtgggtcccattggaataggcagccagcccttagggaccagttgggcttcctcttacctgtaatatatcctcagatcttcctacccaaggcccaagggtctgtaatatgtggccccctgcagagaacttcagcttgaatactgcattcttcttgagtagaacatcctggaagaaggttctaagaaggtagaatggttgaagatggttgtgacccaccacgtgggtgcagggaatcaaaccttggtcctccgcaagagcaacaagtgctctcaacaaccgtgctgaatcttctcttaaaagttggttaaggagtttggaactaagaatgtataatgaaattcattgtatccttgaggttgttttgtcttaatgtgctcttttgggactttacaacaaaaatatttggataatattaagaattgttctcacaggcctgatgtggtggcacatgcctttagtcccagcacttgccagtttgaggccagccaaagttaccaaaggagaccctgcctcaaaacaaaagaattatttcccgttctgactaatgaactactgtttggggtgggatttcctccgggattccccccgccccccattttcccttttctttccactcttttccttgccttgtgtccactttccaccctgtattttaggtacggaaaagcacttagcagttcaggccaagctccgtgcttccatctaattgtctcagtaacagttctgcattcaacagccaaagtcaggcggccacagaaactgcctagaaagctgtcttcctggtgcctgctacaggaagtgatgacgcaggctgcgtgtttgttacacttcttcctgtggtgcatctgtgaggggcttgagggaaaagttccaatgctctggttgctcatcaagagttaatgacatgttaactctaactgactctttcacaaggtgcggccacagcaaggccacattttcattttctcctcaggacacactgattttaaccaaaagtatctttataaagcaggttaaatggaatcgttctcaggctatgaggtaccgtcctgaggccgtgtgggtcttgccccaagagatcacagtgtctgtcatgtcttcttcatttgtatgatgaatattttacgtcctcccatcttaatgctggcctgcacaattgatgaatctttaagaagcagcagttcgtaattcttagaaaaatgtttgtgtcctgtattcctcggtggcgtcattatcctttcattatttattcctattttttgctctctatttctttaaaaagaaatttatttctttaaaaaggattttcttttagggctgaaattacagtgttctacccctacccccactcattctctctcttcattcagagagaaccttatacctagtaacactttttatttcttcaggttgtccctgttagcggaagcacacacaggtagcttctccaggagtatttctggagcggtagagaagtaaagcgctatgcattgcgcctaagcagcagattctcttcctcttcagagggctcttgatcgtctgcccatccagatagagaaacagtttgcatttgtcttaagtagagtcataagtgacttttgcagtcacgtgatttgctttcattcatcaatttaccatggacagatttccaaatatatcacgtagcttaccggaagtggcgctggtaggtcataggcttcacacatctatgtcgtcctgcacaggctgtgccgggttgtgcttgaccacaaacatgaacattcgccagcagtcgtactgactaccaggctttgacatttgcagcagcatggtaaaaagttgtattaaaactagaactgccaggcagagtggcacacaactttaatccaagcatttgggagacagagacaggcagacctcttgggggttggagcctagcttggttgtgaatttcaggccagccctggctacatagtgagaatctgtccccagataaacaaacaaacaacgccaccctacttaccaaagctactcattatgagatgtgcgtgtggttcccacttctccctccttctccaggactaggaattgacctggggctctgtgcattcttcgtaagtgcttagcactgaggcggacatctccagccccgaactgtttctttcaggccccagagtaaagtgcattggaataccttgagaaataacaatataacaatgtttgtattaacctttatagcctgtagattattttctaatgcactgttgttggtgggctctctacattatacttttcagtcatagagaaataagagcagagtgtgctagactgccataggtccactgtgcacctccggtattgccactgcccgcaatggagatggccaagtgagggacaaggtttgctgtacccgtgtgttcttgttgaagggactgctgtttggagcagcagcattacaaggtcctaggaccccatatctccagataattgctgtggttgtcacaatgtcttttcactcggcattctagatgaaaattgccagttttcctttaagatttagaaaaggaaaggaggaaggaaagcagtcttactactgtgtaccgtgttacagagccccaaagcctgccctttaacactcacactgttgggcttctgttgtagaagaggcggtccagcaggcaggtgaagaggaagcgatacactgaagatttggagttcaagatttctgatgaggaggcagatgatgcagatgctgctggaagagactccccatccaacacctcgcagtcagagcagcaggtcggcagccaggcttgcgccgtttcatgtgtgctttcagggtggactgggaacttatgcctggaagccaagcagttcagtggcagaggtggacttggggcaggggaatgttctgctgatgttggctgacatgtcgtgggaaattcattgttcagtagtatcttaaaaagccctacttgctcaaattcatttttatacaaggcaatgatatgtaatgtgccagaggtttggagaattaaatgtctctgctgaggaagagtctgagctagactatgaacctctgagaattcagtgctgtagctcccggaaccataataaaccactcgagctcatctcctgctgcttggcaccgtcagaacccctttataaaattactgccttggagtacccagcagggcacactgtattttctgtgcaatgtaaatgatggataaaatagtttgtatgtagctcgggcagtaacagaattgattattgcaaagattttatttattcttttttttttgctcttactgtactttagttaacaaactggctgccagttgaaaggccctattaaatgcagcttggtgtttagctggcaatcggatctctattaaattgttgtacacagcctccgtaggacagagctgcctacagtagcagggcagagggagcattcagtccgtgaatatcggtgcagggaagttgctcctgaccggctgtcgcgcacaggttacttttccttagcagccagggaggatgcgttgtggcttgagggactgtgcttctctccgtaattaaccacacagtcaggaagtcataagcacagcccttcctttgccttgctgtatgtagtgtgaggtttttcttgtttttagtaatttttcccactgttaactttgggccctgtggttgaaagggcaggaggcatgggcagaggggagtggtgctttcccactcgcgcttgcagcacaggtcagatggcttgccagtgggatcggctgataccactttctctttttcaggaatctgttgatgcagaaggcccagtggtggagaagattatgagcagccgcctagtgaaaaagcaggtgagcggcgccctgtgcaaagatgaggatcccatggggtgatcgtccaggtggtttgctgcatactgccctgttaagatgccactatggcgcggggtatggtggtgggtgcggaggatcaggagttccaggtcagctgtttcttcatgtgaccatgtctcaaaaaagtaacagcaaaaagacaaacaaataaaactaaagaaaagcccaatggctacattatcataagatgaagtgtctgtcgggtgatacttcgcatccccttggtgattgattgctctggaatgaaatcaaaactccattaagcaatgaccttaagatgtatcaacctttgtaaccctatttggagaagtcaagaaactcaaaagaaatgtttaagacttccagaggtacagacaaccttttccatagaaaatgctcccaagaagaccttgctcgggagctcccaatgccctcatcaggctcggtctgttactggggcaagcagacgttgtatcacgctgcttacaactttttgcataaataacttaatatgttgaaagtatctttattaccgatacagttcatattgataagcaaaagtgcctgccagtggcagcaggtaagctcgtggcccaggcgcgttagaaagaagaactccattatgttctctaagcactgggaattctctgctccgagtcagttgccttcctgcccagattgggaaatgctgagcttgtatctccagaaagtaggtactgtggatatacgtcagccaggcaagcctgagtagttcttcatagcttttgaaatgtagagcaaatgtgatttcttttagtaaaatgaatgcaaggtatagtttcccagtggccaagagaatcatggaacttagatgctgtcctaaagtttatcaactatcagacaagggaaaataaagacagacagacagacagacagacagacaagcacgctaccagcaacaaaatactggtgagcacaggcacttaacacaattgtttctgttaatgtatcatcggttggggctgaagaggtgactgagaagtcaggagcacttcctgcttccagaggacatgagttcagttcccagcaccctttttgaatgtttcaaaatgacctgtaacgtaacgccaactccaaatgatccaatgccctctcttgacctgcagtcatatatgtgcacgcacacatacataaaaatagaacttgtattttttaaactgagagcttattgagatacccctgcaccaacagtaggcttgcatgtccctcttttctcacatactcaggatttgcacacttattaccatatacactacatgctcctataaaaactatccggagcaacaagtcaacgtacttcaaatcgggtgttgaggtggagtgtggaggatgcagttggtaactgagtttgtagcttcatgccctaatggatcaaatgataaaaaccaaggcaggtttgtcacgtgttggaacagacacgagcactacttagctcgttacaaaggctgccttttcctaatgtctctagaactgttagtttgtgagtacagatatatggtaaaatgtaaatagttggcatgcttcaaagagtggtccccttcactggactggcgctacttgaggaagatagctgtgttcttggaatgggatgcactcatgtctgttgaacttgtagtacttcggcaggcatacttagcaggcttagagctgagattataattaactctattctccatagctagtgagattgtacctgatgcggacatggcttttctttctgttttgcctgcttcaaagaacttagtttttccccctctgcccacctttactggcaggtacctatggattacaaattgatattacagccccgtgtggctcgctgtaaggcattagatgtcattgcagatgtatatgaagatggaacatttattgaaatggctctcaacctccctaattcgtgaccctttaacacagctccttatgttatggtgaccccccccaccagaaaatttttttcattactacttataactgtaatcttgttactgttatgaattgaaatgtaaatatctgataagcagggtgtctgatacgtgacccctgcaagaaggttgttcaagcctcaaaggggtcatgacctgggttgagaaccactgatttattggcttggtgaatgtgggaatggagaaaattggtaggaaaagttctctggaagacaggaactgtctgaatgtaaggattgtagagagcccacagatgctcatccgctgccgccgctcagaggctgctaaaactccatcagaagagacagaccattaacagccactaactttttaaactgcaaatgttctcaacattcgttgctttaatttataattgctataagtttatcattttaaaaaatgataacaggggacaatattgcacgtggaaagaaaaagaaatttgatattttcctgtggactctagctgtgcttcctcttactatgaataatttaagaattgtctcccagggagagccacctcagcttcacacaccatgacagtgggcgtggcttggcatttaaatattgtcctaaacacaagttaatgtccccaagacccaggagaggggtcttgtatatgaacattgaggtatgtttgaatgtgtgtgtagatatttagagtgcataggtgttttgttttccatatttagttatagcacttcctatatgccatctatctatagaaaataatccaagcccttttccttttagaatcataaggtcagaagttatcttagagtcagaatctgggtgtactatatacacaggagagatactatcccctaacatttatttttctttatttaacatatgttttctccataaggagttatattagattccaggataattgaacataacaataaaaaatagaacattttataaagttaaagtcttaactatagtctccagaatatctttattttctcactcagtactctgtaactcactatctctgtttgagtatgaaatatattagaccagaagcagtttattattcttctctgtatactttttcattttttgttcattatttgtatagttttgagtagaagagctgtctaatttagcaaggctattctttccttgagggtgcaggttatcatgtgctaacggctgtttcaggccacgttagagaactaggcttggctccttggtcacatgaacagtgagacaaatatgttaatatagccaaaacatcaggtttcctgtaacctgttaagattcctttacattcattcctggggaaggaaaagaatacccattttcaaatgtctattgaactcatgaaaatactcagagcactgtcaggttagacagtagctggccaaggagtgatctcagtgtttgtgtgtgtgcgtatgtgaagctgtgcgttatcaccctatcattcattgagtctgcagagtatggaagtttctgcacactggtactgtgggctgctggaggatggacaaaggagatgtctttagtgaattcttgtagagagtcatgactcagcattctctccgggaagcatgtgcacacttacgtgaaatgtagttagcagctggagttgaagctccacagaagaacatggccatgttttatgtgtagccagttaaacagaagacagcaaacaaaatttttgtttacttggggacatggcacacgcctttaatcccagcactcgggaggcagaggcaggtggatttctgagttcgaggccggcctgctctacaaagtgagttccaggacaggacaggagggctatacagagaaactctgtctcaaaaaaaaaaaaaaaaaagcaaagctgtgttatggttaggacctttcataagcccactagagtaaaatgagatgttcgtacgtattggccatattctagaatatctaggctttgcactggtgagaagcagtttaaaatgcacatttaattgaaactgataaaaggttggagggaattctaaaaggtctttaactgtggtttgagtgttatgtatggaagccagccggagtgcccttataagacatgtgccctctgtcatcctccacgctggctctcctgtttggccccaaccatgttcctgttcaccctcattttcttcaaagatctatgagaccacccagcacccatgtgtgagcctccaggcaagctcaccagctctcgtaggagcagaaaagaacttcctgacacgtgggtaaaggctgtttatggtttacatctttgctttatctgctcaaacattgtaagaaaatgacatattatgaatcctttcacactccaaaagcaaaagccaaaaggaaaagagaggttctaaaccatagcattgatgttgtcttcggtactttctggaagcactctgaccaccgaaagctcttgactcggcggacatgcatcgcaattttaacccaccgaaatgtgggattggaagtgttaattttatttggctgccatgtgtgtgagacatcttgtctgaaagactttaattgttccactgagtaaaactcaaaccatgagtagtgatgccccgagtcccaccataagagcaaggtttccttttatatggtttcttgtttagagttattaactatatggagaaataaatgtcttttaaatattttaaaacattacaaaacccacaatgtaaagttgccatgaggcagccaaaaataatacatatggcattcaggagagcagttgctaattggctgctgcctgagaaaatggtacacttggcgtctacttaacactgcgggtttggcagccagccaggcttggggtcaggttgttgtgaatgaagctgcatgtggttagggaggggttaaaatgattcatgccatacaatcacaagcgcgttgagtggagcagcgtgcatgtgcctgagtacgtcagtccccacggcacaggctgcccaggcttcctgtgcgctcctctttccagtcaggccacctcaggcattgtgtccccctgtgggagtatgtggctgcctttgaaatcgtcggtatatgattttaacgtgtgtacctcaatcttctttcattgcagaaggaatctggcgaggaggtagaagttgaggaattttatgtgaagtacaaaaacttgtaagtaaattgttcctcctttcagcggggaagggtagacctggagtacaggactctttaagaattgtgaacatggagagtttggtatggtttctttgctgcctcagaaaggctgtttcctcctaactttgttatttgtagtactttgcacatgcttttctagaaaatatttagtgtgtagaagttgactaattttcttatataagcaagaagctcatcatagatagaaacatctgatgtgatcatagtgaaataaagtagaagttgactgtcccccaaagagtggctcttgctcttcatggttgcgcctctccctgcatctgtgatgagaactctgtagcccctcagaggccccgaggcccaggatgctctcgggctttgatgcagtgagctctggctttatgtgcattgctttccaatatttgtttagtgggtttagtttagtttagtttagttttaatctgaatggagaaacacagctgccttgagctgtgtcatgggatctgtgtgctcactttggcaagtcagtgtggttttcaggattggtcactaccctcccgaagaagacagaggcccttcctaaccagacacacagctaaggacagacacctttgctgaccacagatctgttctctctgctttgctcctctgaagaagacatatgtaaagcccgggtgaatcagtcctgggttttaaaggatgatttttaggagttgttgtgaaaacagcctaagaaagtacattgccccaggaaaatgtcaccaccgagtgccatgtttctctgcttttgtccctttggtctgcattgtgtaaatacagggtcactcttctgaggaggtaagcaaaacattaagtaaaaagtctctctcagtcttactgtgagagtcagtgaaatgaagtctggcagtataaaataaaatgcacaataaatgttagctgccatcagtattgtgtcctcatggtgagtttatgtctaagcacatcgttcatatgaggtgatttcctgtggggaatccttaacgagagaagctgaataggcaaagagggggtaacctaaatgagttgcagggggatttcccttgggtgtgtcaagtcagatggaggactgagggttaagtgttgattgacatgtaattgcaccaatagatgacaggcatcagagacagagtgggtgggacccaagggttgccatccattcacctgtgggaagctccaaagacagtgtaggaccctgtaccagggactgctgccaagccagaagacttatcaaacaggcaacaagaagtttaagggaggactaagctggtttcctgtgcactattatggagatgaaagagaaattaagctttcaatagaagtttttattaacttgttttgatgctaactcagatttgtaagaacgttgcaaaaattgtagggtggattttttttattgtgattaatctatatctgaaatacttggagattgttaaatatggtaatgtttgctaagttggtggaatacttgggcctttattctctgccctggctaattcatagtcaggggggttcattttattgagatttgaattcttctctctggtagtagtatttattttgctcacgtcactacagatgtagtggtgggaatccctttaagctggctctgtcttttcccttatcctgtttggagctctggtgtcagagtgtgctcccagcttgtcctctgtctgcaagttgtaggatcagtaattagatagagaatgtaggagccaaatgtgggccatgatcttgctcatggctgccaagaagtcactgttggtagacgttgctaggattgtatacacacctgcaaacacatgtacacgtgatctttaggcacatgtagctgtttgttatatatatgtgcttacctctacctatgcctccacttgcctaacaacaaaacagtgccacccaactctcccacagggtaccctctgccctttctcctttcaatgggtagctattcccctcttcaatgatatgaagcttagctcttaccatctggttgttgttgttgttgttggtttggtttggtttggtttggtttggtttggtttggttttggcaaccttaaaatatatagaaaaggaattaagaaatcctagctgagctgctggtggtgcactcctttagtcccagcacttgggaggaagcaggcaaatctacagagtgagttctaggacagccaaggctacacagagaaaccctaatgaaaaaataaataaataaaaagagaagtattagctgagtttttgtttcagtttctttgtttaggatgttttatcctagtttcacagtgttagaggttatataccttactcaaaatccccttagtcccaaggtctccatgactttatgtttacccacacaccactgagttgagcagtgtcagttttcgatttaattttatcttcgacatctcctttgcatttttaagttggtgaaactattacaatgagtcagaagtcggagctgtatacacagatagtcaggtgagaagtgtcccttctgctgtaacctaccattcaatacggacctgcttcttacacttctgactgacgcgagtagcagctatataggtcggcatgtatgtgcacacataggtaggcatgtatgtgcacacagaggtgcacatgcgtttccctgtcttacaaggttgtatagcgttactataccttttgctcttccccctccttcagtactattctggacatcactgtatgagtctttgtggggtgtgtgctgccttttgcttttggtttttacggcttccactacatgattgttgtgcatctcttcactcttccacatctgtgaccttagcaatagcgtcttacattttgtagtgatagacagcgccacagtgatttttctcaggcatgcctatatattttttaaattgttggatatttaccattagggtgaattcctaaaaaaaaaaaaaaaaaaaaaaataggattgctatatgaaggcataatgtaatttaaaaatctcgtacattttcatttgtttgtttgttttgtgtgcacatatgtgagggtacatgcacgtatgccactgcatgtggtagtaatcagaggacagctttgtggagtccgtgggtaccaaggaccaactccagctgcgtagggttgggaggaagcactgtatcccctgagccatcatgatagccccatgctagtgttgagagatgaacactatacctgcatacagaggtgtcctcagccttcccagcatgctgtgctgccttctcagttttggtgacatttattacgttttctcttgactgtaagaacaccatttcataactttatgaccatcttttgctacgtctctgggtatgtatttgcgcatgttcctataactcattgtattggtttgtaagctctttaggcatgagggttatcctctcttgggccagaagccgccagggactgagttcactgtgctgttgtcttctcattttttttttaacttattacagcataaatgttaaaggcgagatggctcagcactcatgtgcaaatctgacaacctgagcttgcaccccagatcccacaaggttgatgagaaaatcaacaccagagagttagtttcttaccaacagtggtgtctgacctccactgtgaaccacctgacccaccccatacccccaatacatttaagagttctgcagttagatttattagtcttttgttggagcgggcttcccagtcattctcccctatattgctgggaaggtagaattagcccacgctttcctctagcttacccatgtttctttctgcttcaaagcacggtgtttggtgttcatgcttgtcaacaacagaggcccatcctgagaaacacaccatcatttaattccctcattgtgtggatggcatggcatgtccttaattagacctagatggttccggtcagtcattcagtatgatgctttgagtcagtcaaaaggtagggtaaagatgagctgtctaatgctgtcgccactgtaccatggcttgtgagtagaagttcactctaaataacgaaaaggattgcataccgaatgcatagctaggaacgtggttgttgttggcattgctattactgtatttaactaactatatgtgctatactttcatgaagttggtagcacagtaagtttctgcttgttaccacaaacacatgggttacgtactgttccgtggcattacaatatttatatcacctgaccatgggaagtttttaggtcctttataagattatgggaccactgtctgcctcatacaaagtctgtcacagagcacaatgttagatggcacacacccacagttaagtctttcctttcacagatatttgagatatacagcttgtgcaatagatctacttatatctatgtatcctctcttctttcttctctcctctgtgtgtgtgtacatgtgtttgcatgtaggcatgtgtatgagtatgcatgtacatgtgggtacatgcatatggaagcattgggagccttcaatcttgttttaccatattcattgactcggggtctcagctggacccagtactcgcctttctagctatccttgtcagagaaggctttgtcttgtgagctccggaattacatgtcagcttccatgcccacctggcatttatgtgggtttgtttttttctttagaaatccaaactcctgagactcatatcttagtgagggtttagttagtaacttagttaggctgtggcagaggtcagcgcctgcactggaggtaggaactgcagcacaagccatgaggaactgtttccctgtgttcctcatgacttgctcagcctgctttctcacagaactgagtgccagcatctcacagtaagccgggccctcccacatcaaccagaagtcaagaaagccacaacagactcttacaggcaatccgatggagacatgttcttaactgaggtttctcgtcccagataactctagcttctgtcagggtgacaaacagcaacactaacagaacaaccccacatcagaccccattcttacttggtatacaagcacatcggttattaaatcatagccctgtccttttcgttcatccctgagatattccagtattaaacattccaactcacactataaaaatgcaaatattttaaaagtttagtatctttaaaatgtccagtctcttaaaagcctctgtaaatgtccattgtctttaaaatagtacaaacgggcttaatggtagactctataagataagaacaatatctatacagttattttttaaaaaggcagagccagggcacagttataatccgatcaaagcaagactgaagcccagcggtgcagtgagttcagcgtcttacacgtgggattcactctagggcagtcgctatgctgtgacccccccaatacgggattcactctagggcggtcactatgctgtgaccccccccccaatacgggattcactctagggcggtcgctatgctgtgaccccccccaatacgggattcactctagggcggtcgctatgctgtgaccccccccaatacgggattcactctagggcggtcgctatgctgtgacccccccccaatacgggattcactctagggcggtcgctatgctgtgaccccccctaatacgggattcactctagggcggtcgctatgctgtgaccaccccccccccaatacgggattcactctagggcggtcgctatgctgtgacccccccctaatacgggattcactctagggcagtcgctatgctgtgaccaccccccccaatacgggattcactctagggcggtcgctatgctgtgacccccccccccaatacgggattcactttagggcggtcgctaatgctgtgacccccccccccccgaatacgggattcactctagggcagtcgctatgctgtgaccccccctaatacgggattcactctagggcggttgctatgctgtgaccccctaatacagctcctcagtctgcagtgaccacccaaccataaaagtaattttgttgctacttcataactataatttagctactgttataaattgcaaatatctgatatgaaaagatggtcttggggaggggacccttgtgagcaggtcatgggttcgtaacccacaggtcaagacctactaatttatgatcttctgggctctataggggctaagcagattttcgtctgactatgccatctggagtacacccagcttgtctcagagacgcagcctggctccactccatacctgttgctgtccttggtagtcagcccatgacaccgacatctccaaaatgctaagatctgtaatataactgtgtgctctcatcagtggctttccttaggctctcaaggactctgaccctgccacacggtgccaaagcctcaatttagctccacgatcccttcagtactgcggcttcttctgctattgaggctgcaccttcactcgtgtccttttctggcttctcacaacgctcagccactctccatgacccctttatgctttctaaactgtcaccacatgcgagactcttacacacaagtatcacatctagccttggccccctctgggccacacagcttctgcgtgctgaccttgaggaagcagttccaagaagacttcagctcagtgtggctggactcttctttatcacagctaacccgtcagccccaaccgaccagaactacagattcttaattcaaataccaaatagtgcaataatgtttaatgggctctcaaacctcccactgaaatttcacaagcctggcctccatcatctgcatagctttcagcggtcttatcttccaggctcccatagaacggctccgtgaactcttgagcacttggtggtctctccatctcagaatgcacctattaccacactcctcttataaaccacatggccaggtctgtcacagcctgtcaccccacagcctggtgcctgcatctgtcttagttaaggcttttgttgcaatggtaaaataccatgaccaaaaagcgacttagcaaaacagccattactgaggggagccaaggcagcactacagaggcaggagctgatgcagaggccatggagggatgctgcttactggcttgctcctcttggcttgctcagcctgctttcttatagcacccaggaccacccaaccatagatggcattgcccaaaggtcagtcttttggaagtattttcctaactgagattccctcttcccaaatgactctagattgtgttaagttgacaaaaaaccaaaacagacaaaagcagaagagcttgcatgttgagttaacacactaattagaagagggctgaggcctggaagacctcctgtggtcagtttctctctctgtgtctcagcaccagcttcctcaggagctgtctagtatattttaatatctggtatgtttcctagatgctccctgtttttaatgtttctgtgggtcttgttgcatatttatttttatacaagcagtcttctgtgaacttgtgtagttccacgattatgcttacttatattttctctacactgaattacacttacaaatttataatttagaatattgactttgtactgtatagaaagccgacaatccttttagttggttcagctctatgtttgtgactttttaagagtgtgtaaacatttcattatgcacatttgtacagtttgtgttaaattcatagctaaatcctttgtctttggtgttgttatgaaagaagttttatgcaagtctaatgccctctcattggctgtttttgtgaatgatgtctacgtattaactccatgtgccaactttactttcttttacattactgaattagttttctgaactgttggtgagttgtgtgtgtgtgtgtgtgtgtgtgtgtgtgtgtgtgcgcgcgcgcgcgcgtgcgcgggagtaatcatttagtctgcaaatagagatagtttatttaatagcattggtgcctacatgatattgtataatagtgggtatccatatcttccttacccctgacctttgtggaaaagtccctgttgcatctcttgtctgataagacctagcttcatgtctaaagcctacatacttaattatgttcataaaatatcaatcaaatccaagtatcctgaattttttattagatattttctttatatacatttcaaatgctatcccgaaagttccctatgccctcaccccgccctgcttccctacccacccactcccacttcttggccctggcattcccctgtactggggcatataaagtttgcaagaccaagtgatggctgactaggccatcttctgctacatatgcagctagagacacaagctctggggggtactggttagttcatattgttgttccacctatagggttgcagaccccttcagctccttgggtgctttctctggcttctccattgggggccctgtgttccgtcttatagatgattgtgaacatccacttctgtatttgccaggcactggcatagcctcatatgagacagctaagtatcctgaattttaaaacagcttctgtaagcgttaaatttcaagcaatgttgagcaccaataggaataattgtgtgacttttctccttagacatatatcaacattgtatactttaaaatagatttgctaacactaagctaactctattattactgtagtaaatcttactttcttgttgttgttttttttttttcttccttctccccatctgggggtgggagagactgtctgtcagatgacagcctgcaggagttggttctttcctttcacagtgtgtgtttcagggattgaactcaggtcatcagaattggtggcaagcatcccttaccactaagccctcttgctggctcatctgctgtcttcttaaagcagtatgggacattttctagcatcttagttagaacctttcactaacatgtggaaataggtggaattaatttcccttttgtaccatctttttcaacattacatataaatattatttaagtcatttcttttagaaaaatgtctggaaaggaaggttcgttttgcaaagtaactgcaagccatgtttttctaaggcttcctgaggttatttaatagtttatttttctcatagttgacccctccatgaacatttgtctcgttttcagtgctagctagtctgtgaggaagagctcttctgctttgttccttaatgaacaagagatggcaggcagcctttgattgtttccttcttctcctccctgcttgagcctccatgagttatcagtgtcgagggagaaagtggagtttctgacggaaaatttcagatagcaggtggcagagcagggccagcctatgccagcccatgtgcttgtgtccagcttggagcctttctggtggcttcatatgtctttgtccccttctctaggcaaaaatgttaactgcccatgtgtttcttctgtcaattaacccggaagtctggagtagattccttgtgttttctgattgtggttatattgcttattatgtactagaattttgtccaagttgaaagcacacagtacagcagttgttaccttactatttatgatagttagttgcttgttgatgcatgcacatttggtctgttttctgagtatatgttgggagttaaatgaattgatatttgtgtgaggcatttctgcttaaaatacttttctctttcacttaactttagtgtttaatccactgtacatttgaaaatacatattaggacataaatatcaatagaaaagggttttgaaagattctgtaatcaccacttaatttatgtgcagcagcatcttgatgctagaagagtcatagatccaagtatgccccattcttcctttcttaaagatgatggggctggaacccagaactttgcacatgcttgtaatatggtctgctgctgagctacatccctggcccttagttttctgaagaaaggatttttctgtgttacctaggctgatcttgaacatcctcttgtcttgcctctgcagttcaggtgctatgattttaggcatggacccatgtgcttagtaccaactttttgatgccgtcaccggaaagaaaaacaaggtgatggtagctattaggggcagtgatgggtagatggggcaacacagtgccaaaatatcaaatagcacaaagctgcacagcgtggaaggtgttgcaaaatatccgttgttcttctaaatctggtgcaagcagaagggaggatcagcggatgttcaggtccaggttaaggaaggaaaagacatctaaagggagacgttgtttcaagctcttagaagaacacaagctaatgacaggaatgatggttgagggtcatgggctggagccagagctgcaccgtcactcttggtggctagtcgtgctgtgaattggggacctactactcgcttatccccaaaggaattgaggctttaaatttaaattattttaacttgataaaacccttttatttctcaaagttaaaaggctcaagacatttcataattaagggtgccctgtagtgctcattgtttgatactgccatgtaatctgttaacttaggaaaacaatttgtttttgggctgttttctgtttgattgtttgcttttaagtttttgggttttttttttttttttaaaatgggtaatggataaagcccgaggctaggcagatagcaactttcagtactattacattactgattctcatttattttcaaatgttagtagctatgctggatgcttggcattatccattatcattaagtaggggtgtgtgtgtgtgtgtgtgtattctcttttgatgatttttttagtaagacataaattagatgatttctttctaaatgttttaagagtattcctttcctgttccagctcctatcttcattgtcagtgggcgtcagtagaagatctggaaaaagacaagagaattcagcaaaagataaaacggtttaagtcaaaacagggccagagcaaattcctctcagaggtatggaataacctgattagtttttgaattttgaaatgttctctttatcaaaatattccagagtttgaattttaggactttaagctgttaacaaggcctggtttggtactgtgacttggtactgtgacttggtactgtgacttggtacggttacttgcacattggttaactgatgctgctggaatttgtaaacaggaagtttctcattcttcctgttggctttgtctagaaaatgacatgtggaaatagcagtgacggtgtgattaatattgtacgatgagaatgcagccgagaaatgagcaaagtaagcagacagaggtctgcagagagcaggtccgaagcttcagtatggagggttttatgcgatggggatacgtggccattggtggttgctcaagtttgtgcctcttaccaaggtcacgaacagatgctgtgccattgcgcagagggtaggcagcgtctcttacccctgtcctctttgccctaggttattagttaaagatagacagagatatctaaccttctttgaggagaggaccagcccctgacatggtcagttatgtctcaaagatgcttttacaagctgcttagccggctctctggactcgaggtcactaacttatgttcaaatacaagacaagaagatttaaaaaccagcagctctctaactttgaaggagattacttgatggtttcttagctgttctccagaaagtgttagccaggcccaagcaggttgcctgcaaatgtgagtctgtggggtttgttccttccacaccgacaggggcaaaggcaaaaaggaaataactaaagacgtaactgcacataagctgtgaaggatagggttgtgaaatgctcctactggtcagcctttcaggtttagccttctgtggaggaggaagagatggaagagtcgagagtctaaggtcacgtgtgtgcttttctggagcatgttcagggtacctgcaggcaagcaggcaggcggcctaggatacctggcgctgctttctctggtctcagcctcctgccctgctgtctcaatagcactgagtgcttgacaccgggtggcttgggctcctgactgtgactcagttctctctcctgggagaacggtagcaaggctttttttttttttttttaagagtagtctgaaaataaacctgtgtgtttctatttcctgtgcccctttttatgaaagttaagctaaaatgttgagatgctgggtgaccagcatcagcagagagaggacccatgtgtcctgttgaccttctgtgaggcgcagcaggagggaaaccaggaagctccgtgggctttccctgtctgtaaatcagggccctgttcattcagtttacctggactctggctcctgtattcactccttagggaactgtgcctggccctaatatacagcctgtttctctgaacctgctgtccacatgtcacttgcatccaggatacaaagcaccctggtaaaatggcaacttagaaatcttagttctatctggaatcttagcaggaaagagtacagctctgtgcaccccttcctgactctgtctaggatctctggctatggctgctgttgcagtctttgctgaaacttagccttcctgactctcctgaacctacagtctactcagaaataacatctaggccaggaagcccatcatatgcctatgccacagagcactggaagagggtgtaggagagaacacgttgggtattggctatgaaagctcatgctggaaagacagtggtcttacagagggcctttgtcatccaggactagtttgtggagtatttttacggcttgtgttgtatataaataatatgtacgtgctaattgcctaaatccagcacttttggcaaagctaaattcatcagaacgttaacactttaaatcgaatacactgccgtagtgtattctttttcttaccgctcacctctgaggaaaaacggaaggcagcagaggcattttttttgtgtctgtgttgtttggttcatagttcataatccaaagcacccagggtggacattttaagtgggtacaatagccagagtgacagagaatgaggtctgattgactctaagctgcctttcacgtgtaagcattacagagtgttaactaagctactctacagcacgcgtaactgtgtgtctttgtttctgactcagatcagaaccttcacagatgtaggtttcttaaagtatgacgtggcctttagctttcatgggagcagcagtctgttcttccgtatgaaccagaatctgcttgaagcgtattctagcctcgtattctttctaaacaaacattgttagaatattagttaaattagttagtaactgtgtttaaggttactttggattcttttacctaaacactcacattcagtacaattaagttattggaatgtttaagattaatgggacgactgttattctatgtgaggtggtgatatcggttggcaaagatttccaaccatcccgaccatgctcacagaccagtgtgagacctgctgatttcagggttggtggcttatgctaacattctgtacgtggtgctgtgcagcgttcttagatgcgctcactagctagtatgtactgtgtgtggctctgactcttcactgcagactgtactttcaagaatgctaaatgtattgcatgccataggccttttggattgcccattagtgaattgtaatttcacacttcatttgaaatattcttaaacattctctcacagtagaaggcttcacacagtaattaaaatactcagttaacaaagtctgagaagtttgatttcctcacagggagtgattttgctaaattgtagcatttcaattaatataatagaagatgtcaaatacaaattttgtgttgctgtgacccaaaatcctgcctagtgaaaagtgaactactgtttctctggagacaggaacgagactttaagccttttcttccttcttgggaacagattgaggatgacctttttaatccagactatgtggaagttgaccggataatggactttgcacgtagcacagatgaccggggcgaggtaacagagatcatttgtgttaccctgggtggctcacatgtgttgacagaagggacaaaatcaaggtctgagcctggtcaaagcctccactaccaagcttctagtctgtgtttaactgaaacgttaaacacagaaatcctccttccctcaaggagaattcccactgactcagagcacccaaagtgtttccccttcagtcttccagactcatattcaccattgtaagtgactgagagcaaacaggatagtttttcccttgaagaaaaaacttgtctgtttttcactctgcaggcaactattcagttatataaacaaatagcttactataataaatccaaatcatgtaattgagtaattagattacataaaaattaacctttgatttggctttttggtattcattagctactccttaatatttggtcatgaaccaatgattcagataaaaagctcattttttttttctgttaatacccaataatccactttctagtatacactggaaatgaccactttcagtgcttatagttataaaatgtgggcagttgagtcttcccagtgctgggggttgtcttggtcagggaagcagagctcatgtcttttcctgaatatatagtatttggtcaaatgactttagttctgatttgtttgaacctggcccagcctgtgattcactacctggtgaagtggtgctcactcccttatgaagacagcacatgggagctgaagcaggacatagatcaaacaaagatcgaagagtttgaaaaactcatgtccagggagccggaaaccgagcgtgtggtgaggactggctctcggggaagggtttgatttgggcatagcatagtggtgtagtcactgagaaaccactaatggcatctactatatttggaacaggagcgacctcctgctgatgactggaagaaatcggagagttccagggagtataaaaacaataacaaactcagggaataccagttggagggagtaaactggctacttttcaattggtacaacatgtatgtaaacatgcttctttttactttcaataaatgctgtagctcatatcctttgtggtattaagaatataaattttaatgctgtaatacgtttttaaaattcaactgttggaatatacttaatttattcaccaaattaatcaatggatctatgtagaaatgatatctgtttgctgggaacttttctttgagatatattttgttgaactaagaaaatagctaaggtggtatggggtatgcatttatggagtgtatactctgtaaaaagagagtgacagctgataatcacgaagctttcctgtccttttctttcctaaaggcgaaactgcattttagcagatgagatgggtttgggaaaaacgatccagtccattacgtttctctatgagatatacttgaaaggaatccatggcccctttttagtaattgccccattgtccacgatccccaactgggaaagggaattccgaacctggacggagttgaacgtggttgtgtaccatgggagccaagccagccgtcggaccattcagttgtatgaaatgtacttcaaagatccccaggtaaagcggtggggtgtgacccctgtgcatgttgtatatgttttagagggttgaagactcagatctctatgacctggggatagaagcctcgatttcccttacttgagaaacttgcttgagatttcttatccaatgcatgtttgaaaattgtcctacatccatgaatactggttttagcatttgtcattctgattattataaagagtaacttaacatttaagaccacaaactctataacatattagtaacctagttctattttgtatgcctaagacaatgccacacacacacacacacacacacacacacacacaaaaatgatgctaaaatgtgaccaggggggacattttattgtcctatgatcagaagtgaaaaagtcattaagtaaaaatccaagtatgccacagaagagggagttagtgcttgctcgtgtaagaattgttctaatcttgtcttgtagttacctgcttgtagttattacctcttactggcaataaagcattatgcatgcatgataggggatggtatatgctaaaacatgtgtaatctttaagtagtagaggctgttgtagagttggtaacaatacaaagtgtgacctatagttaaaagattaaaaaatattgaaatctgtttttatctttagatttgagaaattataaggctcatcctctttggattcttttttaaatttcaaatattttggtattttacagaaatgttttaaaaaagaaaagaaaaaaattaagttagagaaacttaaaaaaaaattaacgttacctcagcattgaatttcctgttaggttctgtgggctgtgactagactggagcacttaatgtcactttattcacatgtgctctctaaggaaatttgaccccaaatttttctagtacttcaccagtttctttttaaaaggaaatgtttcaaagtcctactttaactaaaataactgtaaccagaaaacttgacaacagaatgtgccacctaaaatacagaggtctccaaagggttaaatacatatattttagaagcttttttatgctcaaatgtaggaacatagccagtcctgtgaaacagctctcacgtgctgtgccccccccccccagggtcgagtgataaaggggtcctataagttccacgccatcatcactacattcgagatgattctgacggactgtcctgagctgcgtaatattccttggcgctgtgtggtcatcgatgaagcccacaggctgaagaacagaaactgcaagctgctggaagggctgaagatgatggacttggttagtgaccgtggcggctgccgctgagtccctgcactgttgccttggtctctgagtgtgctgccttcctgactgctgtctgctggtatctcagtagagcatagtcatgataatttgaacaacatcaatttcaaatatttgccatgtcattaactgttgggccaagccttgcctccgtgatgacaggccacctacgtttcccagcacgtgtttttgctccagtgagggcagttgtacatgcacgctgttggttagtcggctgggacatctgttcagtttctgcagatgctgagaagtttgtaatattgaaggcctcacatttgctctggggttttaaaccacacttattttattttcccaaagaaatagccatgccttcctactttggtgatagaagatttttcttttctgtaggaataattatcagtgacatgttgtaagaatagcaggattttgttatttgttgtgcctgctgctgtgtgtacaatcctccgatagaagttgctacaagctcttctgtccttgaattccttcttgatccatagttttcaagttagtatggccatttgtttgtcccctccctccctccctccccctccccctcttgcatggatctgcttgtgtgttgaggttgcacacataccttggtgttcttgtggaagtgagggaaccacgtgggtctccctaccatgtgagttccagggagtgaactcaggttttcagaacttttacctgctgagccagctcaccagcccagcttctcatttttaatgtacatttgaaaaagcattgttatcctgtagaatgtagtggcagagttgagaacttctgtagatgtcttgttattgagagtggatgatgggaaggaaccttctgcgtgttcagggctgtcctaaagactggacctgctgaagagaacctcagagctctccgtcacagcttttgcaagggtttggcctaaccagccattcttttaattacaaacagcgaaatctaattttgcttaaaggaagaatattgactgatttttttttcttcctacttagggtagcatttcccattttattatcaaataaacagcttattaacaaggtcctagatgttttggaacgcagttcaccaaatttgatagccagtctgcaaagcagcatgagcatttagaaaaccagagaaagtccttgactagggttctgtagacggaaggactcctagctggctccggtttccctgagtgatactctagcagtgcagggaagtaattcgttctttgcaggtaaacacaaatgttcaggacctacctctctgtcttcagagcagaggtgtgccttcatggtcacccaccaagagacaggctgtttctgaaggcttaaagtcatggggctgagcttgccctaagttgtactctgttgttagtttccaggtctcaaaatagtagattctcattgtgaaatactccttagttagtgagagaaatgtgctgtacttctctcaacatcaaaacatttacttgcttttgaggtgttatagaaattactcttttattaatggataagaatctggcatagcagtaacttttccgttacatatcacaatatttgtttacttttttatgcataatagcacatagggaaattataatgttttcttcactgagctagacagggagggtgaggctgcccctcgaaatgggagaccagtcatggggttctgactgtcatagccagtgtgcctgtagcgtgtttaagataatgtactcagaatctccagtgtcctatctcagaagagatgtttttaaggtggaagatattattgttgttcaaggccaaaatgtccttgtattgatgcagctgagaattgctgactgcttggtgcttaagtcctaacttcaatgtcatttgagcctattctcttgccagagttacctagtgaggagccgtccaggctgctgtaggccttagggatgccgatcctcaggctagactggcaggggtgagcacatgcttggtgaagatgacctgcaagctagaagggaggattactgagtgtctgtctgcctctcctctgtaacgaagtcagagggaggattactgggtgtctgtctgcctctcctctgtaacgagagacacagagctgtgtcagtggtgatcatagttgacaacatcctcagtaagagctctgaaaggaaagccctcgacaaagaggggctatcctgaagttgttagaggtcattgactctgttgtctcctcattcattgacaggaggctccacacaaaactgtgttgctaaagggaaattaagcacactttgtccatttgcactaaagaaagcaatcatgttttcaaggcaggcgcagctctacctatccattgaactggaggctgtagtgcccagtagcccaagacaggagaggtcctttgctcaaataagtttcctttgaaatgtgcatacctaaaagtttgtaatttctaagttaagtgctcagaccttaagctcatgaggaaggagattcgatagctctgagacagtcaacacagcatggccactgttctttcactgtccgggatgacactttcaaacgctcttggataaagtcattcaggactttggctaatcagagatcacagccagtgaaacttaaatagtctagaagaccttgaactcatttgcagattgcacaggctttgtgagcctagtaatgatgataagccactcatctgctttagtcggagacttttacaagagaggaagaaaccagaacaaacccatcaaactgcctcccctcccgtttaaagtgcttccctgacagatagacctggtagagattgctcttacttagattatgtcactagggttcagtgagtatatgctctgtgtggtcagctttcaagttaaaccagaatcttattttgaaattactacatggctgcagtcacttcctaaaataaatttgtgttgtgcaccaggaacccaaacaaaaaagaaaattgtaaggcttttaaaatttgtaagctcgggtctaaggagcctaacgatcaccaaacaatacacttgtttgacccagcccacaaagcactgcataaaacctggcacggtgatgcattccttaatctcagcacctagaaggtgaaggcaggagggtcataagttcaagtccatcatgggacacgtgagaccctgtcttaactttttaaggacctggaggagaggtgagaggagaaattgcagtctggatgtaatgtatgagagaaataaataagtgaatgaatgaatgaaagataccattgttgatttcgatcagtttaaaaggcttccttatgttgaatgagagaatgctaagtagtaggtaggtaggtaggtaggtaggtaggtaggtagataagtaggtagataggcatctccgttgcttatgttgaaatagaaagagaggcttggttgaatcaacggctggaggaaggcgagcacaagtggaaacactggttgaagcaatggctaatatgtttcaaagaaacaaaattagaaaagcgttgaatttaaaaaaaaaaaaaaagacggtggtatttaaaactaagccgaccgctctgctagttgaaaatttttgccaaacaaaatggttttccacgtactgttgctgtttgaagcacctcttttgtctccgtcatgagtcaagcaggaagcagatggaaaggtgagagtcctgctgatgtagagaacagaaaggagcgtgtaaccgagtctggggccttcagaggaaaactaactacagcggagaaaaaaaaaatcactgagattgggagacttagaaagccatcctccttaaatctccaccttgcaaactcacaagaaacaggggcaagccctccagagtttgctgcagtgttctctgtgtctgcctgccctgcaccaggagccatgtccacgtgtctctgctctgaggtctacaccttgtgtacatgctgacccaccacagtgagcagaaatagactagagagagagagagagaaaagtgttagcgctgaaaactgctctgttcctgactggcaagttgtttccttcatgttcttccaggaacacaaagtcctgctgaccgggaccccgctgcagaacactgtggaagagctcttcagcctgcttcatttcttggagccaagtcgcttcccttcagaaacaacctttatgcaagaatttggtgatctgaaaacggaagagcaggtacttgacccctccgagttgcctttcagccatgaaactgaagatgaacttgtgaaatggccaagatttttggtctttgcaaattgtaaaaagtaagggttgtgttgtaatagttaccaccccagcaaagagctttgtgattccttctctaggacttgaagtcatcattacaaagttgatctcttcttgtttccttctcccgcatcccgcccccgccctcaaaagagccctttgagtttttatcgtgtggttactttaccaaggcgacttttagagatctttgtgccatttgggttagttttctgcagggtgtaatcacgggtagtgtcagaaacccctagggtttagagaactacctgtccactggaattttgggtccttggtctcattgctgagtcatactgcttcaagcctatttatttacatttcaaaattggaggtgcaactaccccactggattcctgaaagaaatcagagggcttgtgtgtgagaagcacttggcacctgtaggcactggtgtggagcatcctgtcagtgaggcagcagagacccacatcccactaattttaaaataaatgcattagtaagctcagaatcttggacttgtttgcccactctccagtctcctggcgcaaacctcctggttaagtttgctgttttgtttctcttctgtaataacaacagtacagtgccatcagtgggagagagggagactcctgctcggtttgctcattgatgcagagtagtatcctccagcgccctcaccctcgctgtacctctttccacaaaggaagggaagcatagagtccccgaccttgctcctgacctcttcctgtccatccccataaggatgggaaactaaaccagtacccctcccccaacacgcacttagagtttctcaagcccctcaagtgattcaggagttctcaataggtaaagttttctctctgacacaagcgacaactcacagtttagctccttcacattcttcctaggcttcaaagaactaaagatggatattaaataaataagacagccttccttttttttttttaaatgccaggatgttttaacacgcaagtgaatggagataccagtattgacttgaggtccttttttaggtgcaaaaactacaggctattctaaagccaatgatgttgagacgcctgaaagaggatgtagaaaagaacttggcccccaaagaagagactattattgaagttgagctaacaaacattcagaagaaatattaccgagccatccttgagaagaattttacatttctttccaaaggtggtggacaagctaacgtacctaaccttttaaacactatgatggaactgagaaaatgctgcaatcatccctacctaatcaatggtaagcctgctcatctacccgcctggagcccccgctgcccgtgcgtgccgaggctcccagggcgtgctcccagggggacccccgtctgtggttgctgaggttggtagccagtgctctctgaaagcaccatgccaccacacatcgccttcgtctgaaagtgggtatttgcaccaggaatagatgtcagcagggccaggccagtggctaaagccatgcctgtgagatgttcttgaagggagtggtgtgcttgattccaaagcagttaagagcatctccttgtgggcagcacccttgcaatcggaagacctttagggagtgtcccctgaaaatgggaagggattttaaagtttcgattgctgtattgtccctgttactgagaaggactttataaccttgatgttttctattcgactcccgcgggttaaatgccttacacacttccagaaactattaaggagatgtgtcccctgcctgtgtgagcacagccagtagggacgtagggggcgctgcctctgagatgcaagtcccaggggaagatggtgtatgagaccaggattttgccaggcaggacaagaaaaagaaaggtcgctgaggtgaagccctaactcaagcaaacaagagaacaaagggaccttacccaaagtatagcagtgcgcggcacagagggactgtgccccttagactcagtgggccctgctaggaagcagatggggtcacatgctactttggctccagacagtgggtggaggaagccacagctggtgtttgagctgagcgctgtctacgtgcctgaggatggacctcagtgggtggagttctcacctagagtatacagagcactgggtggcatcccaaaacaccgcattaagccaggtgtggcagcatcttcctgtcgtctcagcccggaggaggtagaggtcagagaatgagaatcaggaccgttgtcggttatatagaaacgttgaggctagctagccatttgggaggacgggctgaggaggggctgttgttcctgagagcgtgcctcagaaatgaaaggactagagactgaccagagccaacattccaaaaaagatggaatgaaggatagacagacaagcaaggagagaatgatcagctgaagggatatggctgtgatctgggcagtttgcactgtgatggcaggctaacccgggagtgttgaggtccgtgagggaaggagacaacctcccattcccctgcctcagcatgcacctgtccaccaccctggatgtccttgccaatggaggagaaacagtagtatccaccaggaggataagctcagggtatagaacctgaggccattgctctgctgtgacatctgtgaactcctgtttttaagtagtgtttcagtagtgtttgttttctaagagagcaccatgtctgatagttgcccgtccactgtgctagctaaccacacagtatttatgagcccatatggtgtccactagcctgtggctgagttgggactcagggaaagtactcgtgtatgaggaggacacacctgactatgcgcgcatacttttatttcatagcttatagagagaaaatagataacagcaacccccagcaggaaagaggagaaaaagagattacataaaggactcatggtgctgacgaggcctgtgtcacagacgctcagtcccatgacaaggaggactgctctgagcttccatgtccttcctgctcactctggttaattgtatgcagagagcattgccaaggctccccccacctccaaaacatagcaggggcccttttctgtatctgatttgtctctggagtcccctgtatagatagctcttcttctagagccccttaggactccttgaggtatttgtcctaattgtcatgccttgaggtgagctctcttgtcctaagaataaataacacagtgactgttagggaggggttcttgtacccatttttttggaaagttaaaaaaaaaaaaaaaaaaaaaaaaaacatgtacgttaggctcctagctccagagacagtgagacagtgtatctcatggacatctcagggattggtccagggccccactgcacactcttatccaggcttatccaggatctgtaactgagctctcatggagttatggctgtgtccaagtggcacccgcaagaaagtttaatcatccgtagtaagctgttatgaactagtcgtaagagaggaaagtgcaccaactggcctaaacttctattctacagagcatgtctttggaaaagtaggagcaaatctgtacattggtgggagtggtaagataagcttagtgggagagaactctggatggtgggagtacatgccataaagatgcatgtggttgaagagtgtctgcatatggtagccagagtccccggcaagtagcagctctctgtggaaggaggaaagctctactcttctttccagttgcctttgctctgcatacaagatgaatgcactaccagctgcactttaactaagtagttgagtttatcataacccatatccagttgatgttttcaaatctaacctcaaaggaaatctttaattgctaatttttaaattttgtcttgtgatacatggggcagaaattgcaactgtctccagatgtttgaccccggtgttcacgtcccatcccatgactcacaactgcttataacgctgtcttgggaggacctgatccctctggctctgcaggcatccactctcgaatgcacacatgcacacgtatgcacacactttaaattctaaaagttaaaggaaagaaattatcagtggcatcaaaaaggcaggagtgttgttttgctgcttcttaataaatttaaaattttataatgtgagtttagatttctctttgaattatttatgtttcaatttttcactaaaataattccagcctgcctgacatttgctttctcaaagtgaaagtctcatttttaaaagacaattccttgatcattaagtggttttaaactatattacacttcatttttatcccgggttgtatgcctcatagacaaagaatacccaaatatcatagggttaaattattcatttctaaatcgtaagcatcttatgagcattatacaaaagagtaaaacttactaaaagatataatgtgataattcactgtgagtctctgtgtgagcccaggagagctttctgaacctagtgcctgccaggtctccagaccgcaggcctggggacaccatcacctttagtcagggacactgtggcttctgtccttaacatggcatctcctccttatctttccttggtctgtttccacacttacagaactaatctgaatctcagctttttgttcttgtggaaggcgactaagggtcaggcccttccgagagagttggcattttctgcccggttcactttgtgaaaaggtcgtgcacctgtggaaggcctggcattcgctccaaacatcaagtggctttaatctgcccttgatgattcttaactcatctagtgttctctgtatgaccccatggggacagcctcaacaccaccttaaatggaagcaagactgtccttcactggcattgtgttgcctgtggaggtgccataagccgttacagtggccttcctgacccaacccgaccttcagacgcctttgggagatttctgtaacccacatcggtacgtcacatacagtgggaggaagttcctggcacagtataatggcaggaagtgagtgcttggggttaaacttggtgtgctttcgttctcaaaagcatctatgataggagaagagtgtgaaacccagccctgtgtactgggggcccagaggccaaggagggggccagatcacctctgcttcactccagccaaaggactggagcattgagagaagcctacctgccgctgcctgaacccacagcacgatggaggccgtagctgtgagccttcctcctcggggacatgtccttccactgagtgctctaccgcactctgtgagccttcctcctcggggacatgtccttccactgagtgctctaccgcactcaaacttctgcacagtgtagaacatcgagaaaggggacttagccaggaagccataggttgccttggttttcatctttggagggtttgggcattgctgtttttgttttactcagctgacacccccttcgcctgtagttcaggctctagcttttctgtaggtatttggcccttggcttgttttcgacacctatggcctaacagtctgttgttgaaatctgggtgtgttttgtttggttggttttggtttggttttgttttgttttgttttttaatatagtcagcaaacatttggtggctggaaaatgtggatctctctccaaactgcctcagtatatggaacttaaaactttggtccctttttaggcctgtggttatgtgtggatctaacttggagtaagcaggtggcttcctgctcttacatgtgaatgggatattctgattttgccagtttgctgtgggttttgaaagcaaatccattgtttttagtaataaaaacctcttacagtattcacgtcatgccatccaatctctgcaggtgctgaagagaaaattttggaagagtttaaagaaacacacaatgcagagtctccagattttcagctccaggcaatgatccaggctgctggcaagctggtgctgattgacaagctgctgccaaagctgaaggctggtggccacagggtgcttatcttctcccagatggtgcgctgcttggacatcctggaagactatctcatccagagacggtgaggccactgcatagaaacaacagagagagagggcaggatgcggtgtgagtcacctagaagtgacatttacagtagaggtggcagagtgggaacaatatatcacacacccccccctttcaaagccacagttatatataagggcatcttacatgagagcagggggcactgtgtactttttttttttttctgagacagggtttctctgtgtagcccctggctgtcctggaactcattctgtagactaggctgctcttgagctcacagagatccacttgtctctgcttccttagtgctgggattaaaggcgtttatcaccaccgccaggtatatgtaggtttctttgtttgtttgttttatgctgcatacttttgtgagcagtttttcttcatttcgttcaacttggggagaagagttcttacttaaaattaaaatgtattttatcagctgtttttagagtttagctgtttccttgaggaagtaaaacaaaactttaaatcttgagtgttctggcagttgtatggaaaacactcctgatttgaagtatttatgctaaatccttctattatgtgagtgcatattccatattggaatacttatttgaaagcaaaaatgagcgagcatatggtagctgtgggtcaggcctccgtgttgtatttccaggtacccatacgaaaggattgatggccgggtcagaggcaacctccgccaggcagctattgacagattctccaaacctgattctgataggtttgtgttcctcctgtgcacacgggcaggagggctaggcattaacctcactgctgctgatacctgcatcatctttgattcagactggaatccccagaatgacctccaggtaagtgggggcaggccacctgtccccagtgcctctcgtgacagacttatcagtcacaccagtgaactagtgtgtcattgcctttgtctcctgactcagaggatatcaactagtgatcacctgatgtgtgatatgagaggaaaccctttagagtgttggtatcgttccaaactgcacctttcattatttcaacaatgtgtggttttagaactaactagagagacatgtgtttcttttcgttcttttgttttgttttgttttgtttgttttttgtttttagagacagggttttgctgtatagccctggctgtcctggaactcactttgtagaccaggctggcctcgaactcagaaatctgcctgcctctgcctcccgagtgctgggattaaaggcgtgcgccaccacactcggtgagacatgtttgttgagttgatcactttggctgccataacagaatgctatgatggggtagcgtaaacaatatccatgcctttttcaaggttctggagttgaactgtgaggtctggatgccagcaagattaggttattgctgcatagacagctgtcttcctcctgctgcttcttacaggacactaatcctgttcatcagggcaccaccctcgtgacctaattacctctgagtcctcatctctaaatctaacattgagatcagcttttaacccacgtaattagggaggacacagacctgtgtgtgctccacagtcctgtgctccattgcagcagcctttggttccttttctttctaggctcaagctagatgccacagaatagggcagagcaaatctgtgaaaatctacaggctgattacaaggaactcctatgaaagggagatgtttgacaaggctagtctgaagctgggtctggataaagccgtgttgcagtccatgagtggaagagaaaatgccactaacggggtaagaagaaactgcccaggttgtgcgttcagtctgccttccttttgcatccagctaattgttaggaagtatttgacattgttttttgttgtttattttcttgagacaaggcctcactatgagctcttgctggcctggaacttgcagatccacctgtttttaacctcctgatttctgggtttaaaggagtgtgttaccacactccactggctggtggttttggtttggtttggtttggttgggttgggtttggttttggttttattcgagacagggtttctctgtgtagccctggctgtcctggaactcactctgtagaccaggctggccttgaactcagaaatccgcctgcctctgcttcccaagtgctgggattaaaggcgtgcgccaccactgcccggctccactggctgttttttaacctcagattctcagtatattttattgtattttcctttgttataagtaaactctcttaagacatttagtttgtgttttaagcctgaattactctgaatacttaaaatttctctgaaaaggtacaacagctgtccaagaaggaaatagaagacctcctgcgaaagggggcatatggtgcacttatggatgaagaagatgaagggtctaagttttgtgaagaggatattgaccagattctccttcgacgaacccacactatcaccattgagtctgaaggaaaaggctccacatttgctaaggtttgaatccaggtctttagtgcagccttctagaactcatgaagagaacttatgcagaacattggcctttcattgtgaattatagactagttattactttcccagcgcctcccaacacacacagcgttctctgtgcgctgggttctctcctgtgcggtccctcatggtcctgtcctcctgtgttcttcccgatgctcccgctatgaagtcctcgtgtgaattttgttcttcataatctcccagaccccagtgcccaaaacgacccgaaaagatgatcaggtcgctccatgtttaagtctgtcttgttttcccctttcgttagggctccacagctctgctcacagctaaaatgagcccatggcattctaccccagctcctgccactgcctgcctcacagctggcaccgtgtgctcttccaccaagccagcccgctaaggccaagctgctctgagccctgactgtcgcctcaaacccacttgctagtattcgggttgtccacaccaaggctcactctactttgtagttttgctaaactggtttacttgccgtaaagcatgaaattcaacactttgacatattataggctggggtgaccgttagcacaacgctaggttttgaatgttcctactacctcagagagctccctgtgcccattagcaggcagtccctacccttcccgcttcacccagttctgcaaaccgcatgctctttttttttaaatagctttgtccaccctggaaacaccactcggtgtgaagttatatcacgtgtggtcttttgagtgctttcataaaattaatgtttttcatgtttgcccttatactatacatggataatttgttttgttttggtttggtttggtttttccagacagggtttctctgtgtaaccctggctgtcctggaactcactctgtagaccaggctggcctcaaataatttattcctttatggtttgcaatgttctactgtgcgggtatcacacagtgaccaggtgatgataaatgctccagtcatttattaattgctaattgatgaaatttgggttatttttactttgggattttcagtgtagtagggttttttttttttttttttttggacatgtcttttcgtttctcttgcacattcgacagaagcagaactctaggtgatgttagctttcttggctccccagtgaggtctgtgcatgcttatcatttaaggaactaacaggctgggtttctttgtttctgtttctcttttaaacaaattggggaaagttctgggctccaaccccccccccccatcttcttccactggtcattgtatacagcatcccttatctaaaaaaaaactactgccttcagtggcccctccactctgcagaagccccttcatctgccttcacatcacataagacctattattccttctccccttttgcttaaaaatctcttcctgtcgtttcatgacggagcctacacacacacatatagcatccaggttcacatgtgaaacaaatgtgtttatatctctgagcctgccttagattgctccacaccgtggtttctggctccatccacttcctcgcaagtgccatgattttgtttttctttacaactaaataaaagtccactgtgtatagctagaacatcttcttttatcagttcctctgttgttggacatctaggctggttccatttcctgcctattgtgaaacttgggtgtgcaagtgtctctgtggtgtgttgactcagagaccagccttcaagaacacaatctggtggcgtggctgggtgacatggtagtgctatttttagtggtttgaggcgctccacactgacgttcatagtggctctgtgaattttcgtccctattggcaatgaatacgaattcctttttcactccatcctggacagcattccttgtttgtttgttttcttccaatttctgtttccccggtggctaaaactgttgaacctgttttctttctggatggatcacttcctgttgctttcccatacctgtgtgttcaggtggcttttccctcgtcctcacaggtaccatgttaactagtttgtgatctgtttcaagctgagctgtctgtggtgtgaggaaggagttgagctcccccgtggccccagcttgtagaggttcttctctggcctctgcacgctcatgtcgttacagtctcttgcagtctttcctcagtcctcacatgcagtctcagcatgtgtaagacacatgtgtaagacacacgtacgtgtttcacgcacgcatgcacgcacgttctccttctgagtaacatgcagatgccagagttggatgtggtagttctccctgccttcttcactcttgttgttcatgtctgctgatgtctacctctattaatttcaccttttgaagaaggtctttttaggaagtcttcttcatatttggtcattatttctggtgtaaactgctggagcagtgtgctctaacctcactggtggctgtcgctataacttctcccccatgcaactcgaggcacagccatgtccatattaaacttatccctattttctaatagctcctgcttcccctgggctagggctcagactgctaaccacacgtgcccgccccctgctccggcctccaccctcatcaacttgccatggctcctgtacctcgagcccctcatccttgctcctctcctgggcctttgtgcagggctctgccatgaacattcctgccacctctcttcttgtacaagtcttctaaaatatggtccaagcattttcttctagagaaaactaattttttttttagatctgctcctagcaggactttgctggaaccaagttccaggcctttctcaattgcttgtacttttctactcctgtggcaggtgtggaaaagtgtacatggggcacttgtcatctgtctcccatccactatactgccttgcagaggctgagcacgcatatactgtgactagataaacagaggctaccgggggtcctgactctgagaaccgcatctcagagtaacgcacacgttttccacctttaggccagctttgttgcgtctggaaataggacagacatttctttggatgacccaaatttctggcagaagtgggctaagaaggctgaattggacatcgatgccttaaacgggagggtgagtgagaaagtcccatccagactgctgcctaatctgacccgaaggttggtatgacgctcaccatgcttgctctttcgttagaacaacctggttattgacactcctcgagtgaggaagcagacccggctatacagcgcagtgaaggaagacgaactgatggagttctccgacctggaaagcgactccgaagaaaagccttgtgcaaagccacggcgcccccaggataagtctcagggctatgcccggagcgagtgcttcagggtagagaagaatctgctggtttacgggtaaggccggttcgctgcatggagtctcattttattttaccaacagctggaattctcagttgtcataggaaaaccttctttctgtggatctgcgtggctccccttagcgtggccagacagatacctccgcactaactttctgcaggttgtggctcgtaaagtcgatatgacccacgttctaaatcctcctgggtgtggagagagaagccactggaatttatgagtgctagcttgcaccatgggaattacgacagttctaattattaaaaactaagaatgatgtaaaattgcaaaatcttttggcagtgtactgtcacataaactttatgaccatagtcacctttaatagatttctgctgtaaaggcttagcagaggcagggcttccttcatgtgcctgtcctccagctagtctgcagcctcagagcccatctgaacgtctccagtctgtgggcttccttctgctacaggacgactcccacatcagcttcccatcccatgtcccatggcacccacgtagcactttgaatcgcagggtcctcagtaaacacctgaatgagtaggaagaacgtgctcacagatcatggggctgtagacagattccattaaaacagagacagccaacagagcacctgtcactggttccatgttgtcctggctatggcctgaggcatttcttccaatggctccttgctggtgaagggggggggggggcgactggggggatagcacatgtccgaggcctacagggttctgcggctgacacttgtctgtcggaatctttctcatgggtgagctctgtttgggagcttagcttccactaactcccctgtcgcccctacccttctctgtgtgcccccttggttctgcctaggccccgccccctcctacacaggtgaccagccttaagcctgcctccgctccgcgcccctttgcactctggcctgcatgtctcatcattctctctcctgatggaatcccattcagcatttccagaaggacaggagctctttcagtgtatcctcagtgtatgcgccgtgccacagatacaccgtgctgcatagatgtttgtgtgccagctgtacactgggtagctcgccggcctctacccaggacagagacttacccctgtacctttgcccctgtacctccttccttgtttcggcctgatgatcatagatacaaactatgttggaaaccttaggactggagcatacttataactcctaggatgctcatggcgtctgtctttcagtcaagtcctttcctcttcccacttctactgttatggattaaacaaccaccctgtggtgggcactcagataccagagctaccactgagcaaggctggtatagcctaagaggcaggtgagcaagcaaaaatgtcagtagcctatgaagatgaagtgacaggcagcgcctggctaagaggacacagaagctcagcacattcccttaagacatagggactgccctcacgctttgggggcgaggaggagtcacagagagaatctgtggctgagggacatcagaaatgtgcagatgtgagaaagggagggaggagcaagcccgaggcctgggtctgggagaggtcagaacagccaggaagaaccgtggtttggcgagaggcagcacatggcagaggattttctctgttctcgaagcacgactctcagctgttacagaaagcagcagagaggctctacattgtgagctctgcctggtggggaaggcacagctcaggcggcctttgagcccgtgtgttatgtagtaggtatttctgagaccgagcagtacgacggctgtttgtgtggctgtttgtgtgacagtggtacgtgtgcttttgtttcctgcgcttagtccttcctcctggcatttttttctgggaggccctgagacttggtccagcatcttccctgagctggaagtagccattccctgttgaaaaggagctccagggcttttagcacttcactaattactgaggcatttgagatgggttgatgcagcaggacccatccgcatgtagctttgatttctagtagtcacacagacttaaagtcatccttcatctcaaaaggttgaaggaagacagatgccagggtcctctggttgctcgcatctcctaaaaatgacagccgtagctaccagcagcctaggaacactattggcaagcaacatgggtgtcagggctttgtcgttccctctgtgcggaggtgtcgtacctgtgcttctttcctatctctagaagtgactagtgccgttgtgggtccaggatttctcagtcccagaccctggctgtcaaggtgatgtcacatctatatagtcagagattccatctgcatgccaccttttttttgctttctagctggggccgctggacagatatcctgtcccatggacgctacaaacgtcagctgactgagcaagatgtcgaaaccatctgcagagcgatcctggtgtactgtctcaaccactacagaggggacgagaacatcaaaagctttatctgggacctcatcacacccacggcggatggccagactcgggccctgctaaatcattccggtaggtctgtcttctgttctttgtgcttctgggtcacaaaaggctaccagaaacaccaccattcggtaaaaggctgcggtgtagactcttactctcccactgggccttacagtatctgcctctgacactgtaatgtgcactgtaaaggcatacgtgactgtgaccctggtgcttctaggtctgtcggcccctgtgccgaggggccggaaggggaagaaggtgaaggcccagagtacgcagccagtagtgcacgatgctcactggctggcaagctgcaacccagacgccctgttccaggaggacagctacaagaagcacctgaagcaccactgcaacaagtaggtaccaggcggaggtgggcaagcgtgcagagcgcctgaggtcagcaagtacatgtgtaccgtgggaacccgtttgtaagagagcagtgtgtcatgtgcagagtgccccgtgcttgtcactgccatctaagatggacactcagtcatccagtccatcctggactggctgctgcacggtgaataccccacagtattcatcccctattctgatcgtttcatttggtctggcacccatgcttcgtccgtgttgtaggtagtgtcaggatcctcttgtccgataaatgctattaagctctgtgtacgccttactttgttaatcctttctcatcctctagtggacatctggactgttcccacgtttacctgttacaacctcgctgtggaattgtagatgattggtgtggggctaacgtgtggtagacagacaattgcaggtcctcttgtaggactccacctttcactgactgcttccatcgttagcactggggaagtcacatggcgctttttgctttagttttgtctctgttgctgtgtagacccagctggctcaaagtcacagagctccttctgcctcagccacctgagtagctaggatggaagggatgcagctgttccattttatctcccgcttatccacaaagacgaaggtctctaacgagagtagtttacctaaggtttctcagttcagaacccagtgggacttggtggcacacttcctttcccccatgcccacctgaccacagaagtctgactctttgcctccgggctcttgaaagggtcaccgtgatccttcaaagcatttggtgtctgtggaacttgttactgtcctagcatggtgtttcatactaaaattgtaacctgatcatcatagctctcagaaaatgtccccgtcttcatggtttaccttgttttgggttagttgccttctgggttcaagattcaaacagaggaagttaaatggtttaatgtgacatgccagcatagctgtggtagtttttaattcctagtctcctgtcagcagcagtcttcatagggagccctctgcagttaggacacgtggtggaactggggctctttgaatatctctttcagtctcagaaaaccactgttgataccttctagcttttctctggagtggaaagtgtcccattgtccttggcctgtagactgtgccttgagattcactcttgtcaaatgtgaagagatgttgctgttaaggtagaaaagtgaggccctagaaggacatcgtagagaaaagatgaccactgctcctcacaaatgggaagcttgcaagaccagacagatgaaggaagccgagtgggggatgttagtcccgtgtgcagtcctggtctttgggttgcagtcactggcaggatgtgtgagagagtgtggaccagccccaggggcacgttagccaccttgtccctccgtcacggagtggactctctgagagtgggagctgtgtcctggccatcctttctcttcctggctttccctctagaagaaaaggagatgctcacatcagttcatagaaagctccacactactaaacctgccccgaaatggaagtctgtgttttctaccaaaaggaaaagaaaccattaggctccctgccttcgagtcaaggaaagagtccatccacaggtagaggagatttcctttggaactactgtttctgagcacccagtgtaagaaaacactggcctgcggatcctctagccagaggaaagcagtgctaactccatgttccttattggttcagtgtggcaaagtcagtacctgagcttacctgttaccaggagaaagaaaactgaaaagaaaaaaggcattccccaacatgactgcatatcttggcatgcattttaatatttgcaaccttgcagcctatccaaaacctatgttggccatgggtggactcttggggtagacagcgcatctactgatgcctggacaggactagtctgttttagtaagactgcccctgcttgtcattttgatgtcttagaggcaagtcgccgcatcttgggagacctagatctgcatgcttgtgctcaaggtgtccctgtgaccttgggtatataactcgtcctctgttaccaacagtgttcacatctgtagtgtggaaatgagaacttgcccatgtcatcacaggttattatgaagaccaagtgagccagtgtatatagatgagaaacattggtacaggggtgttatacagttatgtgacaggcttattcagctagggaaataacactggaagaaaccaaccttcaccaagaaggtcatcttcaggtgtcaatcaatcccatatgcacatatgggctgtagtaaagacatgacctgtgtggtataccaggtgagttttatttgtgggggtggggaagtcacattttagccattgaggagacacacccaagatggaaaatctggtggcctgacagcatcaccagtttttagtgctgattcattaaaaatgagtatcagtgagttggataattttaatcttgtagtgtttattatttttaaaccacaactaaggtcccctgataatataagtagaagtaatagaaatgtttactgttccctgagtagggtaaggacccaccccctgcccactactctcaccatcttcctttcttggaagcaaagttgtataatctgaaaaacctgacattccatattgagggtttattgtaaggtagtaaaaccagattttatatctcgtttattcctacaacttctgatgtgcttccaaaaatggtattaaggcagcagctgaggaaattttatgagataatgaagcagaacagttactgaaagccatctgctcggttgtttacaaacttgcttcaatacttcagaggcagtggtagggtacgtgtctaaacttcacaagctgcactaggtaggtctaagtgaagtgcgcctgggctgggctgagctcactccctctctgtgcagcgtgagcggttgccaggcaggcctgttggaagccagcagaaagcaccacacagaggtgattatgtggcaccatctgtcacgcttcaagcctaccatacagcatggctaatcagggttggcagtatgatggatgaacagcagcagctgccaaaagccactgttggcaaacagcactgaagttaagaacttttccccccctctctcttcctctccagggtcctgctgcgtgtccgcatgctgtactacctaagacaagaagtgataggagaccaggcagagaagatcctcgagggcgctgactcaaggttggtgcaagcacacgtttgttcaggcctccacaggccagcccaggtggttgggaaactctaactccaggcttgtgctcagaaccctcccctcgcaggagctcacctcctttctgtgtttgtcctctgggcctggggatgggaggaagaggaggtcagggccatttgcatgtgcttggttgtaagagggtgagaaacaatggcttctgacctagctggcatactttgtgatgaggctcatttctggctactgaccactgccccttccgtgctgccgattccttcctacatggtgggtgtttaccgtgtaggactagggttcattttcagtgctcctatttaaagagtgcttcaatgctgtcttccagtgaagcagacgtgtggatccctgagccattccatgctgaggttcctacagattggtgggaccgagaagcagacaaatccctcctaattggagtgtttaaacatggtaaggggcctttctgtttgagcgcatcttgactgtgtggcttcatctttatttagaactctttgcgtactcttttccaaagtcataatattaatgaggaccgttccaaaggactcttggcgcctaccatttttctgtactaaaaatctaatatgaactgtaaatatcagatgctgtttttgaatgtttgttgagtgtttgagaagaaaacatttctttcttggctgtaaacagaagtcaaaccatatttgttttagtaatagccaagtcgtaccgtagcattcccgaaactttgcttctggaacggttgccctcgctaactctgccagcccgtgtcagagtggacggtggtcttaacctctgctattaatctggacaagtgcctcctgggctttgttccaagcaatatttcacaaatgtcagtgctgaggactcacggctcccccgagtgggatgtagccttgttaactttgaaaggctggggatgcagaagtgctgtgatatatacagtgagcgactcctgattatagtcccaattgtctggaggtcctggaggtattctcagccgcccagcctgactaacggggagaatgatggcttataaagcctttcatgattacagtttggcttgcggctctacggcagttaggagcggtgtgttgtagtacacatcctaattgaattgtgctgttgctctgtgtactccagccgtgttctgtgagcccggcctcagaatcacttccctgcagtgcactgttgggatctgccatttcccatctagtcaacttgggcagtcaaaaagcaaattgcagtttgaaaaccatagagggaacagtgtcatcttcctgacatgcagcatcataaacctaatgagacaggttcgctggcctgccttccatacacgggcattttcagccgcccatgtgagttcctgcaggaccaaacctactgaaggtggggggagggggggcctggagaacccctgcagaggtcataaagaaacgttaggaagccttttaaatgtcaagcaaaattagatgttggggaagaatagggtcagaacccctccctggcatcctgcagttatcctgagccctctctgtctgtgtttgtggtgagtcagtggcacagccagggtataggggccacaaaagctgtcctaaagtgctgcaccaaagcaaggtctgtttagctcgccacaaatgatgtctgggagacaagctggctgtgctgtggcaggggctgtggctgtgttctgacagtgacgggtcttcctttgttgtcacgcgtgtcctctgtgtgctggtggctgtggcccaggctatgagaagtacaattccatgcgagctgaccctgcactgtgcttcctggaacgagtcggaatgcccgatgccaaggccatcgctgccgagcagagagggacagacatgctagcagatggtggtgacgggtaagaaggacattctaaaattttaataaactttatgtcagcatcacatctactggcaagagttggttcttatgctgaacggggccctctcttacatctggtttgaatttgatgctaccagtaggttctgcctatataccataggaactattctaaacaaagttcacacacacacaaataaatgaaattgtctcgtgatcaccccctcgccaccccgtgtaactgctttctgaatactggtagagtccatttgcagtgcagacccagacttggtattggggaggttgtccctcttccactctctctccctacagactgatgtgatttaaaactatctttctttttttttttttaattttatacagtggagaatttgatagagaagatgaagatcctgaatataaaccaacgagagcaccattcaaagatgaaatagatgtaagaccttaggtgtattggcttttacagtgccagtaacaaattatattcccatatagaacttgttaaactttatagataatggccttcctctaaaagacaaagtaaaatccaaccccagttgaaagtagctctgtttctcacattgctttcaaggaatttgcgaattctcccgcagaggataaggaagagtccatggaggtgcacagctcaggtgaggctccagggcagctgtagagcaggggacaggttgggcagcccgagggctggcagctggaccccaaggctgatgatagcggcccgcgggtactcttccacatgggcccttcctttgggaatagtggtgatccttatttgtgctttttacttccttaatttcttgggtagaactttttgattaagataattgatctgctcatttatagtcattatttagtggaaaaatttaaagtccttagaatacttttattgagaggagggcatttgtttaaatctgaaatatttctgtagactattgacccaacataaaataattgttatgttcaagattgtcgtcgtaagcatgtttacacgaaagacctgttttctttgtgtaagattgataaaccttcgcccctccctagaaggacttaaaagtaaatagtttatacatcctctccacttttactgcttgtctgcattttcagatctgagtatagcggggtggcctctctcaccctgtcctctgagatctaacgagtcatctctctttttgttgttgttggaaagttgtctgtgttatgagagatgtttcagactctttatttccacttcctcaggcaagcacagcgagagcaatgctgagttaggtcagctctactggccgaacacgtcaaccctgactacgcgtctgcgccggctcattactgcctatcagcgcagctataaaaggcagcaaatgaggcaagaggccctaatgaagacggaccggcgcagacggaggccccgggaggaagtgagagcgctggaggcggaaagggaagctattatatctgagaaaaggcaaaagtgagttctccaccttttttgaagtgtccccacccccatgccccaggccttctcttcccttctctgctgggtccccgagaagtagtgatcaaatcacacagtgacagtaaaaaaaaggcctggcgcctggaaggtgtctgtccctcaaccctaagacatgctctgcgagcagaggaaagacagcgccctgtatgcccttctgagcacagtgtgagccagatctttccgcaggtggacgagaagagaagaagcggacttttaccgggtggtatccaccttcggggttatttttgacccagtgaaacagcagtttgattggaaccaattccgagcctttgccagactagacaaaaagtctgatgagagcctggggaagtatttcagctgctttgtggccatgtgcagacgggtgtgtcggatgcctgccaagcccgaggacggtaggtacacgaatgaaagacgagctgcactgcgctaggcaggtggcgcggtgcgtgcaggctaaggtgggcccgggacctgtccacataacacccatgcttcatgttgcagagccacctgacctcgcctcccttatcgagcccatcacggaggaacgagcatccaggacactgtaccgcattgaactgcttcgcaagatccgagagcaggtccttcatcacccacaactaagtgacaggctgaagctctgccagcccagcctagatctgcccgagtggtgggaatgtggacggcacgacagggacctgctggtgggtgctgctaagcacggggtcagccggacagactatcacatcctcaacgaccctgagttgtccttcttagatgcacacaaaagctttgctcagaaccgtggggccagtaccgtccctcctttgaatactctggccatgggctttggccagactcctccagtcatttcctctgctcacgttcacgaagaaaaggcaatggagcaggctgaaggcaaggcagaggagtgtgaacactcaccggccaaagagaggtcggatgggaaagaggaggaagaagaagcaggcggggccaaggatggcaagcaggaatgtgaggtcgaggccagctctgtgaagggtgaactcaaaggggtggagggcagtgcagaccctgggtccaagtctgtctcagagaagggctcagaagaggacgaagaagagaagctggaggacgatgataagtcggaggagtcgtcgcagccagaaggtaatgcctgactccatcactgtcctgataccacagcagtggtgcagagccttggtgtgacgccataacttgtattttatttttaattgagaaatccaaaatcttccttcatagctcaggctggcctgtggctcacagacccgcctgctcctgcctccagagggcggggattaaaggcctgcgccactaaggccggcgtctttgcgttgtaaagaccattgatggctaggcctggtgacacacactttgaattctagcataggttggttggtctatatactgaagtccagagctatgcaatgagactctgccttttcttttccccctaagagtaattaatgtccattttcttctgtgaaggaatagtttcaattatgtgtacacgtgtttgacctcatactttatacctgcaaacatatttcaagaactgtaaactcgcagcatctgtgaacacaccggtcacttccggtttaaggacattcatagtcagctgtgcaagaattctttgtaatgttaaagttgacgtgtgaatatgatgggagagagtcactcaccgagcaaatagtatttcagaataaatgatgattcattggttggttggttggttggttggttggttgatagcatgttttccatgttacagattgctataaccaacacaaagtagaaaccaggtaccatgttgaactttgctgctgcagtggcccttctttattagctaatatcttaaccagaacagaaacccttgggtcagaaacatggctagccttcagcaccaaaagatttccttagtgtaggggcacgtgcttcttatttcagcacctgggagtagagaaaccagaggatcacaggtttaagcccagcctctctatatagtgagtctgaggaagtcttgggctacatatgactctgtctctatatgaccacaaaggaaagatttccatggcttcttcatcaagatggaagaaacaccatctatatttgtgggctgttttgttgtaagttttagacaagacaccccatatctttctagatgtacagttggcatgcaggaaagcagagctgctaggtggtattcctgttgtcagcaccgtcctttgtagacttgagctccgtgcattctggctatgagtgctgcacataactcatttcccagcaggagccgtctcgagagggaagactttcgatgaagaaagcaatgcttctctgagcactgctagggatgaaacccgagatggattctacatggaggatggagatgcttcggtggctcagctccttcatgaacgaacatttgccttctccttttggcccaaggttggcaagattttgttactgtgattgttttgttgatctaacaaaagagcgggaaaaaaatctctagcttgatttttcaaatagtttgaagtaaaccttgttggagcatatcaagtgtacagaattttcctttattttaaagtaatgatcagaaagaacccaaatgaagaaacatttaggatacttttgtattagataacgtggaagctcaaaaagccaaaaaataaaataaaggtaatgtggaagagcgagcagaaccgttgatctgacccacctacccactccttggggctcttcagtttgcctgtcctattgtcttgtaggaactctggctatttcaatagatttgacaaaatgaaaagtgtggaactttgaaaccgtgttaacttttgggggggttgttttttttgtttttgtttttgtcttgttttgttttttccagacaggatttctctgtatagccctggctgtcctggagctcactctgtagaccaggctggcctcgaactcagaaatccacccgcctctgcctcccgagtgctgggattaaaggcctgcgccaccgcgcccggctccgtgttaactttttaaagattaagtataagtgaagctttcagatttaaaataacgtattaaaactcccgctgtgttcctgagagcagagaagggtggtggtggcccctttgcttccagtcaccctgaggtcatcccagatgtagttatctgtagctcaaggcagaggaaaattgctctttggcaattaggaagcataattctttaaatgttctcagtgccgttagggcctgtgtttctcaaggcaggaagtagtcatcataagtaccatgacacacactgcacttgagctgattcatcccaggacactcttaatggtgttaatgtggcttaaaaagaaggtgacatttctgtgtgaagggtatactgtcagcgaggtctttttgtctgttccccgtgtcctcttggttcctggtcacactaatttcccacattgagtctaggggggagtttctcggttgagtcaaaggtttatagtcacaggcactattgatctatggaggcttggtctaaggagctgtaattagaacattttaatgtgcatgcttcagtgaaatttggagcgataataggtggggaacccaggctgacattcattaggtgttcctaggttagtgcccacttcataatgctgaactttattaatagtgacgctaatgatggccccttcctgggacacactgcactctggcctgtggctctgaagggccagacccactgaaataggaagtgcagaggctccattaaacgcactgcgttcttgaagcctgaatgagttccttttacaatctaaggttgttttgaaggtggtgtttacttggtgtgctccctgcttcatgtcattcattgaacatagttgaaaatagtaccttttctttactagagcagctagaacattccatcagaaccaaaccattctgatgcattttgtctgtttacttcttgccaggctaggttagtccaaataattgacctttcagcattctgtgctctgcagcatcttggtggacatatttatccagtaatttaaaataggtctttgttacaaatgtcctgtgactcttcccccttcaggacagagtaatgataaaccgattagacaacatctgtgaagctgtgttgaaaggcaaatggccagtaaatcggcgccagatgtttgatttccagggccttgtccctgggtacccaccctccgccgtggacagtcccctgcagaagaggagctttgccgagctctctatggtcagccaggccagcatcagtgcgagcgaggacatcaccacgtctcctcagttgtccaaggtaaaacacagcagtttgctttagtgggagaaaggagattgctgtgaattttaactgatcgaggagcttgtgctcactaatctgacttgattttatatgtctgtttagttgtgttgcccacattggcctcaaacaacctttctgcctgttatgtagctagaatcacaggcacacattactataaccagccaactagtcagactttaaaataagacggtagctattgccatagctgtggccaccactatcgaatggctttttttttctaatgccagcccctattgcagataaaggtctgcctcattacaactctgttctcttgggaattttcaataggatgatgccctcaacctgtctgtccctcgccagcggcggcggaggagaaggaaagttgaaatcgaggctgaaagagctgccaagaggagaaaccttatggagatggttgcccagcttcgagagtctcaggtggtctcagaaaatggacaagaaaaagttgtggacttatcaaaggcctcgagagaggcaacaagctctacctcaaatttctcatctcttacttcaaagtttatcttgcctaatgtctccacgccagtgtctgatgcctttaagtctcagatggagctgctccaagcaggcctttcacgcacacccacaaggcatatgctcaatggctccctggtggatggagagccccccatgaagaggaggcgaggcaggaggaaaaacgtggagggcctcgacctacttttcatgagccacaaacggacgccgttaagtgcagtaagtctggtgttcgctcccacagtgtctaccccggttgacagccagccctaggctcctgaccccacttctctcagcagcatcacatggaagctggcttcctccaccagagaaacagaattacagtgaatgcaatggtgctgagccagaaaactgtgttggtcactggtacagatccctcagcctgagccaaggcagcacaaggatttattcttcccaaggttctgacgtattgattgctcccgaaagaatagcataaagcagaaacgtgttcttctgagcttgcagttgttatctctgaattcttgaggagggagaagcttctgctcttagaaacactgctgttggaggccagcatcagttagactcgtgtgagtgcttggtattaggcctcagatacctagctagtagcttggaatgctctccatccctgcaactagttgttttagaaatctgagacatgtcattgctagttggaggacaagtcggtggatttttaattagaaggaaataaaatgcagtataataaattctctattatatggcctcaaccgtaccatcccaaaagggatgatgactctgacggcaagaattttaccctcaagaactctgttatgtgtgctctgtgaagagctaaggaattcatatcctgagctattgattggaaactctaatcagtggagccactttgggctaggcgactttgagagcctttctccacaggtcgtggaacaggtttggggcggggcagctatgattttaaaatagagacactagttgttttttttttttttttctggcccatcttttcttcttccaactctgttatttacaccagctctctctcttttgtgagacaggatctcactgtagcccaggctggcctccagcttagagagaccacctgcttctgccaccctgagtactgggttaaagacctgtgccacaatccccagcaccagttccttgagcctagagaaaggcttaaaatttcaaatgaagcaaaggcatacttggaaagaaacaaaacatcagtctttggacagtttagccacatagtggagtgtgagcagaagggtccatactccatacgggttaagaattgactttcatgttggcacatatctaagagagctctttcttgttgctttggatttttgctttctcaagacagggcttctctgtcttccctggctatcttggaactgctttgtagaccaggtgggtctagaactcatagatccttctgcctctgcctccccaatgctggaattaaaggtgtgtgccaacaccttccatcaggaacttcaagtagatgttggaggaaatgtatttttcaggacgtttctttaaccattagatgttgtgaattggagatctccctgtgaataaaatgcacagactgtgctgagttggcatagcagcagtagaggctaaggtgtgctgaacacagcttcgcctccttatttcaactcccactgctgtcaggaaggaggagggtgccttcactggcatcaccagtggtgactgtgttttctgtgccaggcatggggatttgaagagcaaagccctgacttgacaggacatttgtagaaagtcagtgttggggtgacttttgagtattccccaatcaaaacatgctaagtactccaaattctgaaactttggggtaccaacagaacccaataactagaaaatcccacaattgacttcatatgaagggtcacggttaaaacagctgagaacaggcagaatgactcactatgtaaaggcacttaccacccaagacagattacatcattttgatgttggaacagaagtacataaaggtagaagaagaaaagcaactcctcaaagctgccctttgacctccacatacatcatgatacatacatgtacacatttgtacacacacacacacaaatcatctatctatacagtcagttaaaaaaatttaaatcagttacattcaaatattgcataaaactgcttaaggctatgtggtgaagatgtatataaatgtaaaatgtaatgaattcatgtttagacatgaatcccagtcccagtatgtctgacagagtatgtataaatactcaaaaaatacaaaattgaaaatgaatcctggttttaggtgttgtggataggagacccaccttcagtgacatgtcacagttctgcatgtgtgctggcatcaaggcatgctcccagggctcccagggaaagcttggagtggagggaggaggttgttatctgtcactaaatgggagatattgctggagcagaagtgctggggtgcgagagtatctctccagctttgagacccgggcgttttttgctggcaagtttgatgaagtcatgaagatgtagacacggagatgaagtagggatgcaggttgtggaaagcctagagtgccgagctgaagaacatgggggtgtcctgaagacatcggggagcctacctcggggagtaacttaatggcagcttttgaactgggtggagcttactgcattttagaaagccctggggaatggagaaatggatgttggaatgttgaaagcacagcatttaaggacagtgacagggtgagcatggagtgctaacctcgggtctttccacacctgctctcccaacagggccagactgtgctcgccgagcgctgggaaaccacttactgataaactggtgcttgtcgggacagtgtctagggatccctgagcggtcacatgtcacacagctctagctcagaccaccatgtagcatggtggtgtagtcctagtggcttgcttggccctctaggctttcctactgaagaatgttgttcctaccttgtgaggagtctacaagagttgtcttctactctgaaagccatcctaacaagggcattgtttccgatcgcgtctccctttttgatgaaagatcctgtgggctgggagggtatctttcttgagtagagcgttctcagaatcttatgtgacaattcagatcactgtctgcttcctgcaggaggatgctgaggtgaccaaagcttttgaagaagatatagagaccccaccaataagaaacattccttctcctggacagctggaccccgacacccggatccctgtgataaaccttgaagatgggactaggctggtgggagaagacgctcctaaaaacaaggacttggttgactggctgaagctgcaccccacctacactgtcgatatgccgagttatgtaccagtaagtacctcagagcctgggctatgaagcctcacggggtctgcctaattgcttctcatctgagcgagtccttgacagctccctgcaccctctgtctttggcgtgaatgtgtgcaggttcacgtgtgccccatgtttctgctgtgaattcaacatgagagaaactggttgcagtctgtcctcctgaaggacaccctcagttacgtgaagatgtctgctactcatttgcccactcctccagcatgcttccctcacacggtctagctcccaggggtctaggctttgcatagtcttaagtgcgtttccctggtcttcagacaaagcctgacccagcccagagctataagctcttgtttccagagatttcttttaagcacctaacccttgtgagtgcccaatatacaactttctagctagcaacacagatctcttcctgtccttttgtgattaatatttttcaaacattttctgttttttttcactgagtttgggccatcccctctcttgctaccaacagcaacctttcagcctccctacttacaacacctcaaagacaaaggtcccatgtcgtcatttaggatatcatctctggcttcatttatatatactgattagaaataagtgaaggtactagataaagtttcttttaaaatactaggatttgtataaatatctgaagacaccctcctcccctttgttctcatttccagggactgaacccaggtgttctcagatgctgtgtaagtgctctgccgctgagtcacacctccagcctgtcacagaaactttaactgagagtctcacttaaggagactgccagacgcctggctctttagagcacttgttgctcttgcagaggacctgagttcagctcccagcacccatttataactcaagtcccaggagaaccgatgctctctgctgacctctgggggcaccaagcacatgcatacatatagacaaaacacttgtacacacacacaaataataaatcatagaataatcttgagtatcttctcagagagtgcctgttgggtagaccagtcagtgctgggagatactttctcagaaaagttcagtttctgcgaagtgcaaatgattgttaaaacttaacagcgcatgtgcctatccttaggcgtttataggaaggggccagtaccaagtacagcctcattaaatacgtccttttcttttgcagaagaacacagacgtgctgttttcctcgtttcagaaaccgaaacagaaacgacatagatgtcgaaatcctaataaattggatattaacactttgacaggagaagaaagggttcctgttgttaacaaacgaaatgggaagaaggtaaatgctggggaagggatgggcaaggatggcaaatcacacttcttctagaacctgtgtgtgttcctgcggacaccgaaaaagggagctgaggggagtggggagggaaacgtccatgatgttcagttgttcaccggatgcatattcccagatgggtggagccatggcccctccaatgaaggacctgcccaggtggctggaggagaaccctgagtttgctgtcgctccagactggaccgatatagtcaagcagtctgtaagtacacaaaagagatgcacataaaactgtgtgcctaggtgctcagtgtcccattggctagtaattattcagttgtgacttaatcccagcttacagagttgtcataaagcatcattttcttacattatttcagtgtgttgtattttacacacacatcattaattgggaatgagctgattgtcagttctgatttaaaaataccgtgtgagaacacctactcccaaccctcttagaggtggacttactccagggaaaccggtctcacagtgtcttcaagatggaacttgtgctggatgggaacgttaagattattagctgtgatagccagttttaaaatagacatagcaattctgcataaaattttatcattattagtttctttcaagacaaattagtggcatgcttactggttttgtttaaataatacaataaaattgcctctagccatgtgttaggacccagttttgtgaagtggtaccttcctaatcacctatctgaggtccttgtatatatgattccacctttgtagctctgactgctactatctagtctccattcctaatggtgtgtctttcgaaactgggtaaaatggaagtgggaactctgtaacctgagactgtggctttcactgagtgttctccagtcccaggatggagtattatcaggggtctgctgctccttgctgtacagcgtgctagtccatgctcagctaccatgtgtcattccctcacccatggaaagacctctggggtttttcacatttgtgaatttattagtgaaacaactataaatgtttacatgcaggttttagcgtgtagcttctcatggggtgggggtgggggtgggggtgttacacatgtgagtttaacttactcaatttttctacattgttaacaaatttttcttattcttagctatatttgaaatatctagaatgtcttatagtctatgcaactcttttgtgatactgttttatcatttttttcatacaaaaccttttaaaattggcatatttatttggcaattaattgacaaatgaaaggtcatttgcacttgatgcttatgttgtacacgtgcacatcacgtactgattacaccagtcaatcagccactgtctggagtgttgatccttaagttaattatgaatacagctaccttggcatttacttcagtggtggagtaaccttgaacagctttttctgcaactcagcacaattcagcaagcgaaaataatggttaaaaaaaagaaacaaaacaaaacaaaaaaaaccaggacctgtgctttcccaagttcttactttaagcttttagaatggaagcaattgcttgcatagttagaatgttggtgtggagctccaaaaggcccacgttggcagtaagtactctgacccggcctctacagctgttgtctgctttccctgtcgtccagggttttgttcccgagtcaatgtttgaccgtctcctcactggacctgtggtgcggggagaaggagccagcaggagaggacggaggcccaagagcgagatcgcccgagcagccgcggcggctgctgctgtcgcctctacttcagggatcaaccctctgttggtgaacagcctgtttgctgggatggacctgacaagccttcagaatctccagaacctccagtccctccagctggcagggctcatgggcttccctccaggactggccacagctgccaccgccggaggcgatgcgaagagccccgccgcagtgctgcccctgatgctgccagggatggcgggcctgcccaacgtgttcggcttgggcgggctgctgaacaaccctctctcagctgctactggaaacaccactactgcttcaagtcaaggagagccagaggatggcacttccaaagcggaagagaaaggaaacgacaatgaagacgagaaccgagactctgagaaaagcacagacaccgtttcggctgctgactccgcgaacggatctgttggtgctgctactgccccggctgcgttaccctccaacccgctggccttcaaccctttcctcctgtccaccatggccccaggcctcttctacccatccatgtttctacctccaggactggggggattgacactgcctggcttcccagcactggcgggactccaaaacgccgtgggtaccagcgaagaaaaggctgctgacaaggccgagggagggccctgtaaagacggagagaccctggagggcagcgatgccgaggagaacctggacaagactgtagagtcctccatcttggaagacgaggttgcacagggtgaagagctggactccctcgaaggcggggatgagatagaaaacaccggaaacgacgagtaacagcagcagcagttccactgaaagtgttgaaaactgttgacaggtggtagtcctactgtttacactcacagttaatgttcatacctagttttataagctgttctgtaacatagtgtagcaaaaaaagaagagaaaaaaaaaaagaaaagaaagaaaaaaaaaaggaaaaaagtccaagtcatgttatgcaggtgtgtccgaaggtatcttggtcataagtattgtgcagtgcattatttattatccctaggaaggatgaaatttgagaggtgatcatgtctttttaaggaaacttacataatgctctgcttttttctttgggtaccactggtattataataaagagcaatctgtaacagagcggcactagtggaaggaagtgctactcagaggacgtatgaagttatatatttaattttttaattttaattttttttgctgtgaaggtcaagatgaaatttaccatacatatcatcccttgttcattcgtctccctttctgactttatgggggttcccacatttgcatacacacatccatacactctgacaatctccacgttagtgtgaacgcctctgtcccgaggctcagcaataatcaggcagctgttgaatgtgaagggtccctttggaaaactaaccttctgggagggttcttgccagacaactgcagttccattggcttgtggtcttgtgatgcactggtaaaaactaaataaatagaagagtaaatagaagattgagagaagtgagaatcaggtacctttttttttttttaaattaaaggactttgttactttagccacaaagctaaaacagcattacctcagctctgaactagccttgaagtttacagacaggactttgtaaatgtttttctttgttgtgatgtcctttgattttttttttctctgaaaactgctatcatgtaagataaaatgtaaatttctgccaactgtagtaatgatgcttttaataaaagtgacccatgatatgcagagatgtagttatagaatgcagtgtacaggggagctggtgtccactttttttttttttaattcgtaatagctgcaaatacagcattctggcattcggactttgcttaccgtgtcttctcatgctagattagctgttagtaacacacactagttgtctccaagaccagatggacaggaaaaccttgaattaccaccttcatgtaattccacgccagatatctcagcagacacatacacacacacaaacctcttattgctcccctgaaagggcatctgagagtagggctcctgaaaatgtgtgcagcctgtgataatggggcacacagtagacaaaagggcagaagaaaaatgaggctttaataggcacactatctaggtcatttatccttggataatgggaaaaaaacacaatgtcgtagtgtcagcaagggacacaaaggcattctggtgtcctgcagaccagagcttgatatcaagagccagtgtgtggaaaaacccacgtggaactaaaatggacccatttaagtgtgtgtgtgtgtgtgtgcacacgcatgcgtgcacattcacgagcatgaactcacattcacccagtctcaaggactactagattattaaatcctttatttgttttctacaataaggtttaaattataagacctttttctatgtcatttcagcaaaccctatttccatctaagaaaggagtgatatacatggaattgtgcttgtcttttaccttcccataccccctttacacaccagtacataccagtgcacacacaggttatcctctacaggggacaggccagcctatctaaattccttttggacagtgagattccagctgacttgtgtatccaagatgaaaatatgcctatatgactggaagaggagaaacttgaagccacaagagtggcaaaatcttgaaggctaaccagcctgtgctcggttaagcaagtgccttctgaaatggcctcctttgaccatggaagtgaagctagatctgcggggagcagagaccttaaatgtttaacggaaacgcttgagtagggagagctggtttaataaactgcattaccaaagggtctcttcctaaaattctgtttactggaaagttccttgtcagcttctgtgaacagggatgagtgtgactctgtccctgacagcactgagtgtctcgagtgatgctgatcttcaaagcagaggtgtctgttgcttggcagcagtaagaactctgaacttagaaatcagcacccgttttgtattacacgaagtcatttagagttccacattggaaaatacatgttttctttcttccaatggaaagaagtcatgacatcctgaatctatctaaaaaatatttacgattcggcctaatgctaaccagtgtttcccgtgctgtaaatgaggcaccagagcaccagtactgtgtgatgcttaattccacgagggaagccgagaaacggaaagtaagtggctcacactgcattggaggatgtgtgaaccgtggtccaaccggccctcctgaaggactgcattggttttcaaaagaaaaattatatgtgtgtgggggggggtgatccaaagtttttggtgttactgtgttttatatattcctcttcataattgcatagtgtagttgaggctgaaacttgaaagaagtgctttttttttttttttttagtttctttttggggcaaggtctctatgcagcctaggctgaccatatattcactttcctgcctctgcctcccaaatgctgaggtcataggtgttgtgttagaagtgtggcttcagacagaccacaccaggccaaacagttccacgtggtttatggtaggagaaaagggcaaaggtggctgtgaaggagatgggtgggggaggggaagagggagagagaggtcagaggggtctgccttttatttaaatggagacctagtggtgggaagtgagccaaatggattctgggaatatggtggtggttgtcttggcaacaggtgtgtaggtcactgttgcctaggtgtgatgtcactgggtctggagctgaccatgacaccagcataccaccctttttatcatagaagaaaaggggggaggggcaggggaagccaaggaattaaagggtatggggagccagtcctgatcccgtaataggagtgtgttgttacacagggaaggaagcctgtgaaattagatctggaaactggaaattttcagtcccagtttgtgtgtttgaatttgagtttatgatgtgcccccctctcccccccccccccccagtatttctagtgtataaagaaaccaagttctttgaaaagatgaacttggtcctgatagaccctggtgttggaaccaagcttggccggtactctaagcccagacccttaaccgctgtgctaatgaaatcaagactcataagcaagcagtcgttggtgcagacgttagagaaatgaaaacaaaaaccagactgggcctctgctgttgtgcgtcttacctggtagagagctgggggaagaagacttactaaacgagatgagattggggaagacaaaggtctctggggggcccagccaaactcaactacactttgagaaacaggaggcacacgtggctgcaggatctcccgagagaaagaaagaacagtgcaaagaccttaaactgggactgctctggggtagggaggactatcgaacgtctgacagtgctctggggtagggaggactatcgcacatctgaccagaagagttgggaagtggggttatatcctatagagtctggatggttccagtgggaggctgggtttcatctaagcactagagaaagtcattggaaggctacagtgagatttatgcctttaaagagtctatatggcagtagcacaaaaataagggcttgcaaaagggagtaggaggtgttggaccacagcctcaggtttcagcagtgaaagactttagagttaaaactcaatgcgtaatttcaattagccctccaggactattaccacttgaagtataaccagagataaaaccaacagataaagaatattttctgatttttttttctgtaatgccacacaattagtggtttttaaaaagagaagttgaattttttttttacaatacaatgaaagttaattttgagttaactttagaatttaattttgttcattatttatttattcactttacatctgattgaagcccctcctctcctcccagtcctcccctcacatggctcctaccccacccctccctcctgttcacctctgagaaggggaccaacccaccctggcatcgaagtgagaaggtgcgcctttgcaggatgatgtatcggcgacaagtgccttgagagcacagggatattaaactgggaagcagagtgtgataccggtgtcttctgacagcacgtgagggttaggagaggtctcgttcattcgctgcgtctcttgaataagtggatttatgtgttttcttagctcaggcaggatttactacaattctatagacatagtaaactaaattgaaaactacttctggaatttaatcttaacttagactccttctgtatggcacattcaccacgtgggaatattctgtgatgctgaagatggtcgtcagacttctgaattttgtgtgaatgtagtgtcaactctcctaaaggacctgccgtaagatctagcctacaactagctgaattttactttgacctctttcatcatcttactgtgtagtttaaacaacatggaacggagcagcgatagcatcaggtatgctcctctctgacatctttctgtttagagtgatgcatggtttgtctggttcctaagccgattgaggctcccatcacgagagcaaaggaggcagtgttccacgtcagcctgctcctgggcacgccactgacctgtagccaaacctctctgcagcctcagtctcttgtgagcggtcggtcattatcccgccgccttcccagcccagagagcaatctatcatggtgactttggagttgcagcaaagcaacatcttagtgagatttctagtgtggacagcagaagtgcctgttcaaagaaccaggaaggcctccatccaggggacctcctccactgccctttcaccacctccacagtttgatctgaaagcttaatttcaaaattaccgaagaaacgtgagccttctcaccgcctgatgggagccaggtgatgctttgcaactcaaaactgccctcccttctgtcagtgtccattctaaacttccaattgggtgtgggctgggtggctgaaaacgaagcaggctgtgcatttaatggtttggaggaaggcacgtggcatctgacaatggcatgagttcctttcaacatgtcccaccatgcctccctgggaggcagtaagctctgttttgtatctctctctctctctctctctctctctctctctctctctctctctctgttactatgtagtcatgagctcaccacaccagccagttaggcacatgttgttgctactatgccttcgcatgagaagtgaggtcatcccaccagaacagtgtgtcttcctgtctcccacacggctttttctgtgctgttgtagctctgtctccctgtggtttgcacagctgtcgcttcctctgctagggttggaacctccgaggcaactccatgctgttttccctcttactgtgagaggtctggaaaatgagggcagccattgcctgcctcttgccatggacttatttcttccagtttctgatccttcatctttcccaaggggcagcggtatcagctcagagtaacccaagaggttactctgtaaaaccatccttaaaagtcttatgtcctttactctccaaaatcaaaaggtagtttctgtccttttctgtgtcaagccagtgtggtctgagccaccaaactgaggaacactgtcatagcagctcaatgacaaggcagttggcttggactccctgcccttagaccactttgagtaaaggactctatagaacgtaggaatgtgtgcccactagaggaagaatacaatttaagctgagaactgcctttcttccaaaacattccaatcaaaacacttctataaggggagggtaggtgtccgtttttctattaaaatcttggtaaggcccttgggatggttgagtgagtgaagatgctactaagcctggcaactggagttcaagcccccgacacagctggtacaggagagaaccaactcctgcaagttaccctctgagctctgcatatgtcagcatacacacctatactatcgaaattcaatgtatttttaattatgtattttaaagctttgctgaagatcattgttggcattccttctatgctccgcccagcagttacctggcaacagccaggtaggcctggcttgctataaaaggggctgtgggcccctcctcaacctcttactctatctgccttttctctctctgactctctcccctttctatgcgttcctggccagcctccacccactctctcaatctctctcaacctctctctctctcaatctctctctctccctcccttcttctctccctccctctctccatctcttactctctctctgtctgtctgtctgtctttctctgtcttctcaactcctcttcccatgtccctaaataaactctattctacactataccccttcatatggctggtgcctcggaggaaagtgatgtctcagtatgggcctgccgaggcacccctcccccgtcaccgtcaccatacgtcacctctacaaaacatatccttgtctcctttttataaagcacaacagtcatgacccctaacctgagtcacagcaaaaataacttctgttggcgttgtataatcctgctatgctttctgtgttctatgttttgtttttctcagacaatctcaccatgtactctcagttcacctgcctgagtgctggcgtcacaggtgtgttctaccatgcccagctttaaattattttctagtgtgacttagaacaggccaggtgagccataagtgtctttccaaagggattggtgtgggtctcgtgtaggaagaaagctgaccttgctgactcctgctttctacttacatttgcagctcagatgcacccatgaccaaatcccccaccccatccccacccccactcatccctgtaccccagtgccatggagaaaactatgtcaaaagcacatgacctggaagtctcacaaagccatttacaactctaccagctagcttggcacacctaggttgtaaagggtgagaacacatggacaattataacaccaggtgacactggacacacctctgtaaattagaatgctcatgaatgtgacacatttatctagcaatgatgccatgccaaatgtctctctgtgtgtgcccagggagttgctgaagcccagcagaacttgaaggttaggcaaccatactgtcttaaaagctgttacagacacaaatgaccctagctccttcgtcgtcagtcatagctaaatgtattgaattattaacaagttctgagcccagagatctgaggagacctgaggcttcatgatttttgtcttggcttcctataatttgacctcattgagcttgctttaaggcgagcttatctcggctcctcaattagtgggattaaaacaaccactcaggttaaaaaaaaaacaaaccttcagttaagtgacctacacaccaacctatcttgcatttccatggttatatgctactttaaagtgtcagctatggcccaagaatgacaccactggccagttctagaaaaccagacacttgcttggtgaatgaaatgcatccttttagatttctggttttgctttgggccttcatatatttaaggctctttaggaataaaaatcatgaagatttttttctgtatttaatgaggaaactctttttcaaaaagtattcttggccttttgggagtggttgactacaaatttttaccgtgcaactagagttaggaaataggggttgaggaaaaagagtatacaggttagtcacaggggcctcaggctattgttaagctggttaactacccaacccttgtctgcctgctgatagagatttgggggcatgtgtacacacaaacagaaacacacacacacacacacacactgtgtcagctgatagttgcagctttgaaacaggcaagatactcagtactttcaagactaaaaaaattccagggttcagtttttctcaaggttagtggtgggcttgatgcatcacataagctgatcctagaactctaaaccacatacattgtctatcttagaactaagcagggccttctacctaccactcacagcgggaacaggaacttggcctgtctcagagcactctcccgtttgtttaccagggaagaccaagtgaatcgtgttcttgcctttcttgtgacgcagtatggggattagaaacaggactctcaaaggcctatgtctgcactggcactgactaaatgctaacttcaaagccactgctgtgtgtctgatggtgagtttgaaagtggcacaagagaattgtgaggcacaccggggagattgtggtgttcccaaggcatagagctgattcctatcctgaaagaatcagctctgagcctggaggaagggccaacgctgcacagaaggcgttgtcataccacagcacgcgagagggatagctagctggggcctcatgcacattgatagttcgatagaaatgttcttaagcttcataaaatagggcaagactgtagctcagtggcacactatgtgtggtaggagcctctgagctccaggaatcggtcctcagcaccaaacacacataagatgaatgccggctaaaacttaacaaaacatatgcttactcctgctaatacgttcttttctgttaccatcttgtctactttattacagtaaggaagtgtatacatcatacgagtatacactgatgcatgactaatgacgggcatcctgaactttgaaacatctcacagaaaaccaggctttctaccctaagtttaaagtatgtgcctccaaattccctgaccttagaagcacagttgtgtgtttttatatttatggcaaaaggttcgtacatttatctggtcttcaggatgcctattgtgccctctctctgagagcaacaataagagaagatgaggcaggtgtggaggcctgcgcttgtaatcccagcacctaggaggctcagacaggaggactgtgaattccaggtaagcctgtactacatagagagatctgtctcaaagttattgtttattattattatataaattataaatatgctgatgtaaatacatttatgtctatatacataaattacattgtaaatcatgatttataaatttataattaaaattaataattgtaattgttaacaaagtaagctgacaaagggtggagatggtggagactgctttcaaagtcactgtgcaaatggaaaacagaggcaaggtcagtcctggaagaagtaaaaccatgccaagctgtcttctaccccaaatgcttgtcctgtgcatcagtcgccattctattgtgtccctgagccttgagcgcacctcctttctcctgcccaaagtggggggtagaagaagccccctgcatggcagcctgctgccagcactgaatggctcatgcttagatccacttggcacactggcacacagcatacacaatgtccgctgttgtgcctactgtccctgcttggtgacagtaccgcagggaactctgtccccattgtgtctgtccagtgctttgtgagcatgtgtttgtttaggatagaatgaagggtttttcctcactcatgagactgggagaaaatcaggcaatctaataagcctatagtctcttccctgcagcactcagacctgcaagacacaaacaagacctttcttacccgcctggcttctggcagctgccacagaacctgcatggtggccctgccaaactaacacaggttcctagatgcccaaggtgtgcctgctcctgccag

SEQ ID NO: 38 - DNA, 8969 bp, Mus musculus
ggacctatatccagacttcgcccgcccgcctgacactgcagggtccgagagaattaaggaaatctagaatgacacgaagaagattagttaaggattataggttttgaggacaagcaccccagaaaagtgaagcacagacaagctcccaggctgtgttcggaggagccgtgtgttagaagaagatggcggacccagggatgatgagtctttttggcgaggatgggagtctgttcagcgaaggcctcgaaggcctcggggaatgtggctaccccgaaaaccccgtgaaccccatgggtcagcagatgcccatagaccaaggttttccctccttacagccatccctccaccatccttcacctaatcagaatcaaaccaagttgacccattttgatcactatagtcagtatgaacagaagatgcatctgatggatcagcctaaccgaatgatgggcagcgcccccgggaacggattggcgtctccgcactcacagtatcacacccctcccgtcccccaggtgccccacggaggcggtggtggcggtcagatgggagtctatcccggcatccagaacgaaaggcacgggcaatcttttgtggatggcggctccatgtggggcccccgggccgttcaggtaccagaccagatacgagccccctaccagcagcagcagccgcagccggctccttcggggcccccggcacagggccacccccagcacatgcagcagatgggcagctatctggcacgtggggatttctccatgcagcagcacggccagccacagcagaggatgggccagttttcccaaggccaagagggcctcagtcagggaagccctttcattgccacctcaggacccggccacctgtcgcacatgccccagcagagccccagcatggccccttccctgcgccacccagtgcagcagcagttccaccatcaccccgctgctctccacggagaatccgttgcccacagtcccagattctcccccaaccctcctcaacaaggggctgtcaggccacaaacccttaactttagttctcggaaccagacagtcccctcccctactgtaaacaactcagggcagtattctcgatatccttacagtaacctaaatcagggattagttaacagtacagggatgaatcaaaatttaggccttacaaacagtactccaatgaatcagtcggtaccaagataccccaatgccgtgggattcccgtcaaacagtggtcagggactcgtgcaccagcagcctatccactccagtggctcactgaaccaaatgaacacacaaactatgcacccttcacagcctcagggaacgtacgcctctccacctcccatgtcacccatgaaagcaatgagtaacccagcaggcacgccgcctccgcaggtcaggcccggaagtgctgggatgcccatggaagttggcagttatccaaatatgccccaccctcagccatctcaccagccccctggtgccatgggaatcggacagaggaatatgggccccagaaacatgcagcagcctcgttcgtttatgggcatgtcctcggcacccagggagctgaccggacacatgagaccaaatggttgccctggtgtcggccttgcggatccacaagcaatccaggaacgactgatacctggccaacagcaccctggtcagcagccatctttccagcagttgccaacctgtcctccactacagccccacccaggcctgcaccagtcttcacctccacatccccatcaccagccttgggcacaactccacccgtcaccccagaataccccacagaaagtgcctgtgcatcagcattctccatcggagccctttctagagaagccagtgccggatatgacccaggtcagcgcacagaacgctcagctagtgaagagcgacgattacctgccgtcgatagagcagcagccacagcagaagaagaagaaaaagaaaaacaaccacattgctgcaggggattccagtaaaggttttggtaaagatgacttccctggtggggttgaaaaccaagaactgcgcaggaactcactggatgtgtcccaggaagaaaaaaagaaaaagaaaaggccgaaggtcaaaaaagatccgaaggaatcgaaggagccgaaggagaagaaagagcccaagaccccaaaagccccgaagatccccaaagagccaaaggaaaagaaagcaaaaactgtcacgccaaaacccaaatccagcaaaaagtcaagtaataagaaaccggattcagaagcaagtgctttgaagaagaaggtcaacaaaggaaaaacagaaggttctgaaaattcagacttggacaaaacacccccaccgtcccccgctcctgaagaggacgaagacccaggtgtccagaagaggcggtccagcaggcaggtgaagaggaagcgatacactgaagatttggagttcaagatttctgatgaggaggcagatgatgcagatgctgctggaagagactccccatccaacacctcgcagtcagagcagcaggaatctgttgatgcagaaggcccagtggtggagaagattatgagcagccgcctagtgaaaaagcagaaggaatctggcgaggaggtagaagttgaggaattttatgtgaagtacaaaaacttctcctatcttcattgtcagtgggcgtcagtagaagatctggaaaaagacaagagaattcagcaaaagataaaacggtttaagtcaaaacagggccagagcaaattcctctcagagattgaggatgacctttttaatccagactatgtggaagttgaccggataatggactttgcacgtagcacagatgaccggggcgagcctgtgattcactacctggtgaagtggtgctcactcccttatgaagacagcacatgggagctgaagcaggacatagatcaaacaaagatcgaagagtttgaaaaactcatgtccagggagccggaaaccgagcgtgtggagcgacctcctgctgatgactggaagaaatcggagagttccagggagtataaaaacaataacaaactcagggaataccagttggagggagtaaactggctacttttcaattggtacaacatgcgaaactgcattttagcagatgagatgggtttgggaaaaacgatccagtccattacgtttctctatgagatatacttgaaaggaatccatggcccctttttagtaattgccccattgtccacgatccccaactgggaaagggaattccgaacctggacggagttgaacgtggttgtgtaccatgggagccaagccagccgtcggaccattcagttgtatgaaatgtacttcaaagatccccagggtcgagtgataaaggggtcctataagttccacgccatcatcactacattcgagatgattctgacggactgtcctgagctgcgtaatattccttggcgctgtgtggtcatcgatgaagcccacaggctgaagaacagaaactgcaagctgctggaagggctgaagatgatggacttggaacacaaagtcctgctgaccgggaccccgctgcagaacactgtggaagagctcttcagcctgcttcatttcttggagccaagtcgcttcccttcagaaacaacctttatgcaagaatttggtgatctgaaaacggaagagcaggtgcaaaaactacaggctattctaaagccaatgatgttgagacgcctgaaagaggatgtagaaaagaacttggcccccaaagaagagactattattgaagttgagctaacaaacattcagaagaaatattaccgagccatccttgagaagaattttacatttctttccaaaggtggtggacaagctaacgtacctaaccttttaaacactatgatggaactgagaaaatgctgcaatcatccctacctaatcaatggtgctgaagagaaaattttggaagagtttaaagaaacacacaatgcagagtctccagattttcagctccaggcaatgatccaggctgctggcaagctggtgctgattgacaagctgctgccaaagctgaaggctggtggccacagggtgcttatcttctcccagatggtgcgctgcttggacatcctggaagactatctcatccagagacggtacccatacgaaaggattgatggccgggtcagaggcaacctccgccaggcagctattgacagattctccaaacctgattctgataggtttgtgttcctcctgtgcacacgggcaggagggctaggcattaacctcactgctgctgatacctgcatcatctttgattcagactggaatccccagaatgacctccaggctcaagctagatgccacagaatagggcagagcaaatctgtgaaaatctacaggctgattacaaggaactcctatgaaagggagatgtttgacaaggctagtctgaagctgggtctggataaagccgtgttgcagtccatgagtggaagagaaaatgccactaacggggtacaacagctgtccaagaaggaaatagaagacctcctgcgaaagggggcatatggtgcacttatggatgaagaagatgaagggtctaagttttgtgaagaggatattgaccagattctccttcgacgaacccacactatcaccattgagtctgaaggaaaaggctccacatttgctaaggccagctttgttgcgtctggaaataggacagacatttctttggatgacccaaatttctggcagaagtgggctaagaaggctgaattggacatcgatgccttaaacgggaggaacaacctggttattgacactcctcgagtgaggaagcagacccggctatacagcgcagtgaaggaagacgaactgatggagttctccgacctggaaagcgactccgaagaaaagccttgtgcaaagccacggcgcccccaggataagtctcagggctatgcccggagcgagtgcttcagggtagagaagaatctgctggtttacggctggggccgctggacagatatcctgtcccatggacgctacaaacgtcagctgactgagcaagatgtcgaaaccatctgcagagcgatcctggtgtactgtctcaaccactacagaggggacgagaacatcaaaagctttatctgggacctcatcacacccacggcggatggccagactcgggccctgctaaatcattccggtctgtcggcccctgtgccgaggggccggaaggggaagaaggtgaaggcccagagtacgcagccagtagtgcacgatgctcactggctggcaagctgcaacccagacgccctgttccaggaggacagctacaagaagcacctgaagcaccactgcaacaaggtcctgctgcgtgtccgcatgctgtactacctaagacaagaagtgataggagaccaggcagagaagatcctcgagggcgctgactcaagtgaagcagacgtgtggatccctgagccattccatgctgaggttcctacagattggtgggaccgagaagcagacaaatccctcctaattggagtgtttaaacatggctatgagaagtacaattccatgcgagctgaccctgcactgtgcttcctggaacgagtcggaatgcccgatgccaaggccatcgctgccgagcagagagggacagacatgctagcagatggtggcaagcacagcgagagcaatgctgagttaggtcagctctactggccgaacacgtcaaccctgactacgcgtctgcgccggctcattactgcctatcagcgcagctataaaaggcagcaaatgaggcaagaggccctaatgaagacggaccggcgcagacggaggccccgggaggaagtgagagcgctggaggcggaaagggaagctattatatctgagaaaaggcaaaagtggacgagaagagaagaagcggacttttaccgggtggtatccaccttcggggttatttttgacccagtgaaacagcagtttgattggaaccaattccgagcctttgccagactagacaaaaagtctgatgagagcctggggaagtatttcagctgctttgtggccatgtgcagacgggtgtgtcggatgcctgccaagcccgaggacgagccacctgacctcgcctcccttatcgagcccatcacggaggaacgagcatccaggacactgtaccgcattgaactgcttcgcaagatccgagagcaggtccttcatcacccacaactaagtgacaggctgaagctctgccagcccagcctagatctgcccgagtggtgggaatgtggacggcacgacagggacctgctggtgggtgctgctaagcacggggtcagccggacagactatcacatcctcaacgaccctgagttgtccttcttagatgcacacaaaagctttgctcagaaccgtggggccagtaccgtccctcctttgaatactctggccatgggctttggccagactcctccagtcatttcctctgctcacgttcacgaagaaaaggcaatggagcaggctgaaggcaaggcagaggagtgtgaacactcaccggccaaagagaggtcggatgggaaagaggaggaagaagaagcaggcggggccaaggatggcaagcaggaatgtgaggtcgaggccagctctgtgaagggtgaactcaaaggggtggagggcagtgcagaccctgggtccaagtctgtctcagagaagggctcagaagaggacgaagaagagaagctggaggacgatgataagtcggaggagtcgtcgcagccagaaggagccgtctcgagagggaagactttcgatgaagaaagcaatgcttctctgagcactgctagggatgaaacccgagatggattctacatggaggatggagatgcttcggtggctcagctccttcatgaacgaacatttgccttctccttttggcccaaggacagagtaatgataaaccgattagacaacatctgtgaagctgtgttgaaaggcaaatggccagtaaatcggcgccagatgtttgatttccagggccttgtccctgggtacccaccctccgccgtggacagtcccctgcagaagaggagctttgccgagctctctatggtcagccaggccagcatcagtgcgagcgaggacatcaccacgtctcctcagttgtccaagcggcggcggaggagaaggaaagttgaaatcgaggctgaaagagctgccaagaggagaaaccttatggagatggttgcccagcttcgagagtctcaggtggtctcagaaaatggacaagaaaaagttgtggacttatcaaaggcctcgagagaggcaacaagctctacctcaaatttctcatctcttacttcaaagtttatcttgcctaatgtctccacgccagtgtctgatgcctttaagtctcagatggagctgctccaagcaggcctttcacgcacacccacaaggcatatgctcaatggctccctggtggatggagagccccccatgaagaggaggcgaggcaggaggaaaaacgtggagggcctcgacctacttttcatgagccacaaacggacgccgttaagtgcagaggatgctgaggtgaccaaagcttttgaagaagatatagagaccccaccaataagaaacattccttctcctggacagctggaccccgacacccggatccctgtgataaaccttgaagatgggactaggctggtgggagaagacgctcctaaaaacaaggacttggttgactggctgaagctgcaccccacctacactgtcgatatgccgagttatgtaccaaagaacacagacgtgctgttttcctcgtttcagaaaccgaaacagaaacgacatagatgtcgaaatcctaataaattggatattaacactttgacaggagaagaaagggttcctgttgttaacaaacgaaatgggaagaagatgggtggagccatggcccctccaatgaaggacctgcccaggtggctggaggagaaccctgagtttgctgtcgctccagactggaccgatatagtcaagcagtctggttttgttcccgagtcaatgtttgaccgtctcctcactggacctgtggtgcggggagaaggagccagcaggagaggacggaggcccaagagcgagatcgcccgagcagccgcggcggctgctgctgtcgcctctacttcagggatcaaccctctgttggtgaacagcctgtttgctgggatggacctgacaagccttcagaatctccagaacctccagtccctccagctggcagggctcatgggcttccctccaggactggccacagctgccaccgccggaggcgatgcgaagagccccgccgcagtgctgcccctgatgctgccagggatggcgggcctgcccaacgtgttcggcttgggcgggctgctgaacaaccctctctcagctgctactggaaacaccactactgcttcaagtcaaggagagccagaggatggcacttccaaagcggaagagaaaggaaacgacaatgaagacgagaaccgagactctgagaaaagcacagacaccgtttcggctgctgactccgcgaacggatctgttggtgctgctactgccccggctgcgttaccctccaacccgctggccttcaaccctttcctcctgtccaccatggccccaggcctcttctacccatccatgtttctacctccaggactggggggattgacactgcctggcttcccagcactggcgggactccaaaacgccgtgggtaccagcgaagaaaaggctgctgacaaggccgagggagggccctgtaaagacggagagaccctggagggcagcgatgccgaggagaacctggacaagactgtagagtcctccatcttggaagacgaggttgcacagggtgaagagctggactccctcgaaggcggggatgagatagaaaacaccggaaacgacgagtaa

SEQ ID NO: 39 - protein, 2910 aa, Mus musculus
KKMADPGMMSLFGEDGSLFSEGLEGLGECGYPENPVNPMGQQMPIDQGFPSLQPSLHHPSPNQNQTKLTHFDHYSQYEQKMHLMDQPNRMMGSAPGNGLDHSQYHTPPVPQVPHGGGGGGQMGVYPGIQNERHGQSFVDGGSMWGPRAVQVPDQIRAPYQQQQPQPAPSGPPAQGHPQHMQQMGSYLRDFSMQQHGQPQQRMGQFSQGQEGLSQGSPFIATSGPGHLSHMPQQSPSMAPSLRHPVQQQFHHHPAALHGESVAHSPRFSPNPPQQGAVRPQTLNFSSRNQTVPSPTVNNSGQYSRYPYSNLNQGLVNSTGMNQNLGLTNSTPMNQSVPRYPNAVGFPSNSGQGLVHQQPIHSSGSLNQMNTQTMHPSQPQGTYDPPMSPMKAMSNPAGTPPPQVRPGSAGMPMEVGSYPNMPHPQPSHQPPGAMGIGQRNMGPRNMQQPRSFMGMSSAPRELTGHMRPNGCPGVGLADPQAIQERLIPGQQHPGQQPSFQQLPTCPPLQPHPGLHQSSPPHPHHQPWAQLHPSPQNTPQKVPVHQHSPSEPFLEKPVPDMTQVSAQNAQLVKSDDYLPSIEQQPQQKKKKKKNNHIAAGDSSKGFGKDDFPGGVENQELRRNSLDVSQEEKKKKKRPKVKKDPKESKEPKEKKEPKTPKAPKIPKEPKEKKAKTVTPKPKSSKKSSNKKPDSEASALKKKVNKGKTEGSENSDLDKTPPPSPAPEEDEDPGVQKRRSSRQVKRKRYTEDLEFKISDEEADDADAAGRDSPSNTSQSEQQESVDAEGPVVEKIMSSRLVKKQKESGEEVEVEEFYVKYKNFSYLHCQWASVEDLEKDKRIQQKIKRFKSKQGQSKFLSEIEDDLFNPDYVEVDRIMDFARSTDDRGEPVIHYLVKWCSLPYEDSTWELKQDIDQTKIEEFEKLMSREPETERVERPPADDWKKSESSREYKNNNKLREYQLEGVNWLLFNWYNMRNCILADEMGLGKTIQSITFLYEIYLKGIHGPFLVIAPLSTIPNWEREFRTWTELNVVVYHGSQASRRTIQLYEMYFKDPQGRVIKGSYKFHAIITTFEMILTDCPELRNIPWRCVVIDEAHRLKNRNCKLLEGLKMMDLEHKVLLTGTPLQNTVEELFSLLHFLEPSRFPSETTFMQEFGDLKTEEQVQKLQAILKPMMLRRLKEDVEKNLAPKEETIIEVELTNIQKKYYRAIKNFTFLSKGGGQANVPNLLNTMMELRKCCNHPYLINGAEEKIEFKETHNAESPDFQLQAMIQAAGKLVLIDKLLPKLKAGGHRVLIFSQMVRCLDIDYLIQRRYPYERIDGRVRGNLRQAAIDRFSKPDSDRFVFLLCTRAGGLGINLTAADTCIIFDSDWNPQNDLQAQARCHRIGQSKSVKIYRLITRNSYEREMFDKASLKLGLDKAVLQSMSGRENATNGVQQLSKKEIEDLLRKGAYGALMDEEDEGSKFCEEDIDQILLRRTHTITIESEGKGSTFAKASFVASGNRTDISLDDPNFWQKWAKKAELDIDALNGRNNLVIDTPRVRKQTRKAVKEDELMEFSDLESDSEEKPCAKPRRPQDKSQGYARSECFRVEKNLLVYGWGRWTDILSHGRYKRQLTEQDVETICRAILVYCLNHYRGDENIKSFIWDLITPTADGQTRALLNHSGLSAPVPRGRKGKKVKAQSTQPVVHDAHWLASCNPDALFQEDSYKKHLKHHCNKVLLRVRMLYYLRQEVIGDQAEKIGADSSEADVWIPEPFHAEVPTDWWDREADKSLLIGVFKHGYEKYNSMRADPALCFLERVGMPDAKAIAAEQRGTDMLADGGKHSESNAELGQLYWPNTSTLTTRLRRLITAYQRSYKRQQMRQEALMKTDRRRRRPREEVRALEAEREAIISEKRQKWTRREEADFYRVVSTFGVIFDPVKQQFDWNQFRAFARLDKKSDESLGKYFSCFVAMCRRVCRMPAKPEDEPPDLASLIEPITEERASRTLYRIELLRKIREQVLHHPQLSDRLKLCQPSLDLPEWWECGRHDRDLLVGAAKHGVSRTDYHILNDPELSFLDAHKSFAQNRGASTVPPLNTLAMGFGQTPPVISSAHVHEEKAMEQAEGKAEECEHSPAKERSDGKEEEEEAGGAKDGKQECEVEASSVKGELKGVEGSADPGSKSVSEKGSEEDEEEKLEDDDKSEESSQPEGAVSRGKTFDEESNASLSTARDETRDGFYMEDGDASVAQLLHERTFAFSFWPKDRVMINRLDNICEAVLKGKWPVNRRQMFDFQGLVPGYPPSAVDSPLQKRSFAELSMVSQASISASEDITTSPQLSKRRRRRRKVEIEAERAAKRRNLMEMVAQLRESQVVSENGQEKVVDLSKASREATSSTSNFSSLTSKFILPNVSTPVSDAFKSQMELLQAGLSRTPTRHMLNGSLVDGEPPMKRRRGRRKNVEGLDLLFMSHKRTPLSAEDAEVTKAFEEDIETPPIRNIPSPGQLDPDTRIPVINLEDGTRLVGEDAPKNKDLVDWLKLHPTYTVDMPSYVPKNTDVLFSSFQKPKQKRHRCRNPNKLDINTLTGEERVPVVNKRNGKKMGGAMAPPMKDLPRWLEENPEFAVAPDWTDIVKQSGFVPESMFDRLLTGPVVRGEGASRRGRRPKSEIARAAAAAAAVASTSGINPLLVNSLFAGMDLTSLQNLQNLQSLQLAGLMGFPPGLATAATAGGDAKSPAAVLPLMLPGMAGLPNVFGLGGLLNNPLSAATGNTTTASSQGEPEDGTSKAEEKGNDNEDENRDSEKSTDTVSAADSANGSVGAATAPAALPSNPLAFNPFLLSTMAPGLFYPSMFLPPGLGGLTLPGFPAGLQNAVGTSEEKAADKAEGGPCKDGETLEGSDAEENLDKTVESSIDEVAQGEELDSLEGGDEIENTGNDE

SEQ ID NO: 40 - DNA, 85272 bp, Homo sapiens
  misc_feature (1)...(85272): n = A,T,C or G
caggagggatggcctgctttttggtcattatcagtagtgatgtgagataatggtcacaaaagaggtttgtgagtatggaggcaaggtatgtagatggtattcttttctgttggttttttaaaaaatgctaggtttcactctatttttttgaactttagcccgattttactgagctttataggcgtttcatcaaggttgacgctatgtgggggtttcttatatgagttaatgagaaaaatatttagagtagtgcctggtacatacccagggctatgtatgtttctgctgttgttattgctattacttgtactgttgtaactagaccagttaacaattataagtaacctaccagagtaggctctagaaatgtaaacgtaataagacacagtttcttctctgcttgagcttacatgatagttggagaaagacacacatatagtgctttgattttaatacattgcagtaatgttaccaccaacttttgtgtattttatatatcccttgtatggggtacatcatgtgacatgtgggtggagtgaggagatcatgtctgatctagaccatggtgattagaaaatgcttacttggaatgagtggtgtccgcgcagggtcttgcagatgagtaggttgggataaaagtgtaagtagaagagatacatgtgtgttttggggaatagttctgtatgcctggaagcataagaggcaaaggttctggtacacccatatggagaatctcagacattatatgtagaggtttgaaacagaggaatgccccagtcagatttgccttccagctggttactctggtgacttgagatgagttttcaggtgatgttttggtggcattaccatgatgctgaggtgggaaatacaggagacagagcaggtttaggagaggaatgagggcagacatgatttcttcagtgctggtgccattcagggctggaatttacaggtgttccctgcacatggcctagttattcttccaactcacaggctgccatgtggctgtcggcttgagctaggcccatgagtagccatcactgcagctgttagaggagtcttgtggttctgtatctgcgtcaagcagctcagtggccttatcttcaatattgcaatgttggtttaaggaatgttacttcttaaagacattctcatccccctgacctagaacagtggcccttttcatacattccagcttctgttgtaatttggaagaggaatatatgtctgtgttttgagtttgacattataaaagactagttttgacccttacggatataaatgataactatgcatgtggactctatgtcctttctccaccggtctgatgttgtatagccctgcatgtggggtgtgagggtgatgaggcagtggggagctgttgtgattaatagcctgggcgggaaatgatatgtgtctgaactaaagcagtggtcatgggcatggggaggagtgcactgtgggtctgtttgcttgcttattcttttagctagtgcttaggaatgtcgatgaaggctcttccttctatgtatgttgcttggatgaagtcatcctcagtgaagggggtcctgtctgtaagtctctgcagttgaatcggcccaaatgggtctgagccatgaccagagaatactttccagactcagctgcttgtttttcacatgggtgtggatgttaactatctgtgccattttctcatttaaacctcataataaatcttggaagactgtataaaatattaacgttattttacagatgaggaaactgaggctcagacaaattaagtaacttatccatggtcccagcctataaatgacagttcgaactggaactaaggtttgtcttgactcatatcagtgctcatatccaccattctagattacctttgtttgttaaaagaaaaatcttgacttggatatttttgggcaaagcagttttaatacaacacttagttgaaaaatctcaattagcttattgcagaatagtagcaaaggcaatttaatttacataacttaattttgtccttgatggaaatgttggagggtggacactgaagattttgttgctttttttttgacttcctagggtgttctttgatttgtatattgatggatggaaatgcttagctgtccgttaacaacatgaatagtgaaaggtctgatgagtttagaaatctttccatactcagatctgggataagtgcttcccttatctacaggctttttgtctaaacatttggagagggactgtctgactttcagctatcttggaggttccatacagttcattcttgggaagggcagatggaaaatcattagcacttctctccttcagcaaattgatgtttcctcaaacctgggctctggtcggtttccagatagtaagccttttactcctgtaggaccacgcatgcagggcccggcagccctctaaattaaaccgtgtacatcgctctggtatagagaggtcactgtgaaaagcgcgagctgccaactcactttacctggcagtggttcaactctttgacaggcctacctctgatttaaacaaatttgagaaatatgtaaagttttggaagcagttttgcactgatttgataaaagaaaccacaaaacactgcagcgcaggtgttgagaatgtttgaaagctgattgagggaagcagatggctttagtcagtggcatccagccaaaagagcaggtgctggtcatgtgaccgctggttaccagggtaatctgattgctcttggcgtgcagatgaaaggaaaggggcccagtgttcagctgtagtattgtataatttgtggcagttagagcggaaataaatgctggaaatggaacctcatagtaggggagacttctgtccatgtgtagcgtaaacactaggacagttggatgaggaacggttgtatggatttttttttttaattttaaaaatattatgctttctgtggatctttcggagacagtttttagagcacggccttttttcttttcttttaaataaaaataactttttaaacctaactgccatttgctataatcttgaattgttattttcttatgtagctatttactatgctaaaatgttaacaaaataaaactctgagtattaagaataactagtttaagatgatcaaatattttatttagttgaaaaaatacattttaggtgtgtgatgggtagtttattaacaatacttttgaaatattttacatgacatatgctttattctaaaagcctatagatatcttggcttcttccttttgtagtagctgagggtaaaaacatgctgtttaatgcattctgtcagcacattttcctgagaacttacaaacttcaataaataaaatttttgaaggtttttgaaatacagcttttgtttttcacaatttattggaatttgaggctccctagaaatattttttaaaaaatcattactgaggttggattattttcagtgttggataacaaatagtaattggtgttagaaaatttgcaactgatggccgggcacagtgactcaatgcctgaaatctcagcactttgggaggccgaggcaggtggatcacctgaggtcaggagttcaagaccagcatgaccaacatggtgaaagcccgtctctactaaaaatacaaaattagctgggcatggtggtgcatccctgtaatcccagccacttgagaggctgaggcaggagaatcgcttggacccgggaggcggaggttgcagtgagccaagatcacgccgttgcattctagcctgggcaacaagagtgaaactgtgtctcaaaaaataaaaaaaaaactggagctgatttggaaatagaaatggaaggtagcgctaaatgtacataaagtcaggtaaaggttctagaggtaatggcaaatgtaaaacatttttttcttgaagtttatgtcttttgtcttatataatattcaaattctaataacatttgtcagcaacatactatgaaacatgcactttattagggttgctttactgtatttttatatttcagagaactgtctttcaaaaaaagggctaattgtgattatctcaaaaaacacgtagcaccaaaataaagcttatatttaattaagaacacagtacctactaaaattatgtacaacaggaaattgctatgtatttttattacattctaaaagattataagttgaacaaaaatgtaactggatggtataaaagaggataccttctagtactggtcaaaagaatacttaagtatgtaaaactatccacaaaaggcacaaagagaagatcatgatatcgtttttcatgacaattaaaaaaaagtgttctgtaccttaaaaattcgatagcaaaactacttcttaatctgattttttattatggcttgatatactggcaggcattttgcacaaatgtactatgtgtggtattagtttttgcatgcagtttatttttaattaggtcatatatttgctaaaagtcattaatatggagttttgccaggaaaacttaattgggagttgcatttaactgtaaatagccaatatgtatggatttatcagttgtcattgatacttttgggatattaatgtgggaaatataagagacatgcagaaacacattaaaagtgaacactaagcgatccactttgaattctagtaataagaaacctgactcagaagcaagtgctttgaagaaaaaggtcaacaagggaaaaacagaaggttctgaaaattnnnnnnnnnnnnnnnnnnnnnnnnnnnnnnnnnnnnnnnnnnnnnnnnnnnnnnnnnnnnnnnnnnnnnnnnnnnnnnnnnnnnnnnnnnnnnnnnnnnnnnnnnnnnnnnnnnnnnnnnnnnnnnnnnnnnnnnnnnnnnnnnnnnnnnnnnnnnnnnnnnnnnnnnnnnnnnnnnnnnnnnnnnnnnnnnnnnnnnnnnnnnnnnnnnnnnnnnnnnnnnnnnnnnnnnnnnnnnnnnnnnnnnnnnnnnnnnnnnnnnnnnnnnnnnnnnnnnnnnnnnnnnnnnnnnnnnnnnnnnnnnnnnnnnnnnnnnnnnnnnnnnnnnnnnnnnnnnnnnnnnnnnnnnnnnnnnnnnnnnnnnnnnnnnnnnnnnnnnnnnnnnnnnnnnnnnnnnnnnnnnnnnnnnnnnnnnnnnnnnnnnnnnnnnnnnnnnnnnnnnnnnnnnnnnnnnnnnnnnnnnnnnnnnnnnnnnnnnnnnnnnnnnnnnnnnnnnnnnnnnnnnnnnnnnnnnnnnnnnnnnnnnnnnnnnnnnnnnnnnnnnnnnnnnnnnnnnnnnnnnnnnnnnnnnnnnnnnnnnnnnnnnnnnnnnnnnnnnnnnnnnnnnnnnnnnnnnnnnnnnnnnnnnnnnnnnnnnnnnnnnnnnnnnnnnnnnnnnnnnnnnnnnnnnnnnnnnnnnnnnnnnnnnnnnnnnnnnnnnnnnnnnnnnnnnnnnnnnnnnnnnnnnnnnnnnnnnnnnnnnnnnnnnnnnnnnnnnnnnnnnnnnnnnnnnnnnnnnnnnnnnnnnnnnnnnnnnnnnnnnnnnnnnnnnnnnnnnnnnnnnnnnnnnnnnnnnnnnnnnnnnnnnnnnnnnnnnnnnnnnnnnnnnnnnnnnnnnnnnnnnnnnnnnnnnnnnnnnnnnnnnnnnnnnnnnnnnnnnnnnnnnnnnnnnnnnnnnnnnnnnnnnnnnnnnnnnnnnnnnnnnnnnnnnnnnnnnnnnnnnnnnnnnnnnnnnnnnnnnnnnnnnnnnnnnnnnnnnnnnnnnnnnnnnnnnnnnnnnnnnnnnnnnnnnnnnnnnnnnnnnnnnnnnnnnnnnnnnnnnnnnnnnnnnnnnnnnnnnnnnnnnnnnnnnnnnnnnnnnnnnnnnnnnnnnnnnnnnnnnnnnnnnnnnnnnnnnnnnnnnnnnnnnnnnnnnnnnnnnnnnnnnnnnnnnnnnnnnnnnnnnnnnnnnnnnnnnnnnnnnnnnnnnnnnnnnnnnnnnnnnnnnnnnnnnnnnnnnnnnnnnnnnnnnnnnnnnnnnnnnnnnnnnnnnnnnnnnnnnnnnnnnnnnnnnnnnnnnnnnnnnnnnnnnnnnnnnnnnnnnnnnnnnnnnnnnnnnnnnnnnnnnnnnnnnnnnnnnnnnnnnnnnnnnnnnnnnnnnnnnnnnnnnnnnnnnnnnnnnnnnnnnnnnnnnnnnnnnnnnnnnnnnnnnnnnnnnnnnnnnnnnnnnnnnnnnnnnnnnnnnnnnnnnnnnnnnnnnnnnnnnnnnnnnnnnnnnnnnnnnnnnnnnnnnnnnnnnnnnnnnnnnnnnnnnnnnnnnnnnnnnnnnnnnnnnnnnnnnnnnnnnnnnnnnnnnnnnnnnnnnnnnnnnnnnnnnnnnnnnnnnnnnnnnnnnnnnnnnnnnnnnnnnnnnnnnnnnnnnnnnnnnnnnnnnnnnnnnnnnnnnnnnnnnnnnnnnnnnnnnnnnnnnnnnnnnnnnnnnnnnnnnnnnnnnnnnnnnnnnnnnnnnnnnnnnnnnnnnnnnnnnnnnnnnnnnnnnnnnnnnnnnnnnnnnnnnnnnnnnnnnnnnnnnnnnnnnnnnnnnnnnnnnnnnnnnnnnnnnnnnnnnnnnnnnnnnnnnnnnnnnnnnnnnnnnnnnnnnnnnnnnnnnnnnnnnnnnnnnnnnnnnnnnnnnnnnnnnnnnnnnnnnnnnnnnnnnnnnnnnnnnnnnnnnnnnnnnnnnnnnnnnnnnnnnnnnnnnnnnnnnnnnnnnnnnnnnnnnnnnnnnnnnnnnnnnnnnnnnnnnnnnnnnnnnnnnnnnnnnnnnnnnnnnnnnnnnnnnnnnnnnnnnnnnnnnnnnnnnnnnnnnnnnnnnnnnnnnnnnnnnnnnnnnnnnnnnnnnnnnnnnnnnnnnnnnnnnnnnnnnnnnnnnnnnnnnnnnnnnnnnnnnnnnnnnnnnnnnnnnnnnnnnnnnnnnnnnnnnnnnnnnnnnnnnnnnnnnnnnnnnnnnnnnnnnnnnnnnnnnnnnnnnnnnnnnnnnnnnnnnnnnnnnnnnnnnnnnnnnnnnnnnnnnnnnnnnnnnnnnnnnnnnnnnnnnnnnnnnnnnnnnnnnnnnnnnnnnnnnnnnnnnnnnnnnnnnnnnnnnnnnnnnnnnnnnnnnnnnnnnnnnnnnnnnnnnnnnnnnnnnnnnnnnnnnnnnnnnnnnnnnnnnnnnnnnnnnnnnnnnnnnnnnnnnnnnnnnnnnnnnnnnnnnnnnnnnnnnnnnnnnnnnnnnnnnnnnnnnnnnnnnnnnnnnnnnnnnnnnnnnnnnnnnnnnnnnnnnnnnnnnnnnnnnnnnnnnnnnnnnnnnnnnnnnnnnnnnnnnnnnnnnnnnnnnnnnnnnnnnnnnnnnnnnnnnnnnnnnnnnnnnnnnnnnnnnnnnnnnnnnnnnnnnnnnnnnnnnnnnnnnnnnnnnnnnnnnnnnnnnnnnnnnnnnnnnnnnnnnnnnnnnnnnnnnnnnnnnnnnnnnnnnnnnnnnnnnnnnnnnnnnnnnnnnnnnnnnnnnnnnnnnnnnnnnnnnnnnnnnnnnnnnnnnnnnnnnnnnnnnnnnnnnnnnnnnnnnnnnnnnnnnnnnnnnnnnnnnnnnnnnnnnnnnnnnnnnnnnnnnnnnnnnnnnnnnnnnnnnnnnnnnnnnnnnnnnnnnnnnnnnnnnnnnnnnnnnnnnnnncattctacagaccaggagtccaaggtccacaaaattacttgtccaaggtcacatgataagagtcggggcaagttcaaacaagagcacttagctctaggacttacaaggtcaaattgccacctgggatgtgggaaagtattgcagatggcagaatactctgctggaatctctgtttcctccacctgggattgatctgggcagtgccaaagctttgtcctgtagaggagggtcccaggaggaacctctggcccatgtcactactccctccatgtaagccacaaggaagtctcttaataaactttttctagaatggtctcacatcagaaaagtactttgcacctctgtggccacagctgtgtgtggcttggagctaacaatatctaactatctatttgatggtcatattataccgagtttgtatcgtgaactgtctcaaatccctttttaagagcagggagaacataaacttaagattaaaatcaatcagtcccactctttggggaaaagtactgggattgtgttcatcctgacttgagaaatggtagtgcctgtcttgccttaggtgcacacaatgaatgttttgcctctctctgccttactttctcaactttaacattcttgagactctttaaaaagtgttatttcataattcttagaaaaaattttgtgtcaaaattttcctcaatatttttatttcttctttgtgctttgcaaactcattccataggttgtaatattcttgaattcattagcagcttaaaactttacatgtgtcattttcaaatttagatttgacatacatatatgaataaaaaggttatttctccttattaattagcttccaaaatgaattctttgacaaaacagttaaataatatagaattattctgaacagagttcagaacctcttgttctgttccatttgcttctctccccatctttatagctattaataatctgttgtctgtcttttcacattccttatttaaagccatgtacatatacattcatcttttagcaaatactcattgaggcatagagaagtaaacaagatatacagtctttttgtcttaagaagttaatatatcgatgaactgcacgtctaaatagatacacaacattttttatttatcttaaatagaatcttaagctacttcttgttatgtggcttgtttttcttcttattttacaattagtcttgcagatattcccaaacttcctggaagtgaaagtagtgagtcaaaggtctgcatgtttaagttttgatagataggaccacattgtcctgcaaggactgtgtgggttgcattttgaccacaggattgtgagaatacccagtttgccagtgatcctgctaatactggctattaccaatctttttaattttaaccactatggtaaaaacattatattttaaaaagtaaaattactgtccatagtcattcattatgaattttgccatttaacccttcatctcttcagaaattttcagagtatttcttttaggatcaagattaaaatacaaaaaccttttatttaaaatggcctgaaatatctggggcaccttggttagtattataacaatatttgtatagaactttgtaatttacagattattttctaaagcactgattttttttggactttttatatgggaaaaatgttaaaatgtacaaaggtagagagagtagtataatgaacccctatagattcattagccagctccagtattgctgccacttttgatggacatactgactgactgaggaaccagatttgttatttccattttcccagttgaaggacatgtagctgggagtggcagggctacagctgtcccaggcatctgactccagatttccacccatttctattgtatttgttagcactgtgatcttttcacatcatatataggattagcattatcaccttttccttaagattaatttaaaaaaattcatccttccactctgcgccattataaagaacatttttctttttttttttttaagacgcagtcttgctctgtcgtccagactgcagtgcagtggcgaaatctcggctcactgcaagctccacctcgtgggttcgcgccattctcctgcctcagcctcccaagtagctgggactacaggcacccgccaccacgcccggctaattttttttgtatttttagtagagacggtgtttcaccatgttagccaggatggtctcgatctcctgaccttgtgatccgcccgcctcggcctcccaaagtgctgggattacaggcgtgagccactgcgctcggccacatttttctttttaatcattaatttcaaggccactgtcttgggtttttgttttagaagagacggtccagcagacaggtgaagagaaagcgctacactgaagacctggagttcaagatttctgatgaggaggcagatgatgcagatgctgctgggagggattccccctccaacacctcccagtcagaacagcaggttagtaccagatctgtgggatttatggatgcattttaaagatggacttggactagaaatttcattgctgcaatctgagaagtgcagtggaagcattggactttcagcaggggaacatccacctaatgttggataatgtgctatgggaaattcgttgtttagcaatatcttttaaaaagccctgttcactgcaatttatttttatataagactgtgatatgtaatttgacacaattttggagaattaatgttctatgctgaggaagagtcagagttggaatataaggaggctgaatatacctctgagaattcagtgctgtggcttctgggactttaataaaccactcaagcttgtctcctgctgttaggcactgtgagaacccctttatgaaattactgccttgtagtacccagcagggtgtactttattctctgtgcaatgtaaatgatggataaaacagtttgtataaaatatgggtagtgtaggattgattattgtaaagatcttttctaaaaaaataatgcttttttcttattgaaaagtatattaaatgcatctttgcattttatttggtaatttgttctatgttaagttgttacataatgttttatgtgacctccatagataaaagatgcctactatagcagaatgatgagtatatttaccccatgggtatagatgaagaaaagttatatttttgactgctaacgtgcagagattattttgtcttggtggctagaatttctgattgctctctagctttagggacctaggctggtccacgtaattaaaccatataatcatgaagtaatattaagcacagatctcctttttgcctttcagtagagtgagatttttgttcctttcaatcgtgtttctcactgataactttgtacccagtgacttaaaaggtgtggaggtggtagcaaaggggaatgatttcttgctcttatagcttaggatgagatgttttctatttggattgatgcacatgcctttttttttaggaatctgttgatgcagaaggcccagtggtagaaaaaattatgagcagtcgttcagtaaaaaagcaggtgagtgccattggagccattaaaatctgtgaggtgtatgtgactcttacaggattgttggctttgtaattttcttttaaaattctaatattgtaaaataaaacttccagtaatatttctaatcctgtctaatttattaacccaatatgaatctttgggatatttgaccccagatgaaattaaaatatatcaagcagtcagtgctttattacaccattcagagtggactagaaactcacaagtctccaaataaatgtatgggactttcagagttgtagactgcctttttcataaatattattcataaaaatcaaaacatgaatttacttctaatctctctcaggaaggttcccccctctttcatgttaggatggaaattctgtttgtcattttagcaagtaggtgttttctcatgtgttttgtaacattttctcatatacaattgaattattcattagtgtctttcttgccagtgcaaaggtgaaatacaggtctattttcagtgtaattttaagaaatagttttgacttaatacttcagagttattcaaagtttctgttcatctgcaaaggtgagctctaagtatctgtcactagcctgctagctttgtcactgaggtactcatatgctctttaacaaaaaaatgccagtgacataccgtgttttcttttcctgatgaaaattccctgttttagctaactcccttcttacagcccactttgagaaaatgctttgcttagtttgaataattacataaacctgcaggtgcattaggtattacaacatgcagtttttcgtgtctctaggaagtagtctcctttagacataggtgtctgtgtcgcagcttcagtcattatcaattccacacagttcttttgtttttatttgctttcaagaaggatggaactacaagttcatgtttcagcatgtaaaacaaactttaaaaaataatatataataaagacatggtctagctgcgaactcctgggctcaaacatttctcctgccttgggctcccaaactgctgggattacaggtgtgagccatcctgcctaaagttgtttatttttagcaaaatgtatacaaagtatctcccagtaagagagttgaggaatggaggatttacaggactcagtgagagtcctataataaagtgagatcccaggcttatcaaataggaaaccattactattcaaatactgctattgagtgatccttgaacatgttattgcaccagcagtaaacttctctttactttcatttcattagtttgttttgctattgtgtgattcaaggtatgaatttttatcggaatatacatctctagtttataagaaaataatttagagcagtatgtcaaggtgttttccagttgagtataggggatacggggtatggagtgactggccatcttggtgactctttgaatgtgaagatttcctgatgaattaaatttcccacctgctcaagtaggaaacaagcactatttaactcattagaaggttgcatttttgtcctactaatgactcctagaactgctaatttatgaattgtagatatacagtaaaatttaaatacttgacatgctttgaagaacaatccccttcactgaattgaagtgacttgtttgagtaaatagcatgtcgtttagatgggatatattaattttcattcaattggtagtgcttcagcaggcatactcagcaggtttaggggttgcaaattataattagctctattattcagagctatttagactatatattatgtagaacattgctttttctttctgttttgcccactttagggtttttgtcttcttttcctctttagctaccttttaaaaataggtacccatggtttaggaatagatactgttaaccatttaccgatgactgggtttgtcttatcataggagattaaaaatcactgtacaggagggtggacatttgttgagttgatgaatttgaagctggagaaaattaatggaaaaaattcttctggaagggagatatgctttgaggtatgatttaaaataaagaagagatgtggagctcatggaattgcttgtcagttactggtatttcttaaagggcaataaaaaaatccattagaaggtactaaacattaacaggtgctaactttttaaactgctaatattctcaaagtagatactttagttatcacctttaataacattggaagaaagtgttgcaaatagaaacaaaaggaaatttgagattttttgtggattcaatctatgcctgctggtctgtttcttattaccatgaataatttaataattggcagtgagaaggtgtctttatctctgccaggcagcactgtagaaactggctatgagctctcagagcctgtccctgcatggtgttgacccagagtggagactccatgtttttcaaagtcagttgacctcatcactgtggcctgagaagcatcatgatccattatgatggagttgtgcaaacataaaactcacctggcagaggcaccgtaagtcagcacctcatgttaaataggggtggctcaagcatttatgttgttctaaacccaggttaatgtctgtgatacctagttgcatgaaatagttggtgcctatttgaattttgaggtagatatatgagtagatacttggattgtataaagcctaattattttgttttccttgtttagtcagcttgtagctgtttctgctttgagccattcatctttggaggataattcaaatccttttttttttgtatcagaaggccaaaagtagttttaaaagtgaattgtgactgtattccctaaaattctttatttttctttaagttaactacaggacgtattttcagagtgtgtgttttaagtatgtagctgagcctcctagagtgtaaagaaggcaaaactcttaatctcatccattgtcatgtccttattttttccctaagtgaactgtgatttggtgtctctagtaaagtatacagtagatagggccaaaagtgaaaagggattcatacccacgccttattgataactttattgaggtgctttttcattcttttgtgtattatttgacagagtgttctgtttttttgctctgtattttagtttcttgactgtgactacttaatttagtagtaggatgcataggaaaggcctaagttaggcctagacttctgggtggctatttagaatccaggtggctggagaactcatttattgccttctcaaagtttctggtttgtttgaacagtgggacaagtatggcttaatatgtttgaaactttaagtgtcatatgaataataaggatttccctagactaattttggatctaatgaaaagatatatacatttctcagaaaaattctatttaattcataatattactgggttctcaaatttaaaggtagctgctcaagaaataaatctgagtgttgtgtgtatgtatgggaatagttctttgacttagttattcattgcctatgcctgttgtagaatggcttctgaaaatagggcttagaggtgagaggttttagggtaggggctgtttgaagctgtcaacagaggctggtcaaactgcctcccatttagtaaataattgaaatgatgtttctgagggcttatgaattcacacacttttgttcaattgttttactgttcagtaaaagaaaagaggtcagcatgatcatatttatatgaaaggaacggtgaaaaacagctctatttatagttttaggggcaagaaggtggtgatccaatatgtgtggtccattaaacagaaccaagtgttgtattctgaaacatccaaaagataacaggccctgggacacttctgtaccagctccaggtgctgctaaatgaagtttcagaacctggttggttcctcctaggcagccctagactctcttgtcaggcatcttcacagcaggttcccagaggaatagctgatcatgacaagaaaatgggtagtaatgagagttggggacagatggctgtaagagtcagagctttctgggaacagacttgagacaaaataaaaagtgtctttactgttcaagatttgatcctgtatgtgttggtgcccacttagaattatgggatgatgagaccatttagaatgagaagaaaagggacagtatgggagaaaagatcagacagaagaatcaggagaaataatacgagcatagacatgataaatcttgtttatgatttataacatatatatcagttatataaatgatacatttgatacatttgaaggcattgaaaatgccttcaaaattgaaaaaatataattattatcagaagggcaaaagctcagacatttgagttccattcttgatttgaatttcatgataatgctgtgtgaagaatcaaaggatctagtttcatccttgcttctctttttccctgatcatctaccatctttttgtctttctgctggaagtctggttctatataaagataatatatcttaaaatgggaggctgggcgcagtggttcaagcctgtaatcccagtactttgggaagccgaggtgggcagatgatgaggtcaggagatcgagaccatcctgtctaacacggtgaaaccccgtctctactaaaaatacaaaaaaaattagccgggcatggtggcggggcctgtagtcccagctactcaggaggctgagacaggagaatggcatgaacctgcgaggcagagcttgcagtgagccgagattgcgccactgcactccagcctggatgacagagcaagactccgtctcaaaaaaaaagggagtagaatggggaaatattaaggctagagagaaaaaggtagggtgggtcttggatggatggccacttgaacttggtagtatttatttataaattaattccatgttccatttatgttgctggttcttgaagccatccaacaaacatttctttttattttggataactaaaagtttatgacatagaaggtgttctgatacattggtttaaaatagtgctttatagttattacgtttcatagatccattatggcacaaccagatattaatagatattgaccactcctgcatatccagactccttcttgatgatttctagacaggccaaaactgtttaaaatataggtttagctcggtgtggtggctcatgcctgtaatcccatcactttgggaggctgagacggggggattgcttgagcctaagagtttgagaccagcctgggcaacatggtgtaaaacccagcctacggaaaatacagaattagctgagcatggtgatgtgtgcccgtagtcccagctacttggggaggtggtagggaggggcaggggttgctgaggcaggaggattgcttgagcctgggaggttgaggttgcagtgagccatgtttgcaccactccactcaagcctgggtgacaaagcaaatcctatctcagaaaagaaagaaaaaaaattaggtttaactgttataagtgagagtttcaaagaaaagtttaagttcacaatctttgaaaatggtttgaaggttggagattgaggggactagtacctttgaacagatctgtgccagtctgttatccagtagaagcctttgcttttttgtttgttctttgccatgttcctacttgccttgattttcttcgaagcatttcggaggtggctgaacagccatacatgaccctcaaggcaggcttggggtctcttgtaagagtgtaaaagcaatccccaaacatctgtaagtggtgtttatattttagatccctgatttatctgatcaaatgttccagaaggaaattacatattatgacttgtttaagagnnnnnnnnnnnnnnnnnnnnnnnnnnnnnnnnnnnnnnnnnnnnnnnnnnnnnnnnnnnnnnnnnnnnnnnnnnnnnnnnnnnnnnnnnnnnnnnnnnnnnnnnnnnnnnnnnnnnnnnnnnnnnnnnnnnnnnnnnnnnnnnnnnnnnnnnnnnnnnnnnnnnnnnnnnnnnnnnnnnnnnnnnnnnnnnnnnnnnnnnnnnnnnnnnnnnnnnnnnnnnnnnnnnnnnnnnnnnnnnnnnnnnnnnnnnnnnnnnnnnnnnnnnnnnnnnnnnnnnnnnnnnnnnnnnnnnnnnnnnnnnnnnnnnnnnnnnnnnnnnnnnnnnnnnnnnnnnnnnnnnnnnnnnnnnnnnnnnnnnnnnnnnnnnnnnnnnnnnnnnnnnnnnnnnnnnnnnnnnnnnnnnnnnnnnnnnnnnnnnnnnnnnnnnnnnnnnnnnnnnnnnnnnnnnnnnnnnnnnnnnnnnnnnnnnnnnnnnnnnnnnnnnnnnnnnnnnnnnnnnnnnnnnnnnnnnnntcttcgtggccctggcccctcccagcacacggtgtgctcatcttacgtgaaggtcctttgctgctcttttcagtcctattttgtgctcatatgggagtaaatcattacttttaaaatattctagtagatggttttaaatacatgcctgaaattttcttttgttgcagaaggaatctggagaggaggtagaaattgaggaattctatgtgaaatacaaaaacttgtaagtaaattgtgattctgtttttaatggggggctatattttccaagtagtaaacgaccatttttttttaaagttgggaaattaagaaactttggtatgatttctttagtcatcatggcctgggaggccattttttaaccaacttttgtatgtttgatattttatgaatttttctggaaaatgtgtaattggtgtaaaagttgactaacttctgtgtataaccaataagtatttttttagagaggataaaaacttctacaataatagaaaaatgaataaagcagtatttccctgtcctctgatcatgaattctaccctgtggggctacacttcgtcccttcacctgtgcatagtgtgcgaggccctagagacaagaactctcctgtggaatgaaagctctagagaaccatgacatcactcaggttctaaaatgcagtgagctatagctttatctgtttttgtttgtttctgatatttatttagtagatttgaattcataacttaaaaatctgaattgaaaaacacggtgagttgttgtccttgtagattctgttgtaagcagtacacctggcccagacagatattgtgatgagctaggatgttttcagagtcagtaatcattctgctgaagaagactgaggccattttgtaacctaaataacaatcatagaacaaggacaaaaatgttcattgataatgtaaacattaaatttcttttttaccccttttaaggcaaagaactaaaccaccatattaatacattcttagggctttaaagagaggcttttgtgagttgctgtgcgaacagcctcagaaaatttaccccaccctagaaaatgaaagcatcaggtgccatgggttttctgtcattctctcttgttgtagttggcactgttaataaattgatgcacttctgaagaagttgtgagtaaaaccttttatcaagtaaaaagataaagaagtctctatcagttttatcatgagagttcaatgaaatacagtctgacaattttaaaaatgctcggaaaatgttaactgtcatcattcttttgtcctcagagcatgtcagtttacacatgtggaaattatgcctacaacacgatttcctatggtaaggaggaggtaaactaagtaaaccagagggagagagttcccttgtagatttaccaaattgaaacaagagcaaaggagttcaaatatcaatcaccaaaataatggcactaccagagagacctccagatcagtgtgtgacagtgaggcctgagctgcctccttccagtcagcctgttagtgaccccagagatgggctccgagttcctgaccaggtgccagtgccagaccaggagactctagccctcctcaaaagtcatttgaggtgaggtaaagggagttttgaaaaaaaaaaaaaaaaaagaaaaaaaaggttttctgactgtcattattgagagctaagagaaattaagatttccataaaactaagagtttttgttagccttatatttggatacaatttcacatttatagaaaaattgtaaaaaatagtacaaagaatttctgtttttctttttgtagttaatgtgtatcttccggaaagatactttaagacttaaatatggttgtggttgctaaggggtgatttactaattccatcatttcttctacattgattggttgggtttttaccgtaaggaagagctttaccctcttgtctgtttgttaatttatagctgagcggacttgtggcttctcattttattcaagggattataactctttactgttgtagtatttactttgcccacattatcccagatttggtcagtgggagccccttcagactggctcttctgtctttttgccttgtccccatttttctttgaacattttcttgctttctggcaccagaggatgttccaggctcatctcgtaacttccctgttttagttatggagtcagttacttctccaagaaggcttggttgttttcagtgaaggggggggcattgagaaaccaagattggggctttaggtgtgctcctcgttgctgaggaattgttgcttctagtccctctcagtggataggactgggagagagagagagtgtgtgtgtgtgtgtgtgtgtgtgtgtgtatcgagttacacacacacttatctgtttattatatacacacacatatttacctacctctccaacacaacagcaaaaacaatgtgtatatattgatacttccagtattattccagcagcccagggttcattctctcctttcccctttaatattagtaattcccttcttcaaccagaataaacctggctctcttattttttatgtttgctttttttcagtcctaacatatataggaagtgatttcagagttactagcccatatttctgtgacaaagaagcctatatttggttagctttttgtctttagtttgagggcatagggactaaaactttatccaaaatgtccttgggttggttattctcttttcctaccccaccagtgtggtttgttatttatttcaggggtccccagtccccaggccatggatcagtactggtcagtgtcctgttaggaacctggccgcacagcaggaggtgagcggcaggcgactgagcattaccacctgagctctgcctcttgtcagatcagcgtaacattagtttctcataggaacgtgaactctggttgtgaactgtgcatgcgaaggatctaggttttgtgctccttatgagaatctaactaatgcctgatctgaggtgcaaccgtttcattccaaactgccctccaccaaggacccgccccagtccgtggaaaaattgtcttccacgaaactggtccttggtgccaaaaaggttggggcctcatgatttatttgatacacagtatgtttctttagttttggtttgtatttgtattcccttttagccctcgcttgttgatttttattgtttttcaagtttgtgaaatattaatatgttacaaaagtcagaactatacacaaaagaagtgtagtcctccctttccaccccattcctgcttacttccttactaatcccaggtttatcctttctgtaatttttggcatgagcatgcaggtataatttcctcttcgttcttacaaaaaaagaaattggtatactgttagtacatttttgtgctttgctttttttcacactacatcctggaaatcactctacatctgttcataggggtcctcctcattctttgtttcagctgtataatattccattgcatgactgccgtaaccattcaaccagcctcctgtgtatgtgggtgtgtaagtggcttctgatgttttccaattacggataatgctacaatatatattctcatacatatctatatattttcaaattattggaggcatggcttccaggtgaattcccggaagtgagtttactagatacaaaaggcaaacatgtatgtatttttaagagatattgccaaattcccttccttcatgttgtatgaatttatgttcctgtcaacaaagtatgcaaacacctgtttccccacaacctttctaatatagtgtgctgttttactttttaatttttgtaagaaattgtatttcagttgaggttttaattagcattttctcttattgtgaataagaacaccttttcataagattaatggccactttttacatcttgctttgtcagttgtctgtgtcttttgctcattttctgtcatgctcaacttttaagagctctttatatataagggatattagttctttatcttgggttatatgttgcaactatcttatctcagtttcgattgtcttttgacttcatggtgtttattgcattgcccattaaaattttttgtacggtcagatttatcaattttttcttttattgtttctagctttagtgtcatagctagaaagcctttccctatatccagattacagaggaatttgtccatgctttccttgtggtttcattttatctatttaggtgcctgatccatttggtgtttattcttgtgtattgtgtaagtcatggctctaatttaattctttttcaattgttgttctagcaccattattaaagagtcaatttttggccaggcacagtggctcatgcctgtaatcccagcactttgggaggctgaggcaggctgatcacgaggtcaggagcttgagaccagcctggccaacatagtgaaaccccatctctactaaaaatacaaaaaattagctgagcatggtggcgggtgcctgtaatcccagctactcgggaggctgaggcaggagaatcgcttgaacccgggaggcagaggtggcagtgagccgagattgcgccattgcactccagctgggcgacagtgtgagactacatctcaaaaaaaaaaaaaaaaagagtccatttttgactcagtgatttgagatccaaactttattttgtcctaaagtttttatttatttattttatttatttttttatttttctttatctgtactttatgcctttgaactgcttgtctatttataagccagtaccacactgcttagggaggctttatagtgtattttaatatctggtagatctatttccctagtagcttttctgttttattgttttccgggatattcttgcatgtttatttttatatataaaatgtaatactgtttagccccatataaatgcctgtttgcattttatttatttacattgtgttaaatttacaaatgtatgatgttgagttacacagtgtgacaatgatgtcttttcagttggtccagttctacttttgtgtcttgtaagagttttaaatattttcttatacaaattgtacacatttttaattaaatttattgctaagtattttatctttgttggtattgtgaaagaggttttctctaacatatccccttattggtaattgttgttgtgaatgaagacaatttgttggcttctgtatgctaattttatattctgctacattgctggattattttattatatgaattagttttctaattgattctctagggttctccaggtacctgatcatataatctgcaaacagagatagctttacttattattttctaattattatgtctcttattgttttgacttgtcagttacattggctaataacctcaaatacaatattgaataacagtggagatagtaggtatccatgctttctgatttttgtggaaaactgtggtgtttcttcatttagtaagatcctgtctttagaaccaaaatcttcaaatatgtgttaacaaaatacctatcaattcctatcttcctaagctttaaaaaatccattatgggtgttaaagtttgtcaaatgtttttgcagtgtcaatagaaataattgtgtgatttttctccttagatatattaatattgtgtatttttagtgaatttcctaatgttgaaccaaccttgcattcctgaaataagtaactacttggtcatgacatattattgtcttaatgtgatgtggagttgtgtttgttaatattttacttatatttacttataactataaatatttataagtattataaatataaatatttactactttgcactgatatgggtaagggatatgctctttcttttttaactgtcaagattaggtataaatatatacctgtttcataaagagtagttacatttttaaatgaaattttgttttccaaagtgaccatacactgtattatctgtagggcctagttcagattatttcttattagcttcataatatttttcttacattgacttcttcataacttttaaaaaatattttagttctagtccagttaggacgttttcttgccttaattatctattcagacaaagcagtcgtatttttgaccctttattcttccttcctcttcttcctaagcctccagaatgggttatcatcagagtctagaaagcagagtcacactgaaaatttcatcccagtttatagcagataaagcagggctggagccacttgcttatatgcttgtgtccagttcaaggctacacaggtggtgctttgaaggcttttgcacctcagccaaggcaagaatactaactgactgactgcacatgtgcctttttctgtcaaataatttggagaccagagcagattatttttataatatgtgtttctttttgtgtgtgtgtggcagggggaagagggtctccctctgtcacccaggcttgaatgcagtggcgtgatctcagctcactgcaacctccacctctggggttcaagcaattctcccgcctcagcctcctgagtagctgggattacaggcacatgccaccacggcctagctgatttttgtatttttaatagagttgggttttcaccatattggtcaggctggtctcgaactactggcctcaggtgatctgcctgcctcgtataatatgtgtttctgattatgacagtattgcatattatttattggaaatttggaaactacaagttgaaagtagaaaataaaatacttgcagtcctagcacccagaaataataaatacaggttgagtatcccttatctggaatggttgagatcagaagtgttttggattttggattttttcaaattcagaatatttgcattatgctttaatggttaagcatcccaaatctgaaatccaaaatgctccattgagcatttccttcaagttcatgttggtgctcaaaaagtttcgagttttagagcattttgaatttcagattttcagatgtggaacctgtattagcattttgatgcaatttcatctagtctgttttctgtgtgtgtatgtacagcatttatatcagttcatagctatgtaagtcatatgtatttaaaatccttttttccctcaattatagaaggactaaatgagtcctatctttgcaaatcatattagacatgattatcagttatgtgctacttaatatcataagcatttcctatatcatgaatcatttttgaaaaatttttaatggttgtataatttttgtttttactttttcttgttttaaacttctgacttctgtgaactaaagcacaatttctaagagtactagtatgttgattctgaaaggggtatatatattcaagatataatttctttttaatattgtcatcagaaagagaaataagaggctctcaaggctgtttgaggggcagggagagggtgatgggacaaaagaatattgaagaactaagcaaaagaatgtcagagttgccataaaacattaactgtgtacctgtgagtgttggagaagaaaagggaagtgcatatgtattccagttcaggtgagggaagacaccatgcatactcagaggaggggatggggagtcttgaggggagggggttttgcccagtgcaggtatagatgatagcaagggaaacattcacaggggaccaaggaatatcattgcagaaatcctggaggaacacagtctgggagaccaggaactgataagaagctggtgaggggcatggcccagtgttccaggagcagacagtggttctttcctcctagatttttctagaaggaccaggttaggtttccctttgggaccagtatgataggccttgggtgactctagggcaccctacacctcttatctccaaagaaactgctattttaaatttgaattattttaacttgataaaaacctatttctcaatgataagaggttcaaagtataaattcagaattaaggcctccctgtagtgctaattttatattgaagtataatccattcacttatggaaatagcttgttattaggccattctctctcttctctgtctcttttgtctgtctgtctgtctgtctctctctctctctctctctctctctctctctctctctctgtaacaggtaagagagctggaggcttaggacagaaggcaaattttaggcactaatattgattttctcttcttattctaaacagtggtgggtatattaaatgttgctcagcagccttaatgggtaattaagcaggttattttaattatctgtgtagttgacttttttgaataagacataataaaggattaattatattctacatatttcaaggatattgttttgttctttcagctcttatcttcattgtcagtgggcatctatagaagatctggaaaaagataagagaattcagcaaaaaattaaacgatttaaggcaaagcagggccagaacaagttcctttcagaggtacgacatacctgcttacttttccaaagtatttactttgttaaaatgttctaaatttaaaattttagttccatgaattaagaaaaactagttagtctcatttggtgctgtcaacttgcatattggtaactggttcttgctaacaaatttgtaaacaggaaatttctcattcttcctgttgcttaggctagaagatatgggtccttatgatagtatgtggaaatagcggtgatggtatgataaaaatcgtgtaatgaaagtacagttagcagatgatgaaattaagtaagtggacagaagttctattgagatttagcaggttaagaaatctacaatgttaagtacaagttctaagatacaaaagcttgacttctgttggggaaagtatgtggcaaatttcttttgttgaagtcaatgcctaattacagagagttcactaaactcattttcgcaaatgctgtgctgtagtgtagaaactggtaataatatctttgcctgtgtccctttatcccaggtatcagtatagaagtacagcaatacctagggcagagaagaacatctgcatttactagaagtgccagttctgccctctgcctcctcagtatagtcaattacattttttaaaaagtgctttcacaagctgcttactagggtctctggacttaggatcgccaatttggtttcacttacagcctcaagtagataaaagaaaaaccctaacattgaaagataagacttgctgatttattagttcctcttttcctaaaagagttgacagaatgtagactttatgtaaaagaagcgtacaatttgatgcaaaatagtatctgtttaacaacctactttgtactgccacccctttttggagatgaaggaaagtgggacagaagagcacttagtacttttatgtcataaaattcttatactatcaggtagcaagtctgtgttcttctgggatctgatttccatggtcccaactggcctatggtaaagtccgcattcaatgggagatcatgtggttgttcttttactggacacatgtctgcatcactacccctggcactctgagtgtgcagcatttttggcagtgcagtggttaggaccgagtggaatggagttactcgaatgtgactcaattcatagatcttggagaatattaagaagattcttcagaagaacttggaggaaaattcttttgaagaaagaatcttaatatttgattttgaggacaatgctgtgagattctatttttcatgcccttcttaatgaaaccagagttaaatttttatgacattggatgagctgaaatcattagcctccttttagaaagagacaccctgtgttctgctgaccttttctgtgggccagggggagggagacaggcaaaagcgcaatggtagctttccccccatccctaaatcctggtcctgtttattaagtttatttgtattctctctcctgtagtcacactgtctttaggaaattgtgcctagccctagctacacataccaaggttgaatgtacattatttacctggtaacttggcagctagaaatcttagtttctgtcctgagtgggagttagcagagaaggatagcaatccccttcctccctctcttttatacatgaaagtgcacacgcccccgtttgtttcatcccatacatgatcatggcttcaggtgttccatggctgtactgctttgagattttcagtttcagctgcttttacattctttgtttctccttaggctgccttacaagcctgctgcaactaaaaatgtctattcaaaaacatcatttagactggaaatttcgtcacatgtgtgatgccgcagattactcacttaaagggtagaaatgtgtaggaaaagttaaggattttaattcagcactgactgtgaaagcttatgtttaagaacaagttttcctaaagagagtttttgccatccaaacctagttttgggaaagtttaagtgtttctgctgtacatggataacacgtgtgtttacctaagtctagaagcttttgaaaagccagtgcattaatacactaatactttatattaattgaacatttcaatggatttttttttgccttactaatctacctctgtgtaaaagcctgagatacttgagacatatgtttgtgtttctgctttttgtttcataattcatggttcaaagcttcccaactgggtattttaagagggccgaatagccagggaaagtttgttgttcttgagcagatgatgactgaactgcttatcttttccacctgcaattcaagggataagaatggtgtctaagtgacttctagtttaccttttgcaaaatattttaatgcagttatgttattgataagttaattgagaggtgcacataataaaatgtgtcttttgttttctaacatctgaaacttgtctgaccctaacttcttttgggtatggcttagtctataactctttttttgagacggagtgtcgccctctgtcacctgggctggagtgcagtggtgcgatctcggctcactgcaacctccgcctcccgggttcaggcgattctcctgcctcagcctaccgagtagctgagattacaggcacctgccatcatgcccagcttattttttgtatttttagtagagacggggtttcaccatgttggccaggctggtcttgaactcctgacctcgtgatccgcctgccttggcctcccaaagtgctgagattacaggcgtgagtcactgtgcccagcctataacttttttttgagtcatattctagtgttttatatgagatacctttgcaggcagcagtattactttacttttgtaaagattgtttaatatattggttaaatgagccaattatttaggcttcatttcgttatccttaatacttttgcctaaacacactatattcaatgtaaatcattagaaaacagattaatgatgagactgtgattctaaatgaggtactaatattggttgacaaatactaccaaacattataaactctgatcatgctaaaatatgaaattagctgcttgcagtgtatttggcttttgaataacattttgtagatatgctataaggcatcggacaactccaggagttacaatattccaagtaacactttgcatgactctgattcttcattgcaaactgtagtttcgagaatgctaaatgcatcgcatgccataagccttttggattgctcattagtgaattgtaatttcacacttcatttaaaatattcttaaacattctctcacagtaaaaggtttcacacggtaattaaaagacccagttaacgaagtctgagaagtctgatttcctcatggggagtgcttttgctaaattgtagcatttcaattaatataatagaatttgccaaatgtaagttttatattgctgtgacccaaaatattattgcttggtgaaaagtggaatagtatttcatcttgggaaataagtaaacctttaacttttttttttccctttggtgtagattgaggatgagctttttaatccagattatgtggaggttgaccggataatggactttgcacgtagcacagatgaccggggagaggtaacaggagatcatttgtattacaaagtggtgattcaggcaacccatacatgtttatagagaagatggtagaatcctagacctggtcttggtcagagccttggactgtgacacacttggtctaaatttaactgaaacttaatgatttattattagttttatgacttaataatagtgctaaatatgttttatgtttagtctgagaacttttttaaaaaattgattttcatatgaaagaaatacattgacattttgcacaattccacaatatgataaagaattcagtacattttggtataaatctggcatgtagcacaaagtatccttatataatnnnnnnnnnnnnnnnnnnnnnnnnnnnnnnnnnnnnnnnnnnnnnnnnnnnnnnnnnnnnnnnnnnnnnnnnnnnnnnnnnnnnnnnnnnnnggatatttgatagggaagtaagaatgaagacaagtgtagtgacttctgaagtattgtgtcttgataatgatgtgcccacccaccatgaattgtgtccttcctggcttctccatgtaaattgaattttatatatacagtgtttggatcttgcttttctagggagggtctgcaaagaactctcattttcttccaaactctgtgtcatgacactctatgatgtttccaagaccatatctgtaacatgatctttacttttctaattttccttagttatacttcaaaaaattgtttcatagcatatttacattgtacaggaaatatttttcacatcacaactaggtcagtgttccttggtcctgaaatgaaggtcaacaaacccaagtgttttctagaggaaagacaaaggaaatcctgttgatctgcattacctgaaatattttgccctccacccttataaagctcaaatatgttattttaatgtgattggacacaaacagtatcactctttttaaggaaaaggtagagatcctaataaatttaagcgtatgtctcattttttaagaaaccagccaattatgtaaacattgaaatatgctaagatgatttaccatgtaagtctgaatcaaactcctgatgaaagatttgtacagataaaaaaaatctcaaattcagctttgctatttgctagctatttctttatactttttggctttcgaacatcacttaccaatgattttgataaaaggctaatttgttctgataatgcccaataatactgtttccagtttagacttgagactcttaactaggaacagctgtttatggccatagtttttaaatttctgtcaattcagacttactcatgctgggataatgtctattgataaatgaagtagagcatgcttttccttaatgtgtatgtaaatatacatgtatatgtatatatgtatatatataagcatgtatatacacctatgtgtatgtataagcatatatacacacatacatatgtataaacatatatatacatatgtatatgtataaacatatatatacacatacatatatatgtataaacatatatatacacacatacatatctatatgtataaacatatatatacacatatatatgtatatgtatgtatgtggtcaaatgaatccaattctgatttatttaaatctggtccagcctgtgactcactatctggtgaagtggtgttcacttccttatgaagacagcacgtgggagcggaggcaggacatagatcaagcaaagatcgaggagtttgagaaactaatgtccagggagccggaaacagagcgtgtggtaagaattggctgatggtagagaatttaatttgaaaatagcatagtggtgtggtctttgggaaaccactaatgggatttactatatttgaaacaggagcgacctcctgctgatgattggaagaaatcggagagttccagggagtataaaaacaataacaaactcagggaataccagttggagggagtaaactggctacttttcaattggtacaacatgtatgtaaaacaagtttttcttcacttttaaatatatctgtagttcctttcctttagttattgaaaataataaaaaagaacttaatgttttaactctaataagagctttttcaaaaaacaagcattgaaaatatatgtaatatttaataaatattaatacagagattgatataagtgtgtaaaaataatttttattctttgagaattttgtttgaaaatatattttgttgaatctaagagaacatctaaagcctttgggtatgcatttgtgggtacaatggtatatattttgtgaaatgacagcagtgtgtcatatccatactcattaaacttttgtacttcattttcctcctaaaggcgaaactgcattttagcagatgaaatgggtttgggaaaaactatccagtccattacatttctctatgagatatatttgaaaggaatccatggcccttttttagtaattgccccattgtccacaatccccaactgggaaagggaattccgaacctggacagagttgaacgtggttgtgtatcatgggagtcaagctagtcgtcggaccattcagttgtatgaaatgtacttcaaagatccccaggtaaaccttcacaggttgtattctttgtacttactctgtgcattttaaggtgttaaaaaaaaatcaaagtcttggtgacttgggaaggtctaaattttgccaaattgagaaatttgctttagatatctgactcaatttacatttgtattatctttctgtgtctatgaaaacagctcttcatttttatagctttggtttttctgattattagattagaaggaatgaaattttttgccttggatgatcactgaaatccatttaatgctttgatatgttaattagttttattttgcaagcctaagagaaaactaaacaaaaattggtaatattaaatgtgaatagaaagaatattttattatgctattgctagaagtgaaaaatagtaagcatgtaaaaagtccttgaaatatatgacacattgaatgaaacacatcccaagggaggaatttatgctttggctgttagtagcaattgctttaatttttttcttactctagttacctgtatgccattagtgtgtatcaacagtgaagtgttataaatgacatgataaggaagaataatatgtactaaaatagttttatgttatgggtagtaaatggaagtcctgtaaataggatctttgctatatatatgtttttgctatatatagatagatagatagatagatagatagatagatagatagatgtgtgtgtgcatgttctaagtataaaatctgacctacaattaaataactaaaggagaaaaaatattgaaatctgtgtttatctttagatttgggaaattattataaattctgtcctacgtgaatgtgtgactagaatgggtacgcttagtggtaattgatgcatgtgctctgttaggaaattagatccaaaatttactgacagttttctcatttgttttccaattctgttttaccatatcgtttaaaactgccaaaataacttgaaaacagaatgtatgtcacctaaaataaagagatctccaaagggataaatacgtatgttttatgctatttattcatccttaaagttatttatgtaaccattaatgcttaataataattcagagttgttcttatagggtcgagtgataaaggggtcctataagtttcatgccatcatcactacatttgagatgattttgactgattgtcctgagctgcggaatattccatggcgctgtgtagtcattgatgaagcccacaggctgaagaacaggaactgcaagctgttggagggactcaagatgatggacttggtcagtgaccatattggtgattgcactgaacctgaatagaattgttgctgacttgatagtcccgttgctcagaatttgatgcctgtaaacagtatttgaaaagcttgtcaaatattgtgatatattctctggcactttcagttattcaaaagttgttgccttttggattcttacattgttggctagtgtctgttaaacagttgtattatagcagagtgtaatcatgatagtttcactaaagtgagtttcaagtatttgttttaccctttgttcataaatacaggttgatcataccaaatacaaaaatcccagaatccaaaacgttttgagtacccacataatgctaaaaggaaatgctcattggagcattttggattttggattttctcatttgggatgttcaacccgtaagtataaatgcagatattccaaaatctaaaaatatctgaaatctgaaacactctggtcccaagaattttggataagggatacttaacctgtactgccatttcattaactgttgggccaagctttacttcagtgatgatagtccagttatttttcagtgctcataggttttgccatactgtggccagcaggacttgtagatgcaagttctcaatgagttgggtaggatatctggggttggtttagttcgcacagatgcttagaagtttggggcattacagtgcctcagatttgatctggagttttacaccacacttatcccatagtcttccagcttcccaagagatgatcaggtcttcctgattagattttctagatttttttttcagcaggagcatcatggaataacatatcgtaggagtagaaggatttgatttattttctgtctgatactgctgtgtgtgatttcctagtgggaattgcaacatgacctgtcatcctcaggcttcttttcactccatagtttatatagtggttatgatcacttatattttatttttaatgtacatttggaaagcaaagctcctgtcatttagcatgccttggatgatttgatgagtttcacggaagtacaaaaagggtttcaaagtatttttaatgctaatttctgcaggctaatttgatcttttgttaactgagagtttgagatgagaaggagtgttctgtatattcatggccatatgtttttagctgaagactggtattaccaaaaaacacctaaaagctttttgttgcagctgattctctgaaagagcagcttattttattcttaaagagattagaattgccagctatgcttttagtttaaaacaaacaaaatctagttttgcttaaaggaaaaagtctgactgaattatcctatttagggtgggatttcccatttttcttcctaatgaattattattaaagcgatcctaagatctgtctcaaagcagttgactattatttggtggccaatacacaaaacaagtgagagcgcttagaaacagtgaatagtctcaggggaccttggtaagcatatggaaaagagaaactctgtgtttgtatttgttcactccaggtgatacttaagcattaaaatgaagtaaacttgtatttgcaggtaaacactaatgcttgtgatataacctaaatatatattctcagtagggatccaccttcatagttttctactaagagacagttatgtcaccatttcctgaaggcttaaacagtcatctgactgaacttatctgagttgtgttctattattagttcatgtgttcccagatagtaaattcttactgtaaaacattatttcattggtgagtacacattaatttaactccatcaagatcaaacaatctgattgtcattgggctatttttttttttaatttaagttctagggtacatatgcagaatgtgcaggtttgttacataggtatacatgtgccatgttggtttgctgcacccatcaacttatcatttacattaggtatttctcctaatgctatccctcccccagccccccacaatctttgggctatttcaaagagttttctattatttatactaacatttgataaatggattagaatctgttatccaaataattttcctattacatattgcagtgttcttaagctttttcacataatggcacgtatagaaaatgatagtagttgaatgccacactcaggtaaaaagagaaggctgcccactgccacgggacaccaccagtcctgggtgtcctgaccttccccaaggacttataacctgtactcatccttgactcaccaactgggaagctctgattagcacatgaacaaaatatttatttttctaatgatgaagaatttttatttgagaagaaatgttttcaagatggaacacattattgttcagaatataattatgtttgtccaattctgaacagctcgttgtctggtctttaaatccttacttaaaataagcatcttgagaacttagccactttctactttttattctttcctagaataagtcacagtcaaaatagtggttagtaactatatccaactacggcacaggccatagggaactgctgttacctgcactagactcagttgcgatgaaaatgcgcttgatggggattatctccaagtgcattcccagaaaggacgaccaatgagtgtcttcagctctgcagacaccaaggaaatgtttgtgaagatgatacattgaggggcagtcaccatcttcacagtcctccacaggagctctgggaaagcaaccatctcgttgtcccccatccacgaggaggggatgctgtggagatcatggtagttcttcattgattctagtatctctttcattgtcaggaaacctaacacaaaagagtctgcttaaaatgaaattaaatggacatcacttcatcagagctaaaaagaatggtaacgttgtcaaggcaaaagcacatctgctagcataggtggaggtgataagctccatcgcctgagtttcttacctgatgttttgtgagactgtgcatagtaatcgtgtattttttaattgttacccactttcaaattgatacctagttttattccactatttgtaggtaactgtatgaaaggattttgtgtataatcatttggtgtaactaattgaagggaagctgcataagaaaggagttcctaatgctagatgacgagttagtgggtgcagcgcaccagcatggcacatgtatacatatgtaactaacctgcacaatgtacacatgtaccctaaaacttaaagtataataaaaaaaaaaaagaaaggagttctttccttttttcgaataagtttattttgaaattaataagttaaaaaggctttaacttttaaaatatttggttaagcagtcaagatttaatttaatgtcgtaataaaggatatgaaaaaactgggagacacgatatcaatacagctcaactactgcagtaactctttcctgaatatgtgatgggacttaaaaaaaaaagttcttgcatacagtaatccaggacttgggtatgtcagcgattgtggcccaggctatccacaagtgtggtgatactttagaaaaaaattgattgattgatccttactgtttatgaatttactgagtctgaagatgatggtcgtccatgaaacttcctcagagactttattcaaagggaagagaaggaggaatacaagcatattgaactccttcacctactttcaaagagcttcattaacagatatgacttggtagatattaagaaaattagcatgttcttacctcattcatctagtatttactgagcgtatactctgcttggcaaccgagacttgtcagattccaaattaagtcagaatattgctttctcaactactgggatgtataattactttctgaaatagttttgttagctgtgctgtgtaccaaatggccaaagtagaaaataatagggttcttaagattaatatctcactattgttaagactggccattgtaaaacagctcttctgtattgcatatatgaaaataggaagacagggtataactgcatgaggaaagctggggaaagagttcgtaaacaggaagaattaattaaagaaatacctaacttggttcaaagagacaaatttataaatagcatctgattaaaaaaaagtgattgtggtatttacaaccaagctgacctctttgctagttggaaatttttgcagaacaaaatagtttttcatatgctgttgcatgtagaacttcttttgtctctatgaagtgagtcatgcaggaagcagatggagagatgagagcactgttgatgtagagagcagaaagaagcatgcatgtttcatctgcgtctagggattctaggaaaaaaacttaactggtggggataaaagcattgagacttgggggacttaaaaagccgtgatactaaaatactgacctataaccccaggaagaaacaaaatggcaagacacatttaaggaccctgtagagttctggagaggactgtccatggatctgtctacctgacacagaaatcgtgttctaatacctctgttttcatgcctgattcctatactttgcatagggtagatgagtaggagtagaacaatgggtgtctagtgagaggctctggttttaagaaagtgtttttgttacaatttggttagtggctttccttgtgttacctcaggaacacaaagtgctgctgacgggaaccccactccagaacactgtggaagaactcttcagcttgcttcatttcttggaaccaagtcgcttcccttcagaaaccacatttatgcaagaatttggtgatctaaaaacagaagagcaggtatttatcagctccactttgtatttcagttataaaattgaagattagcccatgaaatggcaaagtattaagttattttaaagtgtgattatattacagtttttcccacctagtacacagaaccttagataccctttccttggactttccaggtcatcatcataaaggttttcttctttatttgtttgtctttttgctcttgtgaagggctgttgagatttatagagaggttacatacctgttgatgtaattttcagagatagctgtgctgtgcaggttggtagttttgctaggtatgtgtaattttggggatgatgtcagacgccactgacgttggtagacctgtttgcctgctgcagttttgagtctctgttctttgtgaagcatctgtactcagccacaccgcttacttcttcaagcctacatattttcactttagaaacttagggcataaccactgcacagtatttctgtgagaagtaaatgaagcattgtgtataaaaagtgctcgggccaggcgcggtggcttacgcctgtaatcccagcactttgagaggctgaggcaggcggatcacgaggtcaggagtttgagaccagcctggccaatatggtgaaaacccatctctactaaaaaaaatacaaaaattagccgggcgtggtggaacacgcctgtagccccagctactctggacgctgaggcaggagaatcacttgaacccgggaggcagaggttgcagtgagccaagattgcaccactgcactccagcctgggtgacacagtgagacttcatctcaaaaaaaaggaaaagaaaagaaaagtgcttggctattttatatgctgtaagagttatgtgggcattagttataatttgtgtgctgtatttgaaataaataacggagatagacttgaaatcttggtttttacgtgccccctccgctgacttactgtctaaaacctgttagctcagttcagggtaaggtctgttttgtttttcttttctaaaataaaaactgtatggattactcagttctattgccaatcaatagaaaagagaaccagggagagacgtctctgctggctccttagtgcagggactagattgctcctggctcacttcctctcattctttagctctccctagaaaggaagagaatagaaacagagcattgccatgacattgtcttgtccctcttctctatcttccctatggcttaggacaaacagaagggaaagctacatgaatcagttggatttctcctgctgggtacttttcaagccttctggctgttcagggctcctggatgggtgaaatagttcatttgacataaaattatgcaaccttcatgcactgctcttatgaaagctgagagatgagctccttcatactctcactgggctttgaaaaatgaaaatggatgtttaatgaatgagataatcctgatgtttcatgttaaaatatgttttaacttgcaagcaaatcatgacactagtatttacttaaggtccttttttaggtgcaaaaacttcaagctattctaaagccaatgatgttgagacgtctcaaagaggatgtagaaaagaacttggcccccaaagaagaaactattattgaagttgagctaacaaacattcagaagaaatattaccgagccatccttgagaagaatttcacatttctttccaaaggcggtggtcaagctaacgtacctaacctattaaacactatgatggaattgcggaagtgctgcaatcatccgtaccttatcaatggtaaggctgccctgctcgcgaacttgcttaagtgacgattgaagcaccagaaatccctttctgcccccagactggggatttcatggtgtatagtcattcctgtctcctgtccactcagcatgggtttcaccagcttcccactttctgtgatgcctccttctgtggttgctgaaggtgagtgaccattgccccagcaatccctgaagtggaatctcaccttgcctttctcctgacctccctgtgcttgaaaagaggcgttagtgttccagggctagaagtcatctgaagtgctaacagccaaagagaaatgagcccctaatggaggttttcttggggtgtgtgtatttaaatcagagatgttaaagaggaacttaggtgtgagcagacagctatcagctgtctcaagcctttgatagcaaatgtcctcatcttcctctcagtccagagtcatctagcacctctatcctctgagaacaaaaaaattaacttaaagctttgataatttatggccctcctcttttcttaactaaattcatagtgttatgtaactcatggcttaaaacctttattatgtatttttggaaatcattaaggtaataaatatttcatgcttatgttgtataagatactctggagaatgcaaaggtaaataagaagggagcattcgccacaagcagtcttcagttagctgagggattgagattgggggagtctttagaaggagatggtctttttaggcaagtctgcaggggtagaaaggattttgcgaggcagagttagaaaaagaaaagatgtttaggctgaagtaacgatacaagcaaagagagggggtcaggaaaacaatgaggaactttcccaaagtaaaaggcacacataagaaatgcaccttagacatgcttggatcctgctgcagaattccttaaaggctagtgcatggaacctccactctactctgcaggcagtgaagaaccatgactagtgtttgagctgagcattgattagaaatatgattcagggtgatgcgtcaggcaacactgcataaaaaggatgggaggaggaaagacagacaagcagaagaaccagctcagaggctattgtattctgggtagaagttaatgtgggttannnnnnnnnnnnnnnnnnnnnnnnnnnnnnnnnnnnnnnnnnnnnnnnnnnnnnnnnnnnnnnnnnnnnnnnnnnnnnnnnnnnnnnnnnnnnnnnnnnnnnnnnnnnnnnnnnnnnnnnnnnnnnnnnnnnnnnnnnnnnnnnnnnnnnnnnnnnnnnnntccactcctggaagatagtcttagagtgttgcacctgggatcattggtgtgatgcgacgaatcagtgaatttcttttttatatatatatacacagtttttttttcttgagataggttctcactctggcgcccaggctgtagtgcggtggcacgatctcggctcactgcagcctcgacctcccaggctcaagcatccctcccacctcagcctcctgagtagctgggactacaggcatgcgccacaacgcccagctaattttttttgtattttttgtagagacggggtttctccatgttgcccaggctggtatcgaactcctgagctcaagtgatctgcctacctcagcctcccaaagtgctgggattacaggtgtgagccactgcacctggccagtgaatttctttttgtgcttttagttttgtcttctaaagagagtatcatgtgtgatgattatgtatctgatactgccaatctgctaatcacagtatgtttagaagcttgtgcagccgttacggtgagtgttaactagccaggtcttgagttggcgagacagagcttagggcaactgatggagcgagatgaggacacgtgtgtgcatgcactgtgcacatacatgtgtttgcatttaatagctggtacaaaagaaaataaataatagcctccaaggggaaagaaaagaaaaggagatacaaaagggtttgaatgctaccagcaggatgtgtgtgaaaggggagatctcagcaatggtagttagattgacacccccagttccatcaagtttaccctgtttggtcatatgttaattatatgcattgaacattgtgggttgttttcccccaaaacacagctggtgtgtctcttcctttgatgattgctttccagggtcatcctgtatagcatatttgttcgcgaggagcctcttaggactccctaaggcttggcagatgtggcagttgtcctaattggtcacaccttgaggtcagcttttctgtcctgacaagaagtgtctgttaagcaggtgtctttgtccctaaatttggggaagttatagtgaaaaagtgtagataacatacaaactaagcgcacgcagctgcccagataacttacgcagacattgtattgtgtagaggttgctccagggccagtactgttcattctcatccacagtctggagtaaaaacatatatccagcatttaaaaggaaattctttaatttgggagattacattgaaatttgaattggttgtggcagagtaaagaagcctcaatcaacattcaacaaaacacatttccaggattatgaaaaatagaagcaattttatatgtatgagttgaaagcttatgtatgagttattagctcaagctttatttcaatggaatttccaatttttaggttttgcaatgtgaagttaagaataatgttgaaaacatgtccaaggtaccctgctggttagagctgacttaagagttgttgctggttattgtttgaggcaggaggcgtgtagaggaagagtgggcaaaaagaaaacacgaatgaggcttacgtgatggagtgaatttcagagagaaaatagtaactttttttttctggtaatcgtcaagaacaaaatattttcttgtttgttcgtggcttttatatagctagaggacattgcagttactgtcccgacagtgaccatctgttgaagtgaaaagacttcaagctgtaagtgaatgcacacttgtttcaagttgtctttgatatacacactttccagtgtagtgccagccatacattaatttaggacggaaccaacaaagtgttttgggttggcatgacctatttccagttaatttttggattgatgtttacaaattgggtatcaaacattaatttgtaatcttgaaaatttagctgtgatatcacaagggagcagttgctttcctccctaacactcttcccaccctctttccttcaatgttgccacaataaaatgtcaagacaatcatataggaaaggtgtttgctgatactgtttttaaatgaaatattattagtacaaactggctgccagttgtaagaacctgaattcataacagagagctgaattaattaattcagaagtagcttttgtcaggtaagaaagaatgcattttttttctgactattctttttgatagtataaaaaaggcaaaaattatttttttaatctctgaataaatttaaaattaaaattctctgcaaatttgactgaattatttgttaaaaaaatttaactgaaacccaaatatctgatgtttattttgtcgaaatgattatttgctttttgaaaaatattcgttggccattaatttgttttaaatggctaaaatactatattttatattgtggattttaacttagtatggacaaaaaataattaaccaaatgtcataagagtaaaacttattctgaatttcagagcttatgatgtattgtacaacaagaatacacttgaaagatacctaatgtaacgtgcacttaaatctgtttcccctgtctcttgaggggcttgtcctgaatctagaagctgggtttctaaatttcatgttttaaaaaatatttaactttattcaagaacattcttgctagtgcccttaaacagcattttgctctttactcttgcatttattttccatacttaaagaaacattctgaatattagcttttcattcacttggaaaaaggagtgagggccagtctgccttcataagaagtcagtgtattttgtggaaggccttagtgcttgggaagacattaactgactttaatctgttctcagtaaattatttgttgattaataattaataggctgtatttctgcatttgaccatgtcataaggtaatttctacatgcagccttaaagtacagataggattgcacttttgttacatctgtgcttgttgcagcagtaccatgtgagaggctgtggttgtctgtcccactgacccaacctttaaagcctctttgaggtttatgtatccccatcttgtgtatagttagttcacatgttaaaaaccagtggtaggaaggtagttttaagtttctggcacagttaaagtctaggaaacaatcccattaagatgaatgtgtgtgtttgtattttctgaagaatagttgagcacatcctccaccttcagggaaaagagctaaacacaacagctatgtcctgattaaccccagaggcaggaggaggtcagaccaatgctgcgtaattctagttaagccacctaagcagttgaaggaagcttagcctgctgcttcctaaataagcgtgtgtcaggcagggatgtcatgggccatctttccttaggaagatgtcatcttcttgaggcctctttccaatgtacccaagtctttggaccagcaaaaatccatgtgggggaaaagaagggtttaagcatagaagtcttatgtcaaacacttaaaggtttgtttgtttttaattttaaaagatttggatagttcaagatagaatttttgtatcttaggaaaaattaccagatgggaatgaatgtggagggagatttagagattacaatagttgtatgcttaggtcccccacaaatattccaggaaattgtcctggaaataaattcctctttttgtagttcctttgcctatattaatatgcaattatagacccaaactactattgctcttacgctgtaattgttaggactctattcctttgttttttcatttcggaacagattttgttgtttgtgtttatgttcagctagtaaacatttcttcatttctttagcaatttaggttccaaattttctgtaggtatctggcccttggcttgtttctgccacttctggcttgacagtctgttgttgaaattccgtttttacagacagcaaacatttgtttgttgaaaaatgtggttttccccctaaatgcctcaatgtgttgtgcttaaaacttttaccccttttgtacatccacagttttgtatagacccaactatgagtaagtggatggattcttgttcataagcaggagtttggtgttctggttcctacagtttgcaatgggttttgaaagcaagtgcattgtttttagtaataaaaaccttttacagtattcacgttatgctgtccaatctctgcaggtgctgaagagaaaattttggaagagtttaaagaaacacacaatgcagagtctccagattttcagctccaggcaatgatccaggctgctggcaagctagtgctgattgacaagctgctgccaaaactgaaggctggtggccacagggtgcttatcttttcccagatggtgcgctgcttggacatactggaagactacctcattcaaagacggtgaggaccaccatatcagaataataaaaaggaaatctaaaattaccttcacaggggtccaagcagtccacctaaaagtggaatctatgataaaggggctagaatgggggaagtgcatcacatgtcatttttaaaactatagatgtacatgatgattattttatatgatgactacaggaggacactgcatacttttttaggcaattttatttccccattgcctttatttgagtaggggagaatagttcttacttaaaattgaaattatttgttatcttactgttataggtgtcagctgtttttagaatttaactatttccctggagaggaagtaaaataaaatttaatctttggtcattcaatcaattatataaaaaacgccaataaaccctatttgctctgagattagttctgttaagtcatattagtctttttaatatatattccatattgtaataattaaaaattaaaaaaaggagcaagtatgttgtcgctatgcgtcaggcctccttgttcacactgatgttttctaggtacccatatgaaaggatcgacggccgagtaagaggcaacctccgccaggcagctatcgacagattctccaaacctgattctgataggtttgttttcctcctgtgtacaagggcaggaggtttaggcattaacctcactgctgctgatacctgcatcatctttgattcagactggaatccccaaaatgacctccaggtaaatgcacaagaaagtcctgatgcctttaaaaaggaagtcattctgcttactatgacagagagtaccagtcagacccataaattaatgttgcgtcgtcactcaggctgtgtcctatgattcagagcaaataaccaactagtaatctgttgattaataatgtgagaagaaattttttagttttaaccttcttctaaactgcacctctatttattggcacatagatagggtcttagaactggcagatgagtcttgtcattctttggtagccgtcttagctcaggtctccttaacaaaataccataaattgggtggcttaaacaacagacatttatttctcacagttctggaggttggaagtccaaaatcagagtgccagcagagtcaggttcttggtgagggccctcttcctggtttatggacagttatcgtcttgctgtgtcctcacccagcttaaagagagccagctctctcgcctctttatatgagcagtaatcctgttcgtgaggactccaccttcatgacctaattacttccctaaggcgccacctccaaataccatcacattggaatgagggtttcagcatatgaatttggtggggagacagaaacattaggttcattgcagtaactattaatttcatttttcttccaggctcaggctagatgtcatagaataggacagagcaaatctgtgaaaatctacaggctgattacaagaaattcctatgaaagggaaatgttcgacaaggctagtttgaaactgggcctggataaagctgtgctacagtctatgagtggaagagaaaatgctaccaatggggtaaaaccacccttgcccaaaccatttatttattctggcactttcctttatttaactaatagtaagaaattactcagcctttgattatttttcgacctcaatattttaagtgtattttgtaacactttcctttgttataatttaggtttactctctttgagaaaaatgcagcatttgtttagtctgcaaacctcttaattttaaattattttgagtattttaaatatttctctaaaacaggtacaacagctttccaagaaagaaatagaggatcttctacgaaaaggggcctatggtgcactcatggatgaggaggatgaagggtctaaattctgtgaagaagatattgatcagatcctcctacgtcgaacccacaccattaccattgagtcagaagggaaaggttccacatttgctaaggtgtgaatcgatctaaagaggccaggttttccatagaagcatgacggagttcatgtgaaaagtaccttgtaaaagtgcttacaagatgcattgggaattaatcaaattaatcattaactccctgtggaacccctggcacatgaagctttctttatgctttggtttatcttctgtgtacctgccactggtatttgccctcaccttgtcatccttgtatctgcttcccagctcctgaggctaatcgctcacttgtgttcttgactctattgtctccacttctgagatcctgctccgttggcatcttccttctctccccagatcctggtttttgaaacagcctataagaatgatcaagtcactcctttaaaaacacctcttctctattttcttctttagctaaatctccatacataaactcttcagagctaaaatccacacaaacgtaatctactgcagcctctactgtctccctttctacttatttttcagctttttcagcttccagcttgcacctgttccctgcctctctatcagagctgctctggccagggtcaccactgagtacaccagatggttccacctgagagccccttctgaggtttcacctgcattttgttctagccatctcagtgaggcccactctgtacttttatttttaatgactttattgaaatgtaattaactgaccatacaattaacctgtctttcgtgtacaattcaatgcctttaccatattacagacttgagcaaatattgccacaatctaagtttgtaacatttccatataccccagaaaggtcctcatgctcattagcaatcattccccattcctatccataccagtctgccatatctggaaagcatgaatctactttctttttctacagatttgccttctctggacagtggacagttcatataaatggaatcatatgatgtatgatcttttgtgtctgacttcattcacttagtataatgtttttgaggttcatccatgttgtagcatggatcagtagttcactcctttttattgctgaacaatattccattgtatgggtataccacatttacttgttgataatggacatctgggttgtttttactattggctattatgaagaatgttgttatggatatttgtgtacaaggttttgtatggacttgttttcatttctcttgggtatataccaggagtggaattgctgggtcctatgttaacttcatgtttgactctttgaggaactgccagactgttttgtaaagtgactgtactagtttccttccaagtcagatagtaagaagtatagatgaggatatggaggaaatggaactccatatcctccccaatactttttattatctgagtttttagttttagccatcctaatgggtgtgaggtcatatcccactctggtttttatttgcatttctctgatgatattgagcatcttttcatgtgcttattggccagatgtagatcatctttggaaaaaattctattcaagttctttgttcattttttgagtttctttttattaatgtttcagacttaaaatatgttctgtatgaaggttctgtattaatatgattgcagatattttctcctactctcttcttaatagcatataattttaatgaagcccagtttaccaaatttattttatcgcttgtgtttttagtgcattgtcaaacccaagctcacaaagatttatgttttctacagatttgcctactctggacggtgggcagttcatataaatggaatcatatgttatatgatcttttgtgtctggcttcattcagttagcataatgttattcactagtgtaacttagattccaagatttatagtttttaactcttacattttggtctgtgatcccatttggatagagttttgtgtatggtgtgaggtaggggtccaacgttcgttttgcatgtggctatccagttgtcctagccgctccaatctggaaaggctcttctcctgtgggttttgagacccacatcttctcctttacatctttcagccttgtgtcagattattttctcagagctcacaggcactgtgtattcaatatgtgcacagccaaacttatcacccctgtctctcctcctgcccctatctctgtttgtccacctgactgacatcattcagatgcctgagatggatgctgaggtttttctggcttccgcttctttcatatttcacttgtacccagattctgactccattgattttgccttttgttttattttatttttgggatgatatctcactatgttgcccaggccagacttgaacacatggctcaagtgaccttccaccttcagcttcccaataattttaccttttaaagaatatgtttctttttttttttttgacagagtcttgctctgttgcccaggttggagtgtagtggcgcaatctcggctcactgcaacctccgcctcctgggttcaagcaattctcttgcctcagcttcccgagtagctgggattacaggtgtgcaccaccatgcctggctaatttttgcattttttgtagagacagggtttcaccatgttagccaggctggtctcaaactcctgacctcaagccatctacccacctcggcctcccaaagtgctgggattacaggtgtgagccaccatgcctggcctaaagaatatgtttctaaaccaccttcttttctccattttgttatttcttctgtaaattattacagtggcttcttctgctgtgttctgacctccatgctccaagcattggtatgacctttccaacttgtgactctggttatgattgtgtccataatgagattattcctattttcaaatagttcctggttccttcgggatagagttcaaactctgttaactctgttaacatatacagacactgcttgacctggcttctctctccctcaccagctcgacctctggctcttcttccctgactacccttatcccctttactctctgtgccttggcacatgctctgctgtgaacatttccacatgctttcctgttttataaatgttttagaatggttcaggcatcattttatggaagagacttttcttttcggtttccagcaacaccctgcctgaaccaggttaggggcccctcctctgtatatcacttgcactggtctatacacttgctccctatcatttatcactctgcagtgtaattcttggtttggtctcaggccctggtcagtgagctgcctgagggccagtctgtcattctagtcccatctactgtagtgtctggcataagtggaggaatgcacaatatcggagcaaatacataaacaaaagctgctttacattctgcttctgagaaaggcctctcaaagtaatgcgtttcttttttctctttaggccagttttgttgcatctggaaataggacagatatttccttggatgatccaaatttctggcaaaagtgggctaagaaggctgaattggatattgatgccttaaatgggagggtgagtaagaagtcccattcgaacacctatctgatctaaaccaagagccactctttgagaaatgtcaaatgtatctcctcttttattattagaacaacctggttattgatactccaagagtgagaaagcagaccaggctctacagtgcagtgaaggaagatgagctgatggagttctcagacttggaaagtgattctgaagaaaagccctgtgcaaagccacggcgtccccaggataagtcacagggctatgcaaggagtgaatgtttcagggtggagaagaatctgcttgtctatgggtaagtaggactcactacgtaagatagaattttattgtaacagtagttagaattcccaactggtagagaaaaactatatttgtgtttgaatttgtgtgacacccctttgcacagtcaaatgaatgcttctgcagtaactttacagggctttgaagccatttggttaacataatctaagttgttcagatgcttctggttcagaggtcacctgaagttaaggtgcttgtgtataccttaaggaattatgccagatctagagttacatgttgattattaataattaagaacaaagtgtcaaaattatgtaatcttttctcactttacaagctttgcataaaatttatgactgtcgtaagcttttaatatttctcttataaaaaattgtcaaaggcagtaatctcacttgttaaattcttccttgcaactcatatgaaacatgaatggtcatttgaactttgtgaaagtgttgtatttttcctgctggactataagtttctgaaagggaggatccatgtccaatttatctctgaatcactgtgatgcccaaagtggtactttgaatggcagggtgctcagtaaatatctgaattggtcaataagagttctctagcagattgtgggactacaggcaactcctgttaaaaaaaaaactgcagctagagtaacctttctacagatctgatgacgtcctgtcttggatgatttcttccaatgaattaccattagtttcagagtaaacacaaacatatgctgacatggcatccagagctcttctgggaccttgtcttctgttggttctttcccatgggtagtccaagcttctgttaggacagacggcttcatctccttcagtgcgccacgctccatctcatctgtgtctttgcacaagctcttcccactgcctagaggaccccccacttgcacctccgctgggaggtgacctacctcccttctgctctccgtgggtgtccgacgcaggcatcagcttgtgctctgcaactgagtctggcctgcacttcccatcacactcatcatgttgtttacaatttttgagtcgcctccctctttcagtttgcagctccttgaggatggaagctccttcattgtgccctcagtgtgtagtgcagtgtgagcagacacacagtgctgataaatgcttgttcaacagaagtccatcattatctgtgaagctggacatcctctcttgtctcttcttacatggggcagagactcaccccctgcgtcccaaaagcccttccccgcaaaagccctttgctacccatgcctgctgccatgtttcagcacaatcatcagatttgagagttctgtgggtaactttaggaatggaacacatgaataactcctacagctaagaagtgtgcttagcgcagattgtctttcagtcgagcccttccctcttcccatagttgtcactatgtactgaacacctatgtgctgggcactgtctaggatcctctcagtcactaggggtggagctctgagcaagacagtcatggctcaggcaggcaggtgagcaagtagaagtggtgcagactgtgacaatactgtgacagggaagcactctgctgtggagcatagagcctgtcagctcactgttaagacacagctccagtgttgtctccccacttctggggttaggaggaatgaaaggaggaattccacaaaaggtggcatgtacagcttgtgacttggtggatatcacaaatcagccagggtaagagggagtgctggggtttgggtagggaagggaagtgaggtaccggcagatagagcagtgtgttccaaggcctagcagtgagagctagccctgtggttggagaaacttgaagaagttcacaggagccagagaggaccagggagtgacaagagaccaagtgagaggcagggcctgagggaggatgtgcgctgctctctgctccaaacacaactctcagtctgcagcagaggggctgttcataccatgagcactgccttggtggctcagtctgctgtcgcctgggagaagacatggctcacatagcacctgctgctgcctgcccccgtacctatttgttgtgtggtcttactccatagctcccagatgagacagcacagcactgtttagcctgggattataacacaaaacaggcagtcagtccccatggtgtgttgtctgtttgcttctgtcttctgtccatagtcgtttctcccactcatttctcatgaggacctgagggttggcagaatatcttgcctgtgatggttcttatgcttggggttattactccgtttcaaaaggaacctcagagctttccagaacctttcaccagtgactgtggcatccccttagaggtgggttgatgcggccatactgctcagcatcgcatccttgattttggggtagtcacaccttttatcttgagttgccttttgtctcagatggttggtcaacatcaaaatgtactaatcatgacagtgtgaagcaaagtccatgatttccaggccctcggatgcactcatgtcctgaaaattgctgctacagccttcatgtacctggaaaggccagggttagctttgtgggtgttattcttgtggcagttcaactcatgcgcttagaagcagtgaactgaggggcagcttactgtataaaggagtgtttttaactcttgcaccctggatttctttcctatcacccagtgtgaattgttgctagttttgacccaggatttcccaacgctggtacctgacttaaagtaaagccataaatcaaaactcacaggcacctctgcatgctggatatttgctttgcagttggggacggtggacagacattctttcccacggacgctataaacgccaactcactgagcaagatgtagaaaccatctgcagaaccatcctggtgtactgtcttaatcattacaaaggggatgagaatatcaaaagcttcatctgggatctgatcacacccacagcggatggccagactcgagccttggtcaaccattccggtaggtctccaccatgctgtttgtgctacagggtcacaaagccaccaggaacttttgtgacacactgttgataaagagatgtgacataaaccccatatttccctgcctcgtgcattaagctctctgccattgacactataattggaatgtaaaaggcttctattattattatgatggtgattctaggtttgtcagctcctgtgccaaggggaaggaagggaaagaaggtgaaagcccagagcacacagccggtggtgcaggatgccgactggctggccagctgcaacccagatgccctgttccaggaggacagctacaagaaacacctgaagcatcactgtaacaagtatgttattagagggtggacctggagagcttaattccctttttattctttaaaaaatacatgcagccggcccttcacgtctgcagatgcagaactcgcagatttggagggtcaactgagggacctgagcatctgcggatcttggtgtctgaggggggtcctggaaccatactcccgcggatatggagggacagctctgttattaagacttttaaatggtatagttattgcctttgcacagccttatcatttttcttgaaatgtggtgtcaagttgcaggagagcatacctttaggtgactgattattttttaacatggtaagatacacaacacaacgtttaccatttttaccatttataagtgaacaattcattggcattaattacactcacaatgctgtatactcactatctgtacctgaaatgtttccatcttcccaaatataaacactgtatcaattaaacagtaacttgcctggcccctggcaatcaccattctactttctgtttctattagtttgtctattctgtgtatctcctaggggaatcacagattatttgtccttctgtgcctggcttacttctcttaatattttcaaggttcatttgtgttacggtgtcagaatttcattcctgtttatggctgaatagtattccattgtgtgtatatgccacgttttgtttgtcccagtcatctgttgacggacacttgggctagttatcatggctgttgtgaataatggtgctatgaacattgtagaggactggtttttaaccagtatcggttagagaatagtagtcagcattatatgatcccactttcaactaactgcgtacagtggagggaagactggggagttcatgtattattttttgcttaatattacctcagttgctgggtccattttttctgcctgtgagcttggaatcatatttcttacctttatttccaaaaactgattatagataattgaagaatattgaaactaaatttatttcattgcttggggttctgttaacagttcctattaaactaacatctgcatatgttgtttccttattctgaatatgcatttttccgtatcactagttcaggcaacaatgctactgatcagctctatgtcctagcttcgtgtgaccttgagcaagttattcagcctcttgaggactcactttgctggtgagtccagtagacctcggcagcaagatctcaactggataaggcaggatgtaaataagtatgcatttctctttgtaaaagtagcagcaacaaagtctgagcacataatactggcagcatgccaagcgctttgtatggattatctgtttgaattgtctaagattagtatgatttttatccccatttaactgacaagaaaactgagactaaagttgagtaacctcctcaaggaccctcagccagttagggggcagaaccaggtttgaacccgagtagatgagggcagcctcagcttggaagtcttccctgctccttggggctgtggtgaggctctgaggtgtcttcagaaccattacctccaacccttttggtatctcagaaacttggtggttactgctgtggcataagagtgctccctaaaatccgaccccacttacactcttagaaaatatctggtcagtatggtacagtcaatgtttaatctcatgagttaacaagagaaaaaaatctaaagaaatagaaatgagttatccaaagtgagtctcttcagggatttataagctcacacttggcctatccagaacccatgctggccgtgagtaggctcgtggttgggggagggcctgttgaggagcatctgttgatgtgtgattgggagttgtctgttctggtgaatcctagttgttattttgaagttttagggacagtttccataccctgagaacagcatggtgtagtagagcctgaagacctagttccagttgtgccatgtgcaaggtaactctggccttagatttgtcacttatcttctgctaccatcagttttcccatttgaaaacggaaattataacttgccctgcttcatcatagggttatcgtgaagatcaaaagggctagtataagtgtgagacattgattgtaaagtgctgtacaagtacatgatgggattattcagctggggaaatagcatttgtattaccatgtactcatggccaagaaggctgcgattcacgtatcagtcctgaatgcacaccagggctgtccagcaggggatgctagctttggtagacactggcttttgggacttaccaggtggactttattgaaagaattatgttttcgccattgagaaactccatgcaggactgaaaatctagttcctagaattccaagggttttaaaaaatcgatttcttgagaatgattaagaatgtcagtgaattggacacattttaattttctaatgtttaatttttttttcaagctactacagcttaggttcccaggtacagtaaactagaaggaataaaaatgtctaacatagtatttcatacaggagaagagcaaggacacacctttctaccccaccctgtcgccatcttcctttctcggaagcaaagttgtataatctgaaaaacctgacattccatattgagggtttattgtaaggtagtaaaaccagattttatatctcatttattcctacaacttctgatgtgcttccaaaaatggtattaaggcagcagctgaggaaattttatgagataatgaagcagaacagttactgaaagccatctgctcagttgtttacaaacttgcttcaatacttcagaggcaatggtagggtacgtgtctaaacttcacaagctgcactaggtagaactaaatgaagtgcgcctgggctgggctgagctcgggccctctctgtgcagtgtgagcggttgccaggcaggcctgttggaagccagcagaaagcaccacacagaggtgattatgtgccaccatctgtcacgcttcaagcctaccatacagcatggctaatcagccttggcaggatgatggatgaacagcagcagctgccaaaagccactgttggcaaacagtcctgaagttaagaactttttcccccctctgtcttcctctccagggtcctgctgcgtgtccgcatgctgtactacctaagacaagaagtgataggagaccaggcggataagatcttagagggtgctgactcaaggttagtgcgagctcacatttgttctcaacctcagtgagataatctgggtagccggaaaacatcatggattgtgtttcagaaccttcataaaccactagtaacccatctccttttttgcatcttgaatgcagtatttgtccttcgtgcttggggatgtgatgagaatcaggaaaaggctgtttgcatttatgtttgtagtgtaaagagatgtgaactaaagcactggtgttctgagatgacccttaaaatgggataccatgtgataaagttcatttctggtcatggcagagggctactgactcatgccctttcttttaaccttgctgatacctccccaccatgctcagatgtttatcgtgggagagagggcatgtgagctatgtatcacattcattacttggaattcttttttaatactaatatttcttataaatgttgtctttcagtgaagccgatgtgtggatccctgaacctttccatgctgaagttcctgcagattggtgggataaggaagcagacaaatccctcttaattggagtgttcaaacatggtaagtgacgtttctgtttgaatacatctcaactgtatggcttggtctttatttagaactctttacatactcttttccaaagtcataatattaatgaggatagttccaaaggactcttggcgtctaccatttttctgtactaaaaatctaatatgaactgtaaatatcagatgctgtttttgaatgtttgttgagcatttgagaagaaaacatttctttcttggctgtaaataaaacccaaaccatatttgttttaataatagccaagttgtactatagctctccctaaactttgcttccagcgcggcttcccttgctaactctgccaaccagtgtcaaagtggacggtgggcttaacctctgctattaatctgtacaagtgcctcctgggctttgttccaagcaatatttcacaaatgtcagtgctgagaactcgcggctcccctgagtgggatgcagccttgttaactttgaaaggctggggatgcagaactggcatgatatatacagtgagcgattcctgattataatcccaattctctggaggtcgcggaggtattctcagcagcccagcctgactaaaggggagaatgatggcttataaaacctttcatgattacagtttggcttgcggctctacagcagttaggagcggtgtgttgtagtacacatcctaattgaattgtgctgttctgcctatgtactgcagccacattttgtgagctcagcctcaaaatcattttcccgcagtgcactgttgggatctgccattttccatctagtcaacttgggcagtcaaaaagcaaattgcagtttgaaaaccatagagggaaccgtgtcatcttactgacatgcatcatcctaaacctaataagacaggttcgctggccttatgtatatggggatttttcagccagccatgcgagttcctgcaggactgatgctattcacagagtggatgggggtggactcagtgcacccctgcagaggtcataaaggaacattgcgaatccttctaaatgtcaagcaaaattagatctggggaaaaatagggtcagaaatcctcccaggcatcttgcagttattctgaacctgtttttctattagtgtttgtggtaattctgataatatccctgaagtgtaacttggctcccagtagcttccctagaaggagcgttccatagaatgatctactaaaacaaggtccacttggattcaacagagatgctaaccttgactgaaaaacaaacttgtgttgtggcagtgctgtgattttgccagtgatggggcctttctttgtttctgtgtgttttctgtgcacggatgggcacggcacaggctatgagaagtacaactccatgcgagctgaccccgcgctgtgctttctggaacgagtcggtatgcctgatgccaaggccatagctgccgagcaaagaggaacagacatgctagcagatggtggtgacgggtaagaaggacattttaaaatttgaataaactttatgtcagtttcacatctattggcagggttcagttcttaccctgcagtacacactgtattgtgtctgatttgaagttcaggagatgtttaccagtctactctatttgtatgtcgtaatgactgtttaaacaatatacattatcttgataatctgaaacttgtttttcttttccaaatgtcatttcccgcaatctccccagaccccctccaccacactgccatggctgcatgttttaaatactgatagagttgcttttgatgtcaaacccataattaaaagtagcactgggcagattattactctttcctacccaccccccttccttcttttgcttatcagtatgattcaaataatttttgtgtttgttttacataggggagaatttgatagagaagatgaagacccagaatataaaccaaccagaacaccgttcaaagatgaaatagatgtatgaacttgagtatattggcttttatagctccattaaaatattatatgcccacataagacttgttaaactttatagataatgaccttttctttaaaagacaaagaaaaatgagaccccaaattaaagtaattctgtttcttgctttgctttcaaggaatttgcaaattctccttcagaggataaggaagaatccatggaaatacatgccacaggtaaggtcccagaaaagcttgtgtagccgagcagacgtgcactgagcagtcattgttcacgtggtagggactgtcctgcttcatgacagcagtgtcttaacaccttatttcttctacactgacctgttttgtgaatcattttaattcttgttaatggctgtgttttcatgacattgaatttcttagataggataactgtttctttgatgataattagctgatttatattttacactaattagtgaaaaattttaagcatctaaactatagctcttgggaatagagcatagagcatttgctaagtattcacctaaaatattttcagtttatttagaatattgaccttttaccgaatataaaatcattacacaacaattatgcagttattttttatactcaagatgattattgcacatacattagaggagagtaccttataagaagtttatgctgtaaagtgtgtttctttatgtaggactaataaataatgttttcatcccctctaaggagttaaaaaagaaataagtgtatatattccaagtgaatgttattacttatttatattttaaaaatgagggcactgagatgccctttcccacactgtcatttgaatcttaatgagtcatcctgttttgttggaatactctgtattgcaagattgcagctacacatttcaaaaatgtttttccacttccccaggcaagcacagtgagagtaatgctgagttaggccaactttactggcctaacacttcaaccctgactacacgtctgcgccggctcattactgcctatcagcgcagctataaaaggcaacagatgaggcaagaggccctaatgaagactgaccggcgcagacggcggcctcgagaggaagtgagagctctggaagcggaaagggaagctattatatctgagaagcggcaaaagtgagtttcttcaaggtttccactcagctcccggtacatgcccctctgccctgctcctgtagacccacaagagacaggactcatatcaaaggtagtgaccaccaaagaaaggctcgctccaacaaagcagtctgtttccccacccccaaataactaccatgtataaagtctggggggaagaagaaaagaaacagtaaatattaagtcttttcctgaagtatgatgcaagctaatataatctttctaacaggtggacaagaagagaagaggctgatttttaccgtgtggtatccacctttggggttatttttgaccctgtgaaacagcaatttgactggaaccaatttagagcctttgccaggcttgacaaaaaatctgatgagagtttggagaaatacttcagttgttttgtggccatgtgtaggcgagtatgtcgaatgcccgtcaagccagatgatggtaggtacatttagcaacaaagttctatacaaaaagacgagtaaagtgaaaaataagaaagtgtacaatgtagaatgcccttgaattctccccaagtaaatatgagcccttctgtgttacagaaccgcccgacctctcctccataattgagccgatcacagaggagcgagcctctcgaactctgtaccgcattgagctgctacggaagatccgcgagcaggttctccatcacccccagctgggagagaggcttaagctctgccagccaagcttggatctgccagagtggtgggagtgtggacggcatgaccgagacttgctggttggtgctgctaaacacggggtcagtcggacggattatcacatcctcaatgaccctgagttatccttcttggatgcacataaaaactttgctcaaaacagaggggcaggtaatacatcttccttgaacccactggcagttggatttgtccagactcctccagtcatctcatctgctcatattcaagatgagagggtactggaacaagccgaaggcaaagtggaggagcctgaaaacccagctgccaaggagaaatgtgagggcaaagaagaggaagaagaaaccgatggcagcgggaaggagagcaagcaggaatgtgaggcagaggccagctctgtgaaaaatgaactgaaaggtgttgaggtcggcgcagacactgggtccaaatctatttcagagaaaggttccgaagaggatgaagaggaaaagctggaggatgacgataagtcggaagagtcttcccagcccgaaggtaaggccttaccactggcccctctcctgaccctgcagcagctggttgtgagatgcgttgctttctggcagcacggcacctgctctttttcacgagtacttagtgtacattttcttctgtgaagggataatttcaagttatgcttatatctgtgttttgctctcgcaccttatagcacctaaccatggtattttgaagaacataaactctaagaagggttgcatggacacattagcaatttctggtttaaggatggaagttaacttgtagtgagtgacagtgtattaagaattctatgtgattttaattttgacaaatatgagggaaggtggtcattcactgagtaaatattgttaatcattttgaaacaattggtgcttgttatgttttgattcagaagtaaagagtgggaatagaatctaaaaataaccaattttttaagtcacagtacggttgctgaaactggcccagaataaaaatagagcacgtactgtgctgtagctggaaccttcaacttttgacagaaggtcagcccttttttctgtgtggaagaacatagactcttgagtcaatgacttggttggctatcagcctcttgtaaggtttacttgcacggtgctaggtggctagtgactaacctctctaagcctctgtgtcatcatctgcaagatggaaataacaccatctatgttaaagggctgttgtaagctttagacaacagtgcccaataccattctagccatgtagtaggtactcaataaaatggagctgattagtattcacatttttaatcatgtcctttctaaacttcagtttccctgatactgtggttgtgagtaatgcacattaactcatttctcagcaggagctgtctctagagggaagaattttgatgaagaaagcaatgcttccatgagcactgctagagatgaaacccgagatggattctacatggaggacggagatccttcagtagctcagctccttcatgaaagaacatttgccttctcgttttggcctaaggttggcaggtttttgttgctgttgttttgctgaccaaaaaggattagggtagaggaaatctttctagcttgatttttcaagtaattttaaggtaaacttttgacacagtatatgaagactatagatttttcttatacttttaaagaatgatctgaaaaagcccaaagaaaaaaattgtagaacacttttctaataggatgggaaatgtgatgtgaaagaaagataataagaaatagaagtgtgtatatggattgatctttggctccatgtggcttttaggttacttacccccgttgtctagcataatctatggattatcactgtgttttaaaatttttttgtgaaataaagccttcagatttaagacaactttatagttttggaaacctaccagcttcttgacttggaagagggtgtactgttgacccatttgcttttgacgcattatgagataattccaaatgtagttatctgtaaccaaaagcaaaatggaaattacttttttggctaaatagtataattttataataattccctgtgtaatttaggtctgtttttcagggtgaggaaataatcatcctaatcaccataacagggctgtctggtttaaaacaacacaaaaaatgagcttcagtcagcctaccccccaggctcgtctttcccagtattattgtgtaagaaacaaggtgaaaattttgaccaaagaatgtactgtcaaagacattttgtttcctctctctatccctttagttcccctgttatgctaacctcctttattgagtgtaggagggagtttcccagatcagtcaaaggttatagtagcagacacttttaatctatggaaactcagtctaaagctgtaattagaaatttttaatgtacacgcttcaatgaaatttgaagtgataataggtagggaatgcaaattgacattcattaggtgttcctaggttggtgcccacttcataatgctgaactttattaatagtgacgctaatgatgtcctacttcctgggactgcaatccagcctgtagatctgaagggccagggcggcaagaagctaatgcagggtttccattgtcatctactgacatccaccagcagagctctatggagcttgtacaagagttactttttaaatatgaagatattttgaaggtggtgattatgtagtacatttttctgttttatgtagttcagtgttcgtaattaaaaatagcatgttttctgtgttgaagccacctaggaccttctgccagagcaatgccattataggagattttgtttatttactttcttgtttgatttcttgccttgttttcttttactttttgtcctccagttgacttttaaacattttatgctcttttgcatcttgatggatgtatttatctagtaattttaaccagggctttgttaaaatttcttgtgacttttcttctccctccaggatagagtaatgataaaccgcttagacaacatctgtgaagcagtgttgaaaggcaaatggccagtaaataggcgccagatgtttgatttccaaggcctcatcccaggttacacacccaccacagtggacagccccttgcagaagaggagctttgctgagctctccatggtcggccaagccagcattagtgggagtgaggacatcactacgtctcctcagttgtcaaaggtgaattagaatggcttgtttctgcagcttaaaagggagctctctaagccttaactgagtttgcgagcttatatttcactggccttgcttagaaataagatagctgctgtttcctcagctctgtgcaccagtcatgaatgcttaattccttaagcttcttgttccttatttctaaaagccagcccatatagcagtactgttttggctcactgcaactctgttctgttggaatttttcaataggaagatgccctcaacctctctgtccctcgccagcggaggaggaggaggagaaaaatcgaaattgaggccgaaagagctgccaagaggcgaaatctcatggagatggttgcccagcttcgagagtctcaggtggtctcagaaaatggacaagaaaaagttgtagatttatcaaaggcctcaagagaggcaacaagctctacctcaaatttttcatctctttcttcaaagtttatcttgcctaatgtctcaacaccagtgtctgatgcctttaagactcaaatggaactgctccaagcaggcctttcgcgcacacccacaaggcatctccttaatggctccctagtggatggagagcctcccatgaagaggaggcggggaaggaggaaaaatgtggagggacttgatctgcttttcatgagccacaaacggacgtcattgagtgcagtaagttggggagcttgcctgcatggcgattgcacgtgttgacagctgagggtcctgtgatgctcacgatgctgggctgtgtttctctcagcagcattgtatgaaagccagcttcctccactaaagaaatagttttacaataaacagtcatgattctgatcattgatacagatcacttggcctgaacgaagtgtagcttgaggatgtattcttcccaagttctgatgtgttgattgctctcagaagaacagccaaacctagaaacatgttcttctgaatctagaattgttatctctgaattcttgaggtggaacaagtttcattgatatgttttaggcctggcatttattaaaattagtataaatgtttcattttggacctaagatttgggttaacataaaaagctagtgactgcaaattctcctatctccttaagtagatattttaaaaatttgagctgtgcttttgctagaataggtttgaatagaatgtgtgaaccaatggattttgacttttcctttctcagttcagaggaaataaattaatgcagtataatcaaaatgattttctttcttaatctgcttcaactacatctcacccaaaaatgtggtgcctgactcactgatgaccagaattttatcccaaagagcacaattacatgtgcttttttaaaaaatggtttagcactatatatcttgaacctattgaccagaagccccagtcaccatagtggctggaactccttgtctgtgttgtgaggagtgggtgctccaggaagccttccaggtactgggccatcctggacccttcttcaagcagtgggacacagtttgggaaactgaaatttgagattgagggaagacagttgtctgtttcaacatgtttttacttacaccatccctattattatttgcccattttctatttcttgaactcagagaaagcttaataagatggcaggaaaagacatggttgagttaaagttcagaaatgaaaaataacatccactgaaatttctttgccctctggtggggtctaattaaaacagaagcattcaggtggctaagagtaaattttcaaaattgggccgggcatggtggctcacgcctgtaatcccagcactctgggaggccaaggcaggtggatcacttgaggtcagcagttcaagaccagcctggccaacatggcaaaaccttttctctactacaattataaaaattagcctggtctggtagcacgtgtctgtgatcccagctactcaggatgctgaggcaggagaattgcttgaacccaggaggcggaggttgcagtgaatcgagattgcatcactgcactccagcctgggtgacagagtgagactctgtctcaaaaaaataaagaaaatttttttcaaaattgattaccaatgcagtgatcatcataatggtcatatttgttgatggtatgattgttttcagaatcctgtaaaagtacactttgtaatggactagctgtgacttacatgttttctgtaagtcaaaatgccatttctaggggtatggccctcagacagagttgtagcactagtaaatagccttcctgtttgaaactacttctttgatagattttgttgactgataaattctttctccataaactttaacaaattgggaagtttctgcagctgacacttctttttgtttattatcatgttcaatatttgtaggtttttttgtttttgaaacagggtttgtttttgagacagggtctcactctttcgcccaggctggagcacaatggcgcagtctcggctcagtgcagcctccaacttctgggctcaattgattctcccacctcagcctccctagtagatgggactacaggcgtgcaccaccatacctggctaattgttttgtatttttggtggggacggggtttcaccatgttgcccaggctggtctcaaacttctgggctcaagtaatccacccacctcagcctcctgaagtactgggattacaggcaatcatgttcagtatttggatcacgacacagctttgtctctggatcaggtgttaggaattaataatgcaacacacgtgcttttttcctattgcaagtacacattctattttaaatctgagactgattttattcatttcactattttaagccgttgttaagaatttgttgatatttttctttttctaaagtcccatttagaaagcctgagagaattcctaattgaagttagagaatgtatttttaaaactttttttttttaactgtcacattttgaaatgtagggattcctcatttggtgttgtcgggggtgatgtgcatgcacataaaatacaaggaaagcactgctcgatctgtaaataaaccaagtaggaaaagatgtaaaggcgagcagtgttacctggatgaaagaggacagatcctagaatttagtattttgtcagcactctaactgtgctgccatgaaaaagtaagagtgcattcagcaacagtggacaagctggcactattccctgtgccagcactgagagtcaaaaaatacagtcctgacaagtgcttgcactggagaatgcagtgtttaggatggggtagcacataaatcataatgtgtcctggttgttcatgtgtgccacgaccaagggatgtctagggtactttgtgagcccaaaggaagcctgggagtggagggaagaggatatggggagaaacagatgaagaagtttccctatggatggctgtacttcaattaagttttgaagatcatgtagtagttggtcattttaaaagggttggcagagaacatgtgtaagaggagagagcctcttgggtttgaagaactgaggaatttgctgaggaagtgagcttcagcagagatgagcttgcagagaaggcaggatgcaaatcatggagggccttgatgccattcggaagaacttggattttgtcctggaggtaatagggatgcaattattgaaaaaaataggagagtgatgtgacataattttttgaactgggaagggctgcattttagaaaactgactccagcgtagtggtgtggaggttggattgaagataggtgggattagaatcagggagaccatttaggaatattgcaataacctgggtgggaagtgacaaaagcctgggccatggtagagctgtggggaaggagaaatgggtgtctggaggttgaaataactgtagacttcagttagtggtggtctttccaatgttgccacacatgtctgagacaaagtgtcccactaccaacaaaattatattgtgcacagagtgcccataagttacatatagactggcttttagaaattcctttagtataaattatctttaatatcattatccggggatctccaagagagactgagaggccgcctttcatgcatatcagctcagactataccccccatgttgtattcccagtggctggcttaggatttcagagcatggaaccttagtggactataaattttttacctaattactagttctacagtgtgaagaatgatataaaagtttcgtcttcttctttttatttttatttttttgagacgaagtctcactctgttgcctaggctggagtgcagtggcacagtctctgctcactgcaacctctacctcctgatttcaagtgattctcctgccccagcctcccaggtagctgggattacaggcaagtgccaccatgcctggctaatttttgtattttttgtaaagatggggtttcaccatgttggccaggctggtcttgaactcctgacctcaggtgatccgcccacctcggcctcccagagtgctgggattacaggcgtgagccaccgcgcccagcctcattttctgacttttaatagctgttcccaaacaactagacattgtttctagtaactattttctctttttgataaaagatccattctaggatagcgttttcttgaaataggacattgtcagaggctctctcttcgtgtgagaattcataccattgtgaactttctgcaggaggatgctgaggtgaccaaagcttttgaagaagatatagagaccccaccaacaagaaacattccttctcccggacagctggacccagacacacggatccctgttatcaatcttgaagatgggactaggctggtgggggaagatgctcctaaaaataaggatttagttgaatggctgaagctgcaccctacttacactgttgatatgccaagttatgtaccagtgagtattgcagagtttagagttggaaggaatcttgcaggccggtccacttcattcccttacaacatagaaatccctgacagctggtccctctgccttttccttgaatgtttcctggtctcaaacatttcccaggtctttgttgttgaatcttcttcattacagatactagcttcaggtctgtcttactgaaggcagccttacagttatttgaagatgcgcgttatgcatttccttactgtttgcttctcccatcaaactcatgtgacttcttcagttattctttccatggcatcgtttccaggcagtcttagtattggggtaacactgttgaatgcactttctccagtctccagacgaggccccgccatcccagagtgctatgaagccaattacttccagagatttgaccagttagtgcagcccaagattgtattagctgcttttatggcaactaatcctggtgccttatattaaacgttagacagttcatatctccaaatggtttgtcacacgaactgtttgctagctagcaatgcaagtcttttgctttctgtatttatgtgattgattttttaaaacttaaatgtagagttttacattttattttgttgggttcagcctagagttcttgccactcagaaagtacccccaccccctacaagatctgtctgtttgttggttagttctcattacagacagtctcatgttgttgatggggtatcatctctgtgttcattggagccactaactagaaattagtaaaagtactacagaaagcctcctttaaaagtatcatgacttggttaaacatttaaagaaaaactttaagtgaggttattgatagataaaaggaaaagccaattctcacttatgtattccttaatggacgggtaaaataggagttttttctttcaaagagaaaaatatggtttctaatattaataattaaaatgattcttgaaacttccataataattgaagatgatctgacagttctctttggcatttatatagagaagaataagtactaaataccaattttactaaatatgttttttcttttgcagaagaatgcagatgtgctgttttcctcatttcagaaaccgaaacagaaacgacatagatgtcgaaaccctaataaattggatataaacactttgacaggagaagaaagggtgcctgttgtcaataaacgaaatgggaagaaggtaaacgctgggaaagggaattgatcactatgcgatttcttagcccagaaggaagtgttttatcctgccttcttctataggggaaaagaatcctgtctgcccgaatgcgtgtgtgcgtgtatgtgtgtattatagaagggggagggagtagattaacagaaaggggagggaagactgtgtttttaatcatttgtcaaatgcctctacccagatgggtggagctatggcgcctccaatgaaggatctacccaggtggctggaagaaaatcctgaatttgcagttgctccagactggactgatatagttaagcagtctgtaagtacaaactgcatttctatcaagaaaggtagctatacaaaactgttttccttagtctttcttattttctgttggccattaattattcagttgtaacttagcttaaaagaattgacataatacatcattttcatacatcatttcatacatcattaatacatcaatcattaatccaaagtgaattcatttatcagctccaatttaaaaggtttgtatggaaacatacattcacaatcttagaggtagacttctccaggggggattgccccagctaagcctacttaacagctcacctgtggaataggatgtatggtggttgagatcattaagattaactgtgatttctgatttaaaaacaaaacaaaacaaaacaaaacaaaaatacaacagttctgcctaaaagatttgttaccattagctttttaaaaattcgttcatgacatgctggttctttgttttaattatacattaaaaatgtctttcggtgtaacattctgttgatcttaacacacgtgtgagtttgtgaactgacaccgtagtcagaatagggttccatcccccacccccaccaccccgagttccctcacaccgtcctttccccgaccccagcccctggctgccgctgacctgttgtccatccctgtctttttgagaatgtcctgaaatggaagcatgaaggacataagtcttgaagcagtttctttcgctcatcatatggaaggtcatcgatggtcacatgtgtcacagttatctcctttctgttgccaagtagctgtctccattgcatagatgtgacactggacggcttagccctcacacactgaaggacatctgggttatttcctgatttttgaaactatgattagagctgctataagcaattgtgtacaggttttggtgtgaacataagttttcatttttctagggtagatactaaaatataattacattttccatatttcaaaaatacttttacatatatttgaaatatccaaaataacacattatagagggcataaaacatcctgggtttatattatgttatactattttataatttttctcccatacaatatctttttttttcttttttttttttttttttgagacaaggtgtttgtcacccaggctggagtgcagtggtgaaatcacagctcactacagcctcattctcctaggctcaagcaatcctcccacctcagcctcccaagcagctggcactacaggcacacatcaccaagcttggctagtttttgtattttttgtagagaaggcattttgccacgttgcccaggctggtctcaaactcacctcaagcaatctgcctgccctgacctcccaaagtgctgagattacaggtgtgagccactgtgcccagccaaaatttttttttaattgacagatatttaattgacaaaaattaattgatgaatcaaatatatatgcaaggtgtacagcacagtgtttttttcttttaagagacagggtcttgctgtgtcacccaggctggagtgcaatggtgcaatcatagctcactgcagcctcaaactcctgggctcaagcagtcctcccacctcagcctcctgattagccaagtagctgggatgacaagcatatgccaccacacctggataatttttttttattttgtagagatagggtcttgctatgtgccccaggctggtctcagactcctgggctcaagaaatcctctagtcttggcctcccaaagtgttgggattacaagcatgaaccacggcacctggcttcaaagtgatgatttgatataattatacattatgtactttcctttttaaaaatttgttatgggtacatagtaggtgtatatatagggtacatgagatattttgtacaagcacacagtgcataatgatcatgttgggtagatgaggtatgcatcacctcaagcatttaccctttgtattacaaacaatgtgattatactcttttagttattttaaaatatacagtaaattattgttgactgtgtagtcaccctgttgtgttatcaaaaactagatcttactcatcctgtctaactctatttttgtaccccataatgtactttctgatgtatgatttcttgagttagttatggatgcagctaacttgacatttacctcactgatgagtagccttgagcaatttttctgcagttcagcaagctaacataataataaaaacaagttttgctgtcattaagttttatcattgagctgttaggagggaagaactacttaggtatttccatttggaatggcaggttcaccacagaggctcacattgagatcaagttgtcttcgacagcctttatagccactgtttgcctcccctgtactccagggttttgttcctgagtcgatgtttgaccgccttctcactgggcctgtagtgcggggagagggagcgagcagaagaggaagaaggcccaaaagtgagatcgccagagcagccgcggccgccgctgctgtggcctccacgtcagggatcaaccctttgctggtgaacagcctgtttgctggaatggacctgacgagccttcagaatctccagaatctccagtcgctccagctggcaggcctcatgggcttccctccaggactggcaacagctgccaccgccggaggcgatgcgaagaaccctgctgctgtgctgcccctgatgctgccaggaatggcgggcctgcccaacgtgtttggcttgggcgggctgttgaataaccctctgtcagctgctactggaaacaccactactgcttctagtcaaggagaaccggaagacagcacttcaaaaggagaggagaaaggaaatgagaatgaagacgagaacaaagactctgagaaaagcacagatgctgtttcggctgctgactctgcgaatggatctgttggtgctgctactgccccggctggattgccctcaaacccgctagccttcaaccctttcctcctgtccacaatggccccgggcctcttctacccatccatgtttctacctccaggactggggggattgacgctgcctgggttcccagcattggcaggacttcagaatgccgtgggctccagcgaagaaaaggctgctgacaaggctgagggaggaccctttaaagatggagagacccttgaaggcagcgatgccgaggagagcctggataagactgcagagtcctccctcttagaagacgaaatagcacagggtgaagagctagactcacttgatgggggggatgaaatagaaaacaatgaaaatgatgaataaccagtaccagttccagttcaagtgtttaaaacttttgacaagtggtagtcctactgtttacactcacagttaatgttcatacctagttttataagctgttctgtaacatagtgtagcaaaaaaaaaagttcaagtcatgttatacaggtgtgtcaaaaggtatcttggtcattaagtattgtgcagtgcattatttattatccctaggagagatgaaatttgagaggtgatcatgtctttttaaggaaacttacataatgctctgctttttttttttctcttggtaccattggtattataataaagagcaatttgtaactgagtggcactaatggaagaaagtgctgctcaaaggaagtatgaagttatatatttaattttttaattttaatttttaatttttttgctgtgaaggtcaagctgaaatttaccatacatatcatacttgctcatttgtttccctttttgactgtatgggggttcccacactcgtgcatacacacacatccatacactctgacaatctccacgctagtgtgaacgcctctgtcccgaggcgcagcaataataaggcagctgttgaatgtgaagggtccctttggaaaattaacctactgggagggttcttgccagacagaactacagttccattgtctcgtggtcttgtaatgcactggtaaaaacaaaataaatagatgaataaataaagagtgagagaagagagaatcaggtaccttttttaaattaaaggactttgttactttagccacaaagctaaaacagcattacctcagctctaaactagccttgaagtttacagacatgactttgtaaatgtattgtttttctttgttgtgatgtccttttatttttttctttgaaaactgctatcatgtaagataaaatgtaaattgctgccaactgtagtaatgatgcttttaataaaagtgacccatgatatgcagagaatgtaattatagaatgtagtatatagggaaactggtgttcactctatttatttattgtattcgcaacttgatgcaaatacagcattttggcttttggacagtttcttgaaaaatcctctaaactagattagcttttgtaatacactcaactgttttgaagactagacagtaaggaaaaccttgaattactctcacataattccactccagatatctcaacagcaatgcatacaaaaagctcctattactccctcaaaagggcatctgagaccgagaatacttagaaatgtgtgcagcgtgtgataatgtggtacactgaagaacaaaagggcaaaagaaaaatgaggctttaacaggcacaatatctaggtcatttatccttggttaatgggtagaaaaacacaatgcggtagtgtcagcaagggacacaaaggcactctggtgtcctgcagaccagcgctcgatgccagaaaccagggtgtggaaaaacccatgtggaattgaaacagacccacttaagcacgcacgcgcgcacgcacggtctcaggagctactgatttgtggacccctttttgacctttggtatttaaagtaaaatataatttgagatctactgttttcacctttttatgtcacctgaaccaacacaaagccatatttccatccagttaaaaagcaggggaagggatgtggacgagagtgtttcgtgtgtgttgccttcctccacacccttcccccaggacgtccgcacacagtccacccccagccagtgtgctgccagacaggtggtctaaattcctcccagactgtgagattcagttcgtttatgccccaagatgaaaatatgccccttaatgattctgggaaagaaacaacctgaaccctccaccttacagatcctgtgattgcttttatttatcatcgtcgttgtctgctgaaagtgaatgggccgtgcacactggaggaaagtgccttgaagagaatattttttgaaagggaattatttgaacacgggaaagtgaaactaggtctgcatgaagtataggaaatttaagtatttaagtaacaaagatgttagcagggagaatttgcttaataaaatgagtcattaaagggtgttttttttaaagttctttgtagtattggaaattttcctatgagcctctgtaaatagagaatataatgtgacactgttaggataaaattctaagagcaatgatgatcttcaaagcaaagccatcagttgctcgtggccagaggacccctgagttgttggggctcactggcttgttatgtgcatcatccggtactcatctgttgacgtggctttaatgtcattcacattttcatattgaaaaatgcattttttttcttccagtgaaattcattcttggtagtagatcttgaatctacctaagtattttattttctttctttctttctttcttttttttttttgttgttgttgttgagacggagtctcgctgtctcccaggctggagtgtagtggcacaatctcagctcactgcaagccccgcctcccactttcacgccattctcctgcctcagcttccttagtagctgggactacaggcgcctgccaccacgcccagctaattttttttgtatttttagtagagacggggtttcatcgtgttagccaggatggtcttgatctcctgatgcttgtgatccacctgcctctgcctctgcctcccaaaatgctgggattacaggcgtgagtaaagtattttcaattcagtcagatactaatgggtatgatcgtgtgcctagcatggaggaagcactgaggtgccaagggttctcctggcattgctccctgatggaagttctgttcttccctgaggaggctgaggcccgggagttggcatcatccccagcagtaagtgcaggaacaggacttgaactcaggtggtctgactgcagaagtctgtgtatgtgctcctaaaatactgtgcttttaggtctctgaaagaaaattatgacataaggataactgaaatttcgctgtttattccccttcataacatcttaagtttgaggttgggaattaagagaaagtcttgaattagagacttagctctggctaaggaaatgaatcccacctacctcatttaaatttggatttattttgccccacaagtatttctattttataaagaaatcaagtctttaaaaagaatttgtccaaataagttacagagagagtaaattgccagcctggtatttgaaccccaattgatgtaactccaaagcccaggctcctaaccactatgctagtgtaattaacattcatcagcaacattgggtgctgtgtgctagaggctgtgctgggaatatagaaatgaaagcaaacagactagtcccctgctgtcatgcagcttacatcctagtacgaagagatgcataatagaatacaaataaaatgtttgcagggcaaggaagactcttaaataaggtgataggatggccaggaaaaagctctctatggaggagacagctcacacctgagtgatgagaagcagtaggcagactatattctagttggagaattgtccagacaaaaggaatgacaaacgcaaagaccttgagctggtaatgagcttggaataaggagtggagaggccatctgccttgaaaagttgggaggcatggtcagattacatagggcctggatggctctggtggaggatttgggtttcatgctgagtgctgtagaaagtcttctgaaggttttatgcagaaaaatggtcattttcatgtttttaaaggatcattatgtctgcagttcaaaaaactcccttgtaaaggggagtcagcaattccagctgggagatggctgtagcaaccttgggtcaagtttagtgggcagtaatggagaaggaaagccatggatggacttgggatatgttttgaagaggtagaccctccaatttaaatgaacttttcagtgaataatttgtattaattcttcaggactactactaaaaactaacagataaagaatgttcaccatgctaatttttttaaataagaatgttgtgattagtgttagaagaagatactgggaaaataaatttttccatcatgtacattataaaattttctttttagttcaatgaaaattgttaattgtctgtgggaagagttttagacattaatcctgaccggtagaggaggtgagagtgagcattgttgaagcaatgtgtgttacagcaaacatctctgtgtctctagggccatcaataaatttaaattaggaagcaaaacaatgtaaatgacttctactaacaagcacttaaaagaatacatcttattcattcaacttggctctctaatgagcaattttatattttcttaagcacaggtaagatttaccacagttttacagacatagtaaaataagctatatttggcaaaatagatgaataaattaccttcgggaatactttacctaatgtaagactcttaagcatttcattattgagatttttggtaggggagtcacttaatttgaagattttctggtaagggttaggatgatcgttttctaagtattctggactatttaagttattttatgcagtgcaacatagcgccaccctcccaataggtctatttgtttataaaccttgttttggatctacagatgtagatttgaattttaatttggatctccttaatcaaatgtgtactatgtaatttaaatgaaattaaataataagctagtgataaaatttgaaatattttgacatctaatatctttaccttccgaacgatttactctttttttttgagatggagtctcactttgtcacccaggctggagtgcagtggcacaacctcggctcactgcaacctttgccttccaggttcaagattctcctgcttcagcttcctgagtagctgggcccatagacatctgccaccatgcccggctaatttttgtatgtttagtagagatgggatttcaccatgttggccagactggtctcgaactcctgacctcaagtgatctgcctgcctcggcctcccaaagtgctgggattacaggcatgagccaccgtgcctggcagaatgatttactcttaaaatttgtttagctcctaagcaggttgacattttcttcacttgaacaaagatggcagaatcccatttcacatgttggcaggcatgctatttaagtgtgctggtgcctctccacagtaggatcctgctgtgagccttcccttctcatgaggtccttcctgggctcccagataaatgtcatgataaatttggagttgtagctaaagggcagcctaatagatttctaatatataataaatagtagcactaggtcaaaatactgcttaggaatcactttatactccaggtggcttcctccattgtcccctcgccgcctctgcattttgatctgaaagctcgatttcaagattacaaatgagagaaacctgattctcttctgtgacaggagccaggtactgcaatggtttgcaatccaaaacctcataattgtcagcctcagttcaagagacttcaactgggatataggctggatgactgaaacctaagcaggctgtaaagttaatagttttggggagtgcgcatgacagtttggaaaactcatcctgtttaacatgtttcaccatgtttccctaggagtcgggaagctcaacatttcagaattcagcatttgtgtttgttaataggcactggtgagttaatccacaccacaccctggtaagttaggccagtcttgttgccaccagccctttaccaggtgaggcagggtcatttgcccaaggccaagtagtacacaagtgtggtggccagaactagaatttggacttttccagcggacgtgatggctagctgtgggccatctgtcttaggataaacccaccatcaatgttaattcaggtctaggatcttaaacaaaaacctaaaatagatcaagctacaagatattttaataaccgatggtgtgatctgaagagcaaatcagaaagttccagaatctcatgctgcattacagaagtgattattgaagaatggctgaaagatgttcaagtaaaaaaaaaaaaagcaattaacaagtaggctttatatccatgctgagttaatgatatgatctatgcaactgacagtctaaatatttctgcatgttactgaggatattcactaggatttctggatagtgaatattgccctttcttctaccttgtatctgaatggccctaaaagccagccccagcttgtagaaatcgagatgacaaagtctggaacctatggctcctacaaggatggaaaatagccccagcagaacagtgttgcttcatctgtccccacccacagggctttcctaggctattgtagctctcatagcggatttgcatatctgtagctgcagagctaatgttctctctctaggctcagggggccctgcaaggcagctccatggtcctttccattttattgtaagagttggtggaaaatgagaggcggccattgtgtctgactgcggaggcattgttcttccccagacgaggctggcctctttctcagctcccggtttctgctcctccagccatggctagcttctgaggagcagctggactaactcagaattgccccaagggttacttaaaaccatgaaaagaaattttactctccaaaatgtaaagttacaaactgccccccaaacaccttttcttggcagtcccagtttgtacagaacctgtgtgttctgatagtaacgcagccgtggcaactcaacaacaaagtgctggctcgaacctcagcccccagcccctagcccactttgtgaaaagaatttcattgaccatcagaatatgtggtggtggcagtgggggataaaattgaagcagaaaatgtccctttacatttcaaccataaaaccatctgttgctgaggactgtgcaggtatcaattgtttatgatcattaaaatcttgctgttgaggatagttactacaaaaacctgaatattgtttatgatgtcgatgtcggggaaaccaaagctttttgtatttatgttgctttcttatgtggtttgggggtaggccaaatgagcaaaacaacagtggccttccaaggtgcataggcctaggagaacatgctgtaaaatatatgcaagaagaaaagcaactttgagaatcacttggtgtttcttgtatttggagctcaaatgactaaatggccaaaatgtcatctccagctgacatgcttccagcatgtctgttctggtcagaaagcttacccaaaatagtttacaattttattttgtactacgatatacctgctactggacacgcatctgcagattttaggtgcatgctgatctggcacatttattctcatggattgtatgtacggggcattacgtgctccctgccttcaaggagatgctgaaatccacaacaacttgaagggttagacaaacttactgttttaatagctgttataggtacaaattatcctagccacttgattgtcagttgtggctaaatatgttgaataaggaggaagctactgagcccagagaccctgggagaggacatgtggatttgatcggttgtccttgctccttgtaattttagcttcctgcacctgatcactttatccagagcaggaacagctttaaactaatcttgttttgctttaaatgtaaaccatctaggcttctgaattagtgcaaaaaagaaaaaagtttagtaacttcagttaaatctctaagactcacatctctcctgcatcagcatgatcatgatattccccttctcttagaggtgccaccaacggtgacctaaaaacggaggcagcaatgccctgaggatggcatcctgttgctggtgtccacaaggtgatttccttctggatctggacattcttgcttgatggactaaatgcagccatgttttgctttcggcctttccacattaagtctctgctctcttagggacaaatgttatggagtctttttgtgtattaaggacactttcttttgaaagccatgccaggggttatgctaaacaaagggcataataggcatcattcttgtccttaagtagcaaccaattgggaagtatttaatgggcaattggagggtgtgttggagggtaggggtgagagaaaaagcatatagtcagggttcttccagtgcctaagagtgttgctgaggtaggtaatataaacaacagatctgcccgtgctttgcagatttcagggcatttatccatgcattgtctcaatggatacaacttagaaataggccagttgtgactttagagattaaagaaattaaggttctgtgaggcaaggttagcaagtggtttcgttgaatcttgcaggcaggtctttggactccaaatcacatagtgtggtttctctaccacataatgacagcaaccaggtaactcctgccacacacacacagtggcagccctgtagagcaagttcatctctgagcctcaccttcctcatttgtaaatttggaagcataataatgataatgccttccttctagtgttgtgtgaggattcgaaatcctgaatatggccgggcacagtggttcacacctgtaatcctaacactttgggaggctgagccagatggatcacctgaggccaggagttcgagaccagcttagccaacatggcgaaaccccgtctctactaaaaatacaaaaaattagccaggcatggtggcgggcacttgtaatcctaactacttgggaggctaaggtggaagaattgcttgaacccgggcggtggaggttgcagtgagctgagattgtgccactgcgctccagcctgagcaatagagcaagactgtcttgaaaaagtgaaaaaagaaaagaaatcctgaatatgcaaagttcttagcgtctggcactgaactggcactcaacaaatgatcatttaaaaacttcacatcgtttgacaaattctaaagaagtggtacaggagaatgaagcctaaaaacactgagcaaatggccagggtggttttggcctataaggagtgttctatagaaatgaggcttctgcctgtcctgaaacacaggcagttcttggctgaagacagcagtgcagacttgagcttggagtaggtgggaggaggtaaggcttctagaaagtcggttctcaaacaccagtgagcaatacaagtagccctggggccttgtacacttccagatttggatgaaaattgtttttaaagcttcacaatactcttattccaatacattctaatattttctgttgtattctatttcattagaataaataaataagagatcattcccctctaaactgacttagtgatgcagtagtggttggtggcctgcactttgaaaaatcctgctgtacaacaagggttcttaacctggggccatggatgggctttgtgggaggggatgtgggtggccctaagtcccttgaatttggatgcatagttatgtgtgcatgtatttttctagagagaggatccctaaatttcgtttggacctcaaagcacctgtgacttcctctctgagagggtaataagagagccagaaaagcagctttgagtgattggggattacttttaatgccacttcagaaatggaaaactgatgaaaaaccagtccctgaagaggaaaaatcacagcaagtggaacattccccccaaaatgcctcctgcccagggtactctcctcccgcttgtgtgacagccagcagttgggacagcctcctttttctcctgcaccaagtggggacggtaataccaccttccatgcaggccagttttgaagactgaatgagataatgcctgtagaactacttagactggtacaaaataaacacattcacaatgtcaactattgtgcgtgctgtccctgcgtggtgacagtaccacagagagtgttgtccccattgtatctgtccagtgctttgtgagtgtgtgtttgtttttagtggaatgaattcttttcctcattcatgagcat

SEQ ID NO: 41 - DNA, 6753 bp, Homo sapiens
aagagacggtccagcagacaggtgaagagaaagcgctacactgaagacctggagttcaagatttctgatgaggaggcagatgatgcagatgctgctgggagggattccccctccaacacctcccagtcagaacagcaggaatctgttgatgcagaaggcccagtggtagaaaaaattatgagcagtcgttcagtaaaaaagcagaaggaatctggagaggaggtagaaattgaggaattctatgtgaaatacaaaaacttctcttatcttcattgtcagtgggcatctatagaagatctggaaaaagataagagaattcagcaaaaaattaaacgatttaaggcaaagcagggccagaacaagttcctttcagagattgaggatgagctttttaatccagattatgtggaggttgaccggataatggactttgcacgtagcacagatgaccggggagagcctgtgactcactatctggtgaagtggtgttcacttccttatgaagacagcacgtgggagcggaggcaggacatagatcaagcaaagatcgaggagtttgagaaactaatgtccagggagccggaaacagagcgtgtggagcgacctcctgctgatgattggaagaaatcggagagttccagggagtataaaaacaataacaaactcagggaataccagttggagggagtaaactggctacttttcaattggtacaacatgcgaaactgcattttagcagatgaaatgggtttgggaaaaactatccagtccattacatttctctatgagatatatttgaaaggaatccatggcccttttttagtaattgccccattgtccacaatccccaactgggaaagggaattccgaacctggacagagttgaacgtggttgtgtatcatgggagtcaagctagtcgtcggaccattcagttgtatgaaatgtacttcaaagatccccagggtcgagtgataaaggggtcctataagtttcatgccatcatcactacatttgagatgattttgactgattgtcctgagctgcggaatattccatggcgctgtgtagtcattgatgaagcccacaggctgaagaacaggaactgcaagctgttggagggactcaagatgatggacttggaacacaaagtgctgctgacgggaaccccactccagaacactgtggaagaactcttcagcttgcttcatttcttggaaccaagtcgcttcccttcagaaaccacatttatgcaagaatttggtgatctaaaaacagaagagcaggtgcaaaaacttcaagctattctaaagccaatgatgttgagacgtctcaaagaggatgtagaaaagaacttggcccccaaagaagaaactattattgaagttgagctaacaaacattcagaagaaatattaccgagccatccttgagaagaatttcacatttctttccaaaggcggtggtcaagctaacgtacctaacctattaaacactatgatggaattgcggaagtgctgcaatcatccgtaccttatcaatggtgctgaagagaaaattttggaagagtttaaagaaacacacaatgcagagtctccagattttcagctccaggcaatgatccaggctgctggcaagctagtgctgattgacaagctgctgccaaaactgaaggctggtggccacagggtgcttatcttttcccagatggtgcgctgcttggacatactggaagactacctcattcaaagacggtacccatatgaaaggatcgacggccgagtaagaggcaacctccgccaggcagctatcgacagattctccaaacctgattctgataggtttgttttcctcctgtgtacaagggcaggaggtttaggcattaacctcactgctgctgatacctgcatcatctttgattcagactggaatccccaaaatgacctccaggctcaggctagatgtcatagaataggacagagcaaatctgtgaaaatctacaggctgattacaagaaattcctatgaaagggaaatgttcgacaaggctagtttgaaactgggcctggataaagctgtgctacagtctatgagtggaagagaaaatgctaccaatggggtacaacagctttccaagaaagaaatagaggatcttctacgaaaaggggcctatggtgcactcatggatgaggaggatgaagggtctaaattctgtgaagaagatattgatcagatcctcctacgtcgaacccacaccattaccattgagtcagaagggaaaggttccacatttgctaaggccagttttgttgcatctggaaataggacagatatttccttggatgatccaaatttctggcaaaagtgggctaagaaggctgaattggatattgatgccttaaatgggaggaacaacctggttattgatactccaagagtgagaaagcagaccaggctctacagtgcagtgaaggaagatgagctgatggagttctcagacttggaaagtgattctgaagaaaagccctgtgcaaagccacggcgtccccaggataagtcacagggctatgcaaggagtgaatgtttcagggtggagaagaatctgcttgtctatggttggggacggtggacagacattctttcccacggacgctataaacgccaactcactgagcaagatgtagaaaccatctgcagaaccatcctggtgtactgtcttaatcattacaaaggggatgagaatatcaaaagcttcatctgggatctgatcacacccacagcggatggccagactcgagccttggtcaaccattccggtttgtcagctcctgtgccaaggggaaggaagggaaagaaggtgaaagcccagagcacacagccggtggtgcaggatgccgactggctggccagctgcaacccagatgccctgttccaggaggacagctacaagaaacacctgaagcatcactgtaacaaggtcctgctgcgtgtccgcatgctgtactacctaagacaagaagtgataggagaccaggcggataagatcttagagggtgctgactcaagtgaagccgatgtgtggatccctgaacctttccatgctgaagttcctgcagattggtgggataaggaagcagacaaatccctcttaattggagtgttcaaacatggctatgagaagtacaactccatgcgagctgaccccgcgctgtgctttctggaacgagtcggtatgcctgatgccaaggccatagctgccgagcaaagaggaacagacatgctagcagatggtggtgacgggggagaatttgatagagaagatgaagacccagaatataaaccaaccagaacaccgttcaaagatgaaatagatgaatttgcaaattctccttcagaggataaggaagaatccatggaaatacatgccacaggcaagcacagtgagagtaatgctgagttaggccaactttactggcctaacacttcaaccctgactacacgtctgcgccggctcattactgcctatcagcgcagctataaaaggcaacagatgaggcaagaggccctaatgaagactgaccggcgcagacggcggcctcgagaggaagtgagagctctggaagcggaaagggaagctattatatctgagaagcggcaaaagtggacaagaagagaagaggctgatttttaccgtgtggtatccacctttggggttatttttgaccctgtgaaacagcaatttgactggaaccaatttagagcctttgccaggcttgacaaaaaatctgatgagagtttggagaaatacttcagttgttttgtggccatgtgtaggcgagtatgtcgaatgcccgtcaagccagatgatgaaccgcccgacctctcctccataattgagccgatcacagaggagcgagcctctcgaactctgtaccgcattgagctgctacggaagatccgcgagcaggttctccatcacccccagctgggagagaggcttaagctctgccagccaagcttggatctgccagagtggtgggagtgtggacggcatgaccgagacttgctggttggtgctgctaaacacggggtcagtcggacggattatcacatcctcaatgaccctgagttatccttcttggatgcacataaaaactttgctcaaaacagaggggcaggtaatacatcttccttgaacccactggcagttggatttgtccagactcctccagtcatctcatctgctcatattcaagatgagagggtactggaacaagccgaaggcaaagtggaggagcctgaaaacccagctgccaaggagaaatgtgagggcaaagaagaggaagaagaaaccgatggcagcgggaaggagagcaagcaggaatgtgaggcagaggccagctctgtgaaaaatgaactgaaaggtgttgaggtcggcgcagacactgggtccaaatctatttcagagaaaggttccgaagaggatgaagaggaaaagctggaggatgacgataagtcggaagagtcttcccagcccgaaggagctgtctctagagggaagaattttgatgaagaaagcaatgcttccatgagcactgctagagatgaaacccgagatggattctacatggaggacggagatccttcagtagctcagctccttcatgaaagaacatttgccttctcgttttggcctaaggatagagtaatgataaaccgcttagacaacatctgtgaagcagtgttgaaaggcaaatggccagtaaataggcgccagatgtttgatttccaaggcctcatcccaggttacacacccaccacagtggacagccccttgcagaagaggagctttgctgagctctccatggtcggccaagccagcattagtgggagtgaggacatcactacgtctcctcagttgtcaaaggaagatgccctcaacctctctgtccctcgccagcggaggaggaggaggagaaaaatcgaaattgaggccgaaagagctgccaagaggcgaaatctcatggagatggttgcccagcttcgagagtctcaggtggtctcagaaaatggacaagaaaaagttgtagatttatcaaaggcctcaagagaggcaacaagctctacctcaaatttttcatctctttcttcaaagtttatcttgcctaatgtctcaacaccagtgtctgatgcctttaagactcaaatggaactgctccaagcaggcctttcgcgcacacccacaaggcatctccttaatggctccctagtggatggagagcctcccatgaagaggaggcggggaaggaggaaaaatgtggagggacttgatctgcttttcatgagccacaaacggacgtcattgagtgcagaggatgctgaggtgaccaaagcttttgaagaagatatagagaccccaccaacaagaaacattccttctcccggacagctggacccagacacacggatccctgttatcaatcttgaagatgggactaggctggtgggggaagatgctcctaaaaataaggatttagttgaatggctgaagctgcaccctacttacactgttgatatgccaagttatgtaccaaagaatgcagatgtgctgttttcctcatttcagaaaccgaaacagaaacgacatagatgtcgaaaccctaataaattggatataaacactttgacaggagaagaaagggtgcctgttgtcaataaacgaaatgggaagaagatgggtggagctatggcgcctccaatgaaggatctacccaggtggctggaagaaaatcctgaatttgcagttgctccagactggactgatatagttaagcagtctggttttgttcctgagtcgatgtttgaccgccttctcactgggcctgtagtgcggggagagggagcgagcagaagaggaagaaggcccaaaagtgagatcgccagagcagccgcggccgccgctgctgtggcctccacgtcagggatcaaccctttgctggtgaacagcctgtttgctggaatggacctgacgagccttcagaatctccagaatctccagtcgctccagctggcaggcctcatgggcttccctccaggactggcaacagctgccaccgccggaggcgatgcgaagaaccctgctgctgtgctgcccctgatgctgccaggaatggcgggcctgcccaacgtgtttggcttgggcgggctgttgaataaccctctgtcagctgctactggaaacaccactactgcttctagtcaaggagaaccggaagacagcacttcaaaaggagaggagaaaggaaatgagaatgaagacgagaacaaagactctgagaaaagcacagatgctgtttcggctgctgactctgcgaatggatctgttggtgctgctactgccccggctggattgccctcaaacccgctagccttcaaccctttcctcctgtccacaatggccccgggcctcttctacccatccatgtttctacctccaggactggggggattgacgctgcctgggttcccagcattggcaggacttcagaatgccgtgggctccagcgaagaaaaggctgctgacaaggctgagggaggaccctttaaagatggagagacccttgaaggcagcgatgccgaggagagcctggataagactgcagagtcctccctcttagaagacgaaatagcacagggtgaagagctagactcacttgatgggggggatgaaatagaaaacaatgaaaatgatgaataa

SEQ ID NO: 42 - protein, 2238 aa, Homo sapiens
KRRSSRQVKRKRYTEDLEFKISDEEADDADAAGRDSPSNTSQSEQQESVDAEGPVVEKIMSSRSVKKQKESGEEVEIEEFYVKYKNFSYLHCQWASIEDLEKDKRIQQKIKRFKAKQGQNKFLSEIEDELFNPDYVEVDRIMDFARSTDDRGEPVTHYLVKWCSLPYEDSTWERRQDIDQAKIEEFEKLMSREPETERVERPPADDWKKSESSREYKNNNKLREYQLEGVNWLLFNWYNMRNCILADEMGLGKTIQSITFLYEIYLKGIHGPFLVIAPLSTIPNWEREFRTWTELNVVVYHGSQASRRTIQLYEMYFKDPQGRVIKGSYKFHAIITTFEMILTDCPELRNIPWRCVVIDEAHRLKNRNCKLLEGLKMMDLEHKVLLTGTPLQNTVEELFSLLHFLEPSRFPSETTFMQEFGDLKTEEQVQKLQAILKPMMLRRLKEDVEKNLAPKEETIIEVELTNIQKKYYRAIKNFTFLSKGGGQANVPNLLNTMMELRKCCNHPYLINGAEEKIEFKETHNAESPDFQLQAMIQAAGKLVLIDKLLPKLKAGGHRVLIFSQMVRCLDIDYLIQRRYPYERIDGRVRGNLRQAAIDRFSKPDSDRFVFLLCTRAGGLGINLTAADTCIIFDSDWNPQNDLQAQARCHRIGQSKSVKIYRLITRNSYEREMFDKASLKLGLDKAVLQSMSGRENATNGVQQLSKKEIEDLLRKGAYGALMDEEDEGSKFCEEDIDQILLRRTHTITIESEGKGSTFAKASFVASGNRTDISLDDPNFWQKWAKKAELDIDALNGRNNLVIDTPRVRKQTRKAVKEDELMEFSDLESDSEEKPCAKPRRPQDKSQGYARSECFRVEKNLLVYGWGRWTDILSHGRYKRQLTEQDVETICRTILVYCLNHYKGDENIKSFIWDLITPTADGQTRALVNHSGLSAPVPRGRKGKKVKAQSTQPVVQDADWLASCNPDALFQEDSYKKHLKHHCNKVLLRVRMLYYLRQEVIGDQADKIGADSSEADVWIPEPFHAEVPADWWDKEADKSLLIGVFKHGYEKYNSMRADPALCFLERVGMPDAKAIAAEQRGTDMLADGGDGGEFDREDEDPEYKPTRTPFKDEIDEFANSPSEDKEESMEIHATGKHSESNAELGQLYWPNTSTLTTRLRRLITAYQRSYKRQQMRQEALMKTDRRRRRPREEVRALEAEREAIISEKRQKWTRREEADFYRVVSTFGVIFDPVKQQFDWNQFRAFARLDKKSDESLEKYFSCFVAMCRRVCRMPVKPDDEPPDLSSIIEPITEERASRTLYRIELLRKIREQVLHHPQLGERLKLCQPSLDLPEWWECGRHDRDLLVGAAKHGVSRTDYHILNDPELSFLDAHKNFAQNRGAGNTSSLNPLAVGFVQTPPVISSAHIQDERVLEQAEGKVEEPENPAAKEKCEGKEEEEETDGSGKESKQECEAEASSVKNELKGVEVGADTGSKSISEKGSEEDEEEKLEDDDKSEESSQPEGAVSRGKNFDEESNASMSTARDETRDGFYMEDGDPSVAQLLHERTFAFSFWPKDRVMINRLDNICEAVLKGKWPVNRRQMFDFQGLIPGYTPTTVDSPLQKRSFAELSMVGQASISGSEDITTSPQLSKEDALNLSVPRQRRRRRRKIEIEAERAAKRRNLMEMVAQLRESQVVSENGQEKVVDLSKASREATSSTSNFSSLSSKFILPNVSTPVSDAFKTQMELLQAGLSRTPTRHLLNGSLVDGEPPMKRRRGRRKNVEGLDLLFMSHKRTSLSAEDAEVTKAFEEDIETPPTRNIPSPGQLDPDTRIPVINLEDGTRLVGEDAPKNKDLVEWLKLHPTYTVDMPSYVPKNADVLFSSFQKPKQKRHRCRNPNKLDINTLTGEERVPVVNKRNGKKMGGAMAPPMKDLPRWLEENPEFAVAPDWTDIVKQSGFVPESMFDRLLTGPVVRGEGASRRGRRPKSEIARAAAAAAAVASTSGINPLLVNSLFAGMDLTSLQNLQNLQSLQLAGLMGFPPGLATAATAGGDAKNPAAVLPLMLPGMAGLPNVFGLGGLLNNPLSAATGNTTTASSQGEPEDSTSKGEEKGNENEDENKDSEKSTDAVSAADSANGSVGAATAPAGLPSNPLAFNPFLLSTMAPGLFYPSMFLPPGLGGLTLPGFPAGLQNAVGSSEEKAADKAEGGPFKDGETLEGSDAEESLDKTAESSLLEDEIAQGEELDSLDGGDEIENNENDE

SEQ ID NO: 43 - DNA, 72352 bp, Mus musculus
  misc_feature (1)...(72352): n = A,T,C or G
acctcaaggcctcgggtccagcgctctctcacggtctctctgaggcgtcaccaaagggacctggtggaccccagtggctggctgtctcttgatgactccctcatctatgacaatgaaggagaccaagtcaagaatggcaccaacatgaagtccctgaacctggagatgcaggagcccgttatagctgcttccctgtcgcaaaccggagcctctatcggcagcgcgttggcagctatcatgcttctcctattgctgtttctggtggcctgttttgtcaccaggaaatgccagaagcaaaagaagaaacagcctccggaggacactctggaggaataccctctgaataccaaggtggatgtagccaagagaaatgcagacaaggtggagaagaatgccaacagacagtactgtaccgtgcgcaatgtcaacatactgagtgacaatgaagggtattatacgttcaaaggtgctaaagtcaaaaaactgaatctggaggtcagagtccacaacaatttacaagatgggacggaagtttaatgagaaaccctgagatgtattttcttttttttctaaaatcctttttataaaatggggagaaatactggtatttttataatctttcaaattaaacaaaaaaaagggaaaactagctttgagtggcggacagcacacatcgcatgcatcaactcacaactgagctacctcatgaaacagaaccactgagacaccccccttgccctagagtgtcagagtaaggttatgcctacaggtccctgtaacagtctcagtggccacacagagcgactctgtaaggctggccccagaagtgttttaggattaggacagacactggacaattagcttcactgattggatcgagaaagctgggctctgtgggcagcagatatctgcaagtacaaacaaagcctttggtttcttcctctgccccagctctcttctgtgtgggcctttctggacttctggacacagaatacagaatgctgacacacagattccattgacaattctaatcagcacaacttagacatctgtgcactgtccccacttactatcctgtgcggccaggcctctaagtatacttggcttttctagagccctttttgaatggggatctcaatatgctttagactgaggaggactccagccagggccatgaagagcactgcgaagtaccacagcctctgcatgccagagatacttttaaaactcagccccgcttccccaggcgttctgtggttcatcagtgcatagggagctcatgtgtttgggtttttttgtttttttttttaattttgttagtgatttttagaaagtaagcgaatcatttgagtgagtgaatttcctagaggttggaatgaaaccagagttaacagatacacatgggacctgtttgctgtgtgtcatacagcagatagagccactgtccctggtgccatagtccggggaattctctctgggggttcttttctggtagctcaggctcttagtttctcccacatcagcacatgacaacccacatatatgtatgtggcttttacatagcatagtgttcaaatatcgacttgaatattctgtgtgtagtatgcacacaacttgcctttgttttcttttctgtttctaccttatgggtacaatctgaaccgtgcacattgtgtttttaatcagagtcacaattccattagccagaagcaaatgctgttcttgtgcatggcacatccgatcagtgagtaaatcacagagcgtccgcgttgtgtcgtatccgtatggaaatgacacaaactctttgagaacattccagactcctactaaaatctagaaggaatgaaccatgaaagtttcacaggcaactctgcagacccccgagctcaagagcagagcctgtgtgagccacggctggctcttcatccttcagcggtgccttgcacactacaagcgtgcagaaatgtttgttgagtgaatgaatggacggcgtgccgagtgaatgataggcagtaaacagaggaagaggaggtgagacgttatgctggcagtattacagggtgtgtagggatgatctctgttgtatttggtttgtgaaatagtccttcaactgagaggggaaaaaaagcacacttttaggtgggtgtggccggtggtgtatctggggagtcgggaacagaaatactgcggtaatgcatgagccgcatgttggcttccagagcaggagatctggaggaaagccgatttcacatttcgaaggtaataatagtgtgttcgttcagggcaggaaaggttggctgagcccagaaattcctggctggtcaggtgctccttcagaccagcttgcataattcataatttcataattcagggcagaaattctgaaattgcttcaagaatctggaatcgctacccatctcttgcagcaaaactgatgagccacaccctggatctccaggacaacagacagggctagagcgcagacagggagccaatcatctgtagagcagcttcccattggcccattactggtcacacctcccgctgtccagatgtttgcacattagagctttcagtgggctccacacccacacacataccttcctttacacctagtgggacacatacatgtgaagagatggcagagcctggcgcgggaagagaggctgaatctgaaggcctttgtgtacaggtgggcagtgaaagacaggagcctgtgtggacctggtcgttgtgaactctggatgagagaacagcccctgaaatagccctgcctcccagcctcgcccctaagacgctttattagaagccagccttctctggtggatgcctacttctgacgcaggaagcgttaagaggtatagagccgaggtttgccttttgaggagtgttgagtcattcatttcatttacgttttgtacttcatctttgggactggataatttggtgactaatgtggattctatttcagtgaaagctttgctttcagcgtttcttacttcttcactaatgccttgtgtgtgtttttactaaccttttagattgtaccttcaggtgagaagaacagaaaaaaataaaaataaaaaccctcagcagggttgctcttgctgccaggtgctggctgtggaggtcaaaagaagtaattgtctgcaccatttttctgccttgtcagcccctttactgtaccaaggtctttgggaaacccctgcaggttcctattgcagggtgggaaattgtgaagaaaagtgtttgcacaatcttaacaataagtgttcctggtctcttgtaggtttttgttattcctagttctcccctgctcagactgagaaaaacatttgtggtgctgtcaacctgtgttcttgaccctcaaatgattttgattttttttttttgtatttccaatatgaatttgtgtgttacgaatttctgatttcttcaatagcatatgctactatataaatttgtatcaataataaatgatggcccagttgtcctttgtttgcttgactctgttcttcttccattattcatctcattagcatagacactgcactgagctggtacatcattcgaaacctgaggcttttatttaaaaaaaaaaaaaagagcaaaaatgaatctgaatctgaaacataccaattctgctaagagccaggttctgaataaattcatactctcggatctagctttgcttttatggtcagaacaaagagaaataatgtacttccaatgcgagcacaatagggtgaaggttgccatccaccctctccaagatccctgatacagtgtgagcagggctatggccttctttgttgcacaagagaaggatagctgagtgtctcaaacaccacccaggagatgatctgatctccacatgagtttttttggcttgtgaaggacacggtggcagagacagaataggactgagctttgagcagttgtggcattctgcaagcctgtgcatttgtgtgcctttaccctctgacaatacgacacactgccaaggacagtgcccagcatggctctgttggcacacttgcaaactcagcaagatctgaaaactcagtacacttccataaaagctggggaagggatgccatccatagccaggcccctgaattccctgctgcgatcttcaaatcctcttcgtgtccaactgcccaattgttaccctgcacctgccagcgctcagccttggaatgcatttctctagagcacctgaagggaccattccaaaaaccagtttctaaacttttaagattggccacaaatttaaaaaaaaaaaaaatgcttctgagacttgaaatttcatgtgcataaaatttaggaactttgagtgtaaagtcccatttagaatttacaatgtctcatgggggattttaaaattgaaaaccgagggaggaagtgatatctagactatgctactacattcagccatgtgaaactgagggtctaatagatcatgagacgtccacgatatagatttgtatgtctctccttaatatcaggataccagagtgagtgtctgttataggtttcccaaatgggctggagagagctctgacaaaagcccatcagaatagtgtgttgggctaacagccttgtcacagtctaaggacaatgtcaaatgatgggctgagtatgtctggtcaaacaaccacatacctaccatgaccccattgctacttctacctcatcctataacaattctgaggcaagtgccttaattttcttttaaattttcaaacaaatacccgattttcaaagccttagcaagcagacggtgagtagcttatcattgccctcaggctcctattaccctgattggatgcttgtgctgaaggagtcccatcactcagttaccataagacggcagaaccatgctgcaagcctttctttaaaggctggcagaagtttcatccttaggtctgttctggtttaaagccatcaggttctaggactagtcaacacatgataaaagtttattagggtccagcctctgggacagtttccaagagttgttcaaaaccagatcaaacctcccactgagaaatatttaaaaaaaaaaaaagcgatgcttggtaccaatagatcctggaacctgacaggccccctgtgtgctggcttcttcagctgtgattggccatgtggagccactgaattgagaggagcttcaggttgtcagccactgctactccctcctgccctgttgtggtttccttcttggccacaggccctgttggacagtctctctttcaaagtttctgtttgtctcggtgctgagtgttgcctttcctcccttggctgtgtggggacagcaatgactccatgctttccctagtcctcggggacttgatgatgcctgggatccacggcaaccgtgcccatacatctgcatgcactctatgttgctcgtatgtctgtacccactctctgttgcccgtacgtctgtctgtacgcactctgtgttaagcccttacattaagatgctctgaatgtactgtctctcgagtgctgaattcatatagtctttaaacttggtgacactttgtttttattttaacatcaagcacaaacacaggagctgtaaacaagtgtctgtcttaaatttgccatcttggttaatacttaacacctggctctcagagccaatggaagtcttacacatagcattcacaggcttttgttagtaaatactccatcctaccaccatggtttctctaaatgataaaagcacagttttatactatattttcaccacattcatacaataggtacaagcaaccccaagagcacagtaacattagcaagtgatcatttttttaaaagatttatctatttattttatatatgtgagtacactgccgctgtcttaagacacaccagaagagggcaccatatcccattacagatggttgtgagccaccatgtggttgatgggacttgaactcaggtcctctagaaaagcagtcagtgctcttaacgactgagccatctctccagctcagcaagtgatttctttagagtatcttcttatttctagtgctaggatcgacccagagcctcccctacacacgggcaactgtcacaaccacagcactactttgaacatgtgtttcctttgtctttaactgactgcatccagttgttacctgtttaggccccgcttacagtttgcaatagcttgtattaattctttcgagaatttcatacatggtaatttgatcatatttacctccccttccccaacagatccagcccacccccattccatacccacccaactttgtgatgattttggtttttgtatccatcaaatccatttttgttctatatgttctcaaggcagtatggagctgaccccctctttctgagaagctatcagcaaccacaagctcctaagctagaagggaaacctgcttacttttcctttctatgctggaattctgccttgtgtgcgctaacacaggtttcgtgcatgctgtcataactactgtggatgcatatgtgcagctgccttgtattcagagagcactctctcagtgttctcacgcaccacctctagttttgcattctcctactcccttttctgcaatgatccccaagccttgggaggagaggctatgatagagatacccaacatggggctgagcactccacaacctctgcttctctgtatctttaccaggtgggtcttcgtgttgatcaggattccactgcacaaagaagtttttctaatgaggttgggaaaggcactaacttgtgagtatgggatgctttgggaatggcccacctaggctcatgcgtttgaatacctggtccccatctgctggaacagtttgggaaggattaagtggtatgaccttgttggaggaggtgtgtcactgggaaaaggctttgaggtttcaaaagacccatttccagtgtctctctgcctcatggttgtagctcaagatgtgagcttttggttacttctccagcaccatgcctgcctgcctgttgccatgcttcccaccatgataagcctggactctaaccctatgaagctataagttccaaattaactcttcctataagttgctttagccacggtgtcttatcatagcaatagaaaactaagacaataaataacaataaatcattagtaattggtttaacagacagagtactacactaggttcccttctaaggcctatgactttttagccacatagttgtggcccataggttctatcctgtgaacaggactctgtcgctaccgtctccgaccagcagaaaagaagtgacgaaaccgacgtccttctcaaggcagtttattcaggaactttacaaatgtgtcggaaaaagaatgccccaacctctccagtccactctccctcaccccagtccacgtaggcacagttcattggctcaggactacattcttcacatcatcagatcttatgtcgtggtgcatctgcgcaacgcagctcaaggtacgtggctatcttgagggatatgaggaatcaggtgccagtcataagacttggcagcagtcccgggcaccatcttggggccgcggccacacccgctcctcacaggactcaaattcaattaaaaaaaaaagtagttggttgctctcatgacattcataccacggttacactagtgggtgtgtcgggccagtttttattgtagctcatagggttcacagattgatatgagggaggatagccaacactgaaaaccttatttaaaaaccatcatgaaaagctactaccaatcgtgtttgtaactaccactacactgccagtacagaaaggaagaaggaaagaaagaaagaaagaaagaaagaaagaaagaaagaaagaaaggaaggaaggaaggaaggaaggaaggaagaaagaaagaaagaaagaaagaaagaaagaaagaaagaaagaaagaaagaaacaaagaaagacaacagcagaagcttcctagaatataaatatatacgtatgtaaagtgcttaaatgaagtcaatcaataagaagacaatgtgcctgttcgataatacagaccaacaaatataaaggtcagtgccagaaatacgttaccacttttggaattgttggacaatgagatctcaaacattacaagttatttgccattgctcttggcttccctccagcacttaattaataaaaccctatggctgaacacaccacaggtgtgaaccacagatcatagaagagtcacactggtactgacctggaagccttgtctctattggctggctttcatggtaccgagaggtatcatgcatgctcccagaggaggaaggcagtcatcaatcttagacttttgaaatgagaattcacctgtagctcagactagtcccgaactttaggctcacaccatcctccctccttggtctccctagtataggagactacaaacacataccattttgccaggcctcaacttcatttattttttaatagtgctgtgcttaacaagtaactatgacattcctgaatcgtagccattgattttatatacttccaacatataattgcacagaataaatactctcaatacaaaaagagagggagttggttgtagcaaaacaagatcagaccaaagcaagagagaaatccaacatggcaaatgtcaaatgaaccctccaactccgtatctgatgtttggaaatcatgatggagtcatctcgtcttgagctagagagtggtccagtaaattctcacagcacgctaggacgtttgcagcccctagctgcaaactcttttacagcaaaacagttccaaaagtctaaggaccacatggtcaggcttctctcagcagcgacaccactctaggcatcactgtttatattagtcacttctctaattgtgataaaaatgcctgacaggaggcaacttaaggggggcggggtttattttggctctgttacatcttcagtcctgcagcagaagggagctcacactcaggctcagcttgcttgctcctcaatcttgtgcctgggcacacaggttagtgttgatctacatttgaggagcattgccacccttcagttaacctaatctgaatatcattccgaagatatgcctagagctttgtttcttaggtgactaatctagctctcccgtcaaattgacaatcaatattaatcatcatagttgtgttttagattcctcgcctggcagacacaagcagaaggcatgcagatttcacatgtatcccttgttgctacatgtatgacatctcccatccaacataccccaccaagctagcttacttcacattaagattaacttattttacccagaatccatagttttcttaaggtttaagcctaagttttcttggcaccatacagtccatgttttgacaagtatataatgtcagttacccatcgttagagtcatactgcatgattttactgctctaaaaattctctgttccacctgctaataccctcccccaccacagctcttgacaaccactaaccagccttctcaaggtctccgtagttttgtcttttccagaatgtcacagagtaggaaccacaccctttacaagctggcttcttcacttaaccagatacatttcaggtacctttatagcttgattgctcacctgctttgggccctgaataaaattacaatatacgatgtaccacagtttactgcctatccacctactgaaggacatcttggtactttcacatttccgcaattacgaataaagctggtacaaatacgtatgtgtagttgttagcgagcacagagcttccgtgatacttggacaaacaccagtaagcacaattcctggattgaataataagactatatttagttttgtaagaagcaactaaattatnnnnnnnnnnnnnnnnnnnncgggaggaggatgtgagggagacaggggaaggggagggcttgcgaggggggcgtggtgggtaggtcacgactggagcagagaggatcctggatccaagagccacttgcaagccggtcctgggcagtccgtgagtagaaacaggaggaggggctgaggaagggtgcggtctgggttgccacccaggctagccgggagctacggccgaggctgatcgttcaccttcgctgagcttctgcctgggcttcgcctccgcggccccaagggtaagtttcccatgcccgcccctctacaaccacggaacatcaggttcccgcggagtcccaggtcgtgagcgcagcttgctcctggggctgttccctcccctcccttcccccaagccctcttcccttctatggaaatagaagagacttgacctggggggcacaagggccgagctgagtaagttatcaaacttagggttttgcagcccaagctcacatccaggggactgctcattcctaaatgtcttggaaacatttaaaagaagaagggatagaggaaggtctcctgcccctgctcagagttctgtgctgagaacttttttctacggctcccatgagagctctttctcccctccaagtgtcttttagctttactttgtataggtaggagaaagatgtattggactttgagagttggggaacttcggttttctcttttaaaagacaccgttttctttgattgcaacagaattctattcactagacatgaatcacctcccctgcttcttgagtcagcaggtgaggtatcgaggtagaggtatgtggtttgtgattgcaaatagccatatatagaagttctgggtcctgtgccaatagaaagttgagcagccggggcaaaattcttccccaggaggtgcgttaaagagaagaggttcctgcccccgagagaacttcagtttctactcctcacaacatcataaaaagcagactaaaaggttattctatgaagaatcattactggttttcctgaaggtggaagtttcaaactgcctagaaaggtacttttaaactcgaacgaagatcagaccactgtccgcagatcagttggtgttgagaaatcggtagaaatgccagcaggaggaagtacaagaaaatgtagctgctgtaatccccttcaggaaggatgtgtttaaagctctattgttaggtcacttggcttgcactatggagtaattctctactttttacaagcttaaaggatggcttgataatacttcttagaaatttccacattatattggatcaacaaatgtcaagcatcagtttgggtcccgggccacagggcatggggattaacggttcattcctttgcaatctagatgcctgggttcagtcgggtcgacccaatagctgtatggtggggatttcactattgcttcctgtgcctccagcatcttcctgtgctgttaatgatgtctctctcactaactaggttattctgaggcttatgtttaaatcattgaatacagtttttttttcatatacaccagtgaataaacattgcacaaatccccagctttgagagctcactttctaacactttgcctgtcacctgacacctagtaaaaacacaagatgctggctgacagcataatctatcttatttcctcccagcaatagaaacagccatctccctattttacacatgaggaaatcctgactcaaattaggtctcgaattaagagatgtgttagcattttgtctgtgtgacagaacatctgagaggaagaatttaaaaggaagaaagatgtctttttagctcatggttttagagattttagcccaggtcaggtcagctggctccgttgctaatcattcaacgtgaggcaggacatgctcataacagagtccctggcagaggagaataccccacctcatggccgccaagacgcagagaccaagtgtgggcagtgccagggagaatacagggagctctgaggccgctcctaagggatctgctctctttagggagtcttaccccttaagcttccactgtttcccattaaattaggacaccatcaatggattgatctattgttgaggttaaagtgaccattcctgatccagttgcttatgaaactcctcagctctgaacacagctgcattcgggaccaaaatgggaaggcctgttgtacgtgacaagaagcaaccttatcctgtatccactgtatagtctggagagagatagagggtcagaccctttaattagagaggacaggccaggggagcagtggtggcgcacacctttaatcccagcacttgggaggcagaggcaggtggatttctgagtttgaggccagcctggtctacagaatgagttccaggacagccagggatacacagagaaaccctgtctcacctctgccccccccaaaacaaaacaaaacaaaacaaaacaaaaaagaaaaagaagaaaaaaaaaagagaacacagaagtttcagagaatgagcaaacattagggctaaatacttccagtgactattaatgtggtttcaggtccatctttggccctgaactgccactgaagttttagaatattttgttgccaggatgggtgggaacagtttgtatttctgaatccacactggagacaagccagcacatctgagtaatgtttacttatggaaggtgtgcctgggttcaaggaagtggcccttttcctgtctgcacctacttggaattagcctgacctcctcaaagagtagaaatgggtatttataacaagctgcgtaggcttggatcttgtaaaatgtacaggcaaggaatcagttcaaacccagctagaatttgtcttggtttgggggtgagaaacaaattctttcttcttcttctccttcttcttcttcttcttcttcttcttcttcttcttcttcttcttcttcttcttcttcttcttcttcttcttcttccccttctccttctcctccttctccttctccttctcctcnnnnnnnnnnnnnnnnnnnnnnnnnnnnnnnnnnnnnnnnnnnnnnnnnnnnnnnnnnnnnnnnnnnnnnnnnnnnnnnnnnnnnnnnnnnnnnnnnnnnnnnnnnnnnnnnnnnnnnnnnnnnnnnnnnnnnnnnnnnnnnnnnnnnnnnnnnnnnnnnnnnnnnnnnnnnnnnnnnnnnnnnnnnnnnnnnnnnnnnnnnnnnnnnnnnnnnnnnnnnnnnnnnnnnnnnnnnnnnnnnnnnnnnnnnnnnnnnnnnnnnnnnnnnnnnnnnnnatgtggtgtccttgtgcagaccaggtgatccttctgccccaacctctcacaggctgggactgcagacagcaacactattggttttaaaaaagaagtgaaaagaggcttcccagaaactattcttctaaggcccagagtacagagctgaatttttcctgccctgcggccctcaaaagtccagggccaacatgacctctttgtcgctgttctaaggcagggggagggggggaaggacacctgggtcccttcctttggctaccacactatagagatggagtatttaaagattgaaagtttccagggagctgggctgtgggggcgcatgcctttaatcccagcacttgggaggcagaggcaggtggatttctgagttcgaggccagccagggctatacagagaaaccctttctcgaaaaaccaaaaagaaagagagagaagaaagaaagaaagttagtttccagggaagtcttctcaggcagtactgctaactgtctcctccgggtcagtaccctgaaggcagacatggggttttctgtacctccttgtttgttcctcttcccaatgggccactttgagtaaatctcctttctctacttttgattcttacttatctctgtctaactggtgtactgaggacagttggccagaccagaatgactctgctagcagttgaaattgctaaatgcttagttaatccttgctcagggaacaggtttcttgatgtcagatacacaccctcctccagagaagtttctcattgactgctgactgttgctttctggattaagcattaagagttggactgaaaatgttgtgtgctgaatcacaacatggctttgtccctttaatactttgtttcttttctagattgctgtgatctcggcttgagagaaaggtggactgtcatggcctctatctgggtgagtaaaagccaaagcaccgtggcttacgtgagtcaaacagaaggacaaactgatatatatatatatatatatatatatatatatatatatatatatatatgaaagttgattaactatttaaaaaatagccaaaagctagagcacatttaagaatagtaaagtatatgtgtcataagcaggtgtggtggcatgtatctgtaactccagaactctgaaagttaaggcagaagaatgtcaagtgtggggagagaccgagtatgtagggagagcttatctaagaaggactagtagtaaaaatgtatcagaggggctggtgtcatgcttcaaaactacacttaaatgtagagactgggtttcagttctcagaatccacatcaggctgcgtacaaccgcctgtggctccagcctcacaggaaggacacccgtatttatgtgcatgtaacactccccacacacacatacacacatacagtaaacatttttaagggtataatagcagtccatacttggcaaagaggccttaatggagaaaaaaaatgtattgtataactcagcctacacaactataaagatgacatttattatcagcaaggaaagatagtttcttctgttagcaaaattagagagacttctagctcattgggggaaagtaaatctatattccacgtcccctcttacattaaaataaaatttaaatgtgtaaagcatagaagtgagggaatggttagtaacgtgcttacagtggcaaggcccaggtccctatgggagcccctgtctcaaaaactacagggaacagctccccaggaatgaaacacagtgctgttctgtgacctccacatacctgcacgcacatactgccacatgactatgagcatatgtacatgcatgtacatacatgcatgcatataaaataaataaataaatacacaattatacaaaaaataaagctcaagtggatcttttagaattaatttggaatgggtaaggccattacaaccataggcctaaagcaaaagacaaaaggttttctttaatttgtttatgtgtaaatttgtaactgtggcagcaacatcgtaaatagaatgagaagataaccttcagggcaacacatttgtagaacatcaggcagatttatttctgtaacacacaaatgacttgactaaagcaatttcaaaactgcgctcaatgggaaactgtagacacaaagtagcaagtgaaaggaattgcaagtatccaattcatctgtagacagaacctctcagaactgaggaaataccagaattcatgggaaaaggaaccattttctactgaagaggcaggtagctggaaaaaatagcaagacaaagttatgcactcaataggaaccttcaaattgttcataggagctggttatacttttggacagcattcgggtcagcatccgtcatcgttaaatattcttgtcctttattccagcaactctacttctcatgtatcatgaatgtgaatgaaggttgaaaaacaaaggtcaaagcatatttgcttgtatgattggaaatatacaggcaatgtaatgattactcagtaggtacgaattacttgttttttttaacttgcagccattttaatgtaattattttttaaaatgtagggataatattcagctctatgaaataacattagaaactgtaccagaatgagttatcagtgataagctcaagttacaggaggggtagatgcagaggctctgtataaaaaaaggacatggaagagatacaggcacaaagcatctctgacaacttcctaggcaggtggcacctcgggtaggttgactctttctcatgtctccctatcgactcttgtgcctttaagccatgagtacattttatgagttagagaacttgaaggaaaagcatgcagaggtgtggaccatgcaggggagctgtgccgagcactggtcaagagccatctttagtgctctccatacccgaaagccctctgactgtgtacgtctccaaaagagtcgtgaagaggcttctcaaaacgctagccggggtgcgctagaaaattagcatgaagtctactgacacacttaacaggctcagagacactggggttgagggtgagacacaagatatgagtttcctgttgcagtcaagccatagcaagtgactatacgttgaaggtaaagcagttagctggcagtgttcctccatggtggagtgcacacctaacatgtgctaaggcactgggtcccaccctcagcactgcatgaacaggtcagaggtattttttgctgcacgtggccatacaaaacccataatcccagcacttggcaggtggatctggagtttacggatagtctcgactacataaagagttctcgacagttgggctactttagtgccactcccaccaaacacacactcacacacacacacacacaccataacacacatactctctctcacacacacaatacacatattcacacacacacacatacacacacctgccaaatctctttcattatctcacagccctatctgcaatatgaactgattctcatagcagtatattttccgatgtaaacataagatttcgatagctagaaaccgactctgaatgaacagtgtgttccatgtgcacaatgtggaataccatccagccttagaatggaaggtgtcttaaaaacgggtgaaccatgagcatgtccagctagtaaaataagacagtcatggaaagataaacattgcacaactcctcctatgaaatacgcagaggactgtggcttcctggagcacaggagggccagagcgtgttatggttaagaccgcatagaacttgtgttccgcagtatgaaaaggttctggtaattgcttcagaacaacgggaatagtctcactactactgaacgatgcattttagatgggttgagatttaccaaaaaataatttttcaggcttaatattcttgtatgcgtccatgtaagtgcttgtgaacatgtaaggatgtatgtgagggctgtaagcaagagtgcagtaaagactgtaggagagagagagagagagagagagagagagagaacagccagaggcatctggtaaagagcagagagaaaggaggagactggtcatggccagggctatctgggagggagggagtatagaaaggagccggggaaaccatgccaggaactggtatctagaaggaggggggcctgtgaagtttggggagcccagagcttgggagctagtatggtggcgggggagtcagggactaagaagggtcaggaggctagcaataaagatggcagacttccggcttatctctcacttgagacttgagacaaaagcctgccatgcttttccagctagcagggtccctcccctctggctgactgattcaggctggtcaaatatgttcagtgcagatcctgagtcctgactgtatttacctgaagctgtgggcctattagtttccttttctttgtttaacctggtcagtccaaaattaaagaaagggtatctcaagccaccaaaactacttaaaacctccagccctctagaggaaaaacgaatctgctctgtagggcctctctctctctctctctctcctctctttctctctctctcctctctctcctctctctctctctctctctctctctctctctctctctttctctctctctccaccaccaccgcccgtattatataagtacttctacttgtttgatgaagttcattatctgttgctgcccactgtgtctagtgtgtcccctgccttttaaattttatcatctgtggagaacgtgatcgagatttctcagtatgctttttggtagtttggaatttaaagtttcactttctttgagtatttaagttgtgtcataatttgtaataacatcataattcaataatactattgttctagaaaatttaataacagttagaccaaaatgataaaaaataaactttagtgtgtcttaaaaaaaaaaaaaaagactcctaaacagtaagactcctgtgtctgacttccagctctgggatcacagtcacactctgctgctaacggcttttcacactggtgcacaggatctgaattcagcccttcatgctcaccaagcaagcacttccctaaccaagctacctccccagccctctggctttaatcatttaatcagaaagttctgctgtgacacaaagatttgctgacactagtgtgcccaattctggggagaccagaggtattagatcatgtggatctgatgctacatcagaagtttgtaagctgcctgatgtgggtgctaggaaagtcatgaactccagcaccaagccatctctccagctccaggagtgtaggtttctattaagacacaatatcagggacactagctgttcttcccaaggatctaggttcaattcccagcactcatgtagtgaactcaaggtgcagggatccagtggtcttttgtagcctctgcaggctccaggcaagcacatggtacatagccatacagaccagtactgcagcactgtgttgctatgaggggaaaaaaatgtttattgcatagttgactgacagggactccatgagctaagctgcccagagctacctctgtaagatagcagcagagggctttttagaaagtggaaggggaccaactgctttctaaatggatggtgcaaagggggagtcttagtgttgtgtggcacaagcagaaacgggcatcacacagcttcctggaccacaattctctagaagaaggtgtcatgggctgcattgggggcttggggattgagctcatgacatcaacaggtcatgactggacagactgacttcagcactgacccatttgtgtgaagctggctccagcctacccccgagaggattctggaggcagtccctgaaagacaacctaagaacttggttatttaaggaatttatgtccgaggccccgctgagctcattcttgtttttttcttcctccttgcacaaaaagcaaatacacacccaggcacaaatatgtgatctaggccgcccatccctacacggctctggggcagtgggaggttgccagcatgtggttagtttattgtaattaactcggggctgaaagagaaaattaaggagacacgagaaaggcaaagagcctctcattctggggtctggttagagtcaccagccagctgaaagtcatgaactccagcacaagtaataacactggctgtgacaattgcctatatagagacattccttttacctggagctaatttcaaataagaatgttaaaatagcagggagccacgtttgacagctgagtgcatgtgacctttaagtctttctcttttcctagatgagaactcaaagtttcctgggaatctcaaaactttgtttactataaaaagccgtaccttacgtatggcccatggtacggcttatggttttaccatattaactgcaatcctatttaatggctcacttaccaaacaactcttgaaatgtaaagtagaaaccaccaaatggggggagggggagtggagagggagagggnnnnnnnnnnnnnnnnnnnnnnnnnnnnnnnnnnnnnnnnnnnnntttaagcaggactatctttttataaggacataaattccttaaataacgaagttcttaagttgtatttcagggactgcctccagaatcctctcgggagtaggctggagccagcttcatacaaatgggtttgtgctgaagtcagtctgtccagtcatgacctgttgatgtcatgagctcagaatccccaagctcccagtgcagcccatgacaacttcccctagagaatctggcccagaaagctgtgtggtgcccgtttctgtgaacatgggctgtccttttccatcactttcttcctctacaatgctcatgtgtaaaccaggcttgtcccaagattcttttctgtggtgcagtcaggaatctgacttcacattaggtgtctcgaaggaactctgtgtctctggccctgcccacattgctgctgatagaacagggtcaaggaagaaattctcagatactgtctcagtacattcctgctgaagagcaggaggcgatgcctggtttcttcatgttctaaccgaagatgttgaatctctgccactgtttttgatatgtaatctctggtgcaccagtatgtcttttgttctgacattttccaagtctttgtttatgtttcatctgaccctggtgtctagcctggaactcacagtttcttgttggatgttgcctcgcaatatagaattgcttataacacttttaaaacattttatttttatttatatgtgggttcctgcatgtatgaatgtatgtacaggtgtctgggggccagaggttttagatcatgtggatctgatgttacaggacattgtaaactgcctgatgcggatgttaaaaaccactgagctatctctccagctctaggatgtaactttctattaagacacaatagcagggactggggaaatggctaagtggctaagttcactagctatttttctagaagacctgggttcaattcccagtacttacatggtggatgacaactgtctgtaactcaagatacagggatccagtgatcttttgtagcctcctcaggctccaggcatgcacatggtgcatagacaagtgcaggaaaaactcctgagcacaaaaaataattaaaaaaattttaaagtgtgtgtgtgtgtgtgtgtgtgtgtgtgtgtatgtgtctctgtgtgtgtgtgtgtctgtgtgtgtgtctgtatgtgtgtgtgtgtattgccatgtccctccactgtgatatcagagcacattgactttcctgcacattagcatcttcaccaacagggaagttccctgagccagtggtcaaagttttaattggacatgactgattaaactattaacttgttattgtagcattgaatttaatatccagactcctttccttcccaagaggtgaagctggctccaatctcagccctctaaatcatgtggtctttctggtgaccagctctcttcctgaaactgtcaaaggaccatgatgagtcacctcagactcagaacaaaggcactccaaccactcaggaaattccaagggtttttgaaactctttgccaagaaccaggacagagccgaatatattctcatcaaaccaccttgcgactcgcattgaagagctgggtttctgaaaccttacctgcctttatttctttaatgaaattgtaacgacacaaactgcagtctcttaaagccaaaacttagaagctttgactgtaagttatatctatagtcactaggaaactaggaaactaggtgaatataatgaagactggagaaacgagacattctgaacatgccagtcatgtagcagacatgaagaacctgcctttgctgtgggcgatgtagctcagtgatcaagtgcttgcctgcagtgcagaaggccctggctctgccccctaaaaccataagaacggggtatgggggagaggggggatccttaatggtggaaatgttgtggaatgctgcaagcagcaatctgcagatggatcaaattcaccagtgatcatgtgttcctggggacagtcagagcgtggctgcccttccctgcctgaccactcccttctttttggggactttgctgtttgacagatggggacacttgatctcatttctgtagctcctccagttgagagacagttgtgtgtgggattacaaggaaggtgcagagtgccaggatgagagaatctgtgatggtacttttataagtaatgaaagatatcgtaagtggtttaagccctgtaaaaaggaggtgagacccttcagaagagacccatcagcagccatgatgaggtcctgaaaacagagagaaagacttaccacctaaaggagagctccattaggacaagtactcaaagagaacatgacaggagtcctgaggagaggcttggtgtgggagagaagctcagagctccatccacgtcttatttcaaggttgtcttgggcctgggtcataactgtaaggagaagggagaatgccaggtcacagcaggtggagtttgaggagtcctgggggccctaactgcccatttcttacttggttggagacatcccagtcctctctccttcctggtgtgttcactcttcctgaccttgcaggttgccacatgggcgggagtcacagctgtattcaggagtgtggagaagctggactctgcctccgccttccctctcgtctcccacatctcaatgatagatctggctttgaaaatcactttgtaccccaagtcaaatgaggagcctgttgtagttaaggttcctcttgctgtggtcaggggccttgactgaggtcaacttgagaagggagggatttacttcactgtacacctcaggtaatagcacattgtgaagggcctggaggcaggagctgaagcagaagccatgaaggagtactatttacttgtttgcctgccttcttatggcacataggaccaccaagctaggggtggttctgcctgcagggagctggaccctctcacataaccaccaatcatgaaaatgccctcacaggcttacccacaggctagtctgtctttgcagagccatcttcttactggatactagtcatactggatcagaggcccatgcctgtgcagcatgacttcatcccaaccattgacatagggagtgagctagatccaatcacagttacattctttgggctgctggttaggtctttggcataggagaggcatgatctcatgccacctgcctcatgtgactctattttagttcagggcctctagtaggacacttcctttggttttaaaaggccacttctttcttgaagaattgaacaaaaagtcttaacacttcaagtttgggctgctttggtttttgcagcctgctccatttccctttgtatcataaagcttcctgacccaggacagcaacttgacattgagcacagagagtaatcatttctcccaggctctctgaaagcccttgagtcctcgagttttctctggggcttaatttttttggatctggcttttatggggctttatgaagtgatgcgtgatatggcttcacctcaccttcggaatgtgctcacggcggcggccattttttctctggagcatttggctctaaatatgctttgtgtcaacagagctggcacccgatgtttctcttttattcaccctttgaacaaagagcttcaatttattgcaggtctggtgcacagtccatgaaggaatagatgcagccgtgtttagagagaccaagggaacagcagacagttaccctgagggtaacgtggccgtgtcagtggcttcagggcacccaccatgctctgtggctacccaaaggatggctttaggaagtgagaaaaattctactggcataaggtagatttaaaggccatattagtctagactagtaagttgaacagcaggagggactatctggttgtatcaacttaggcaagcttcttttttattatttttatttttgtttgtttatttatttatttattttttatttttcaagacaggggtttctctgtgtagccctggctgtcctggaactcactctgtagaccaggctggcctcgaactcagaaatttgcctgcctctgcctcccgagtgctgggattaaaggcgtgcgccaccaccgcccggtttaggcaaggttcttaagcatctctctggctatccaggctcagggtttacaagcctgctttttgtgtttatcatggagattgaaagtgttcctagcaaagctctagacacacaacaactaaccacccttattacaaagaattcctgtttgttttcttacttcttctcattactttacttcccggtgggtttcaccatcctttttcttttgggagcatttaaaggtcaagtttgagaaaagggaagaaactaaatatacacaagacagtaggtggaatgctgaccaagcatgattttgaaagtggttttagccaaatgtccatggaggttccccattggcactgactgcggtactagggaaaggacctcaactaagaatcaataaatgggccaggcagtggtggtgtatacctttaatcccagcacttggaaggcagaggcaggcaaatttctgagttcgaggccagcctggtctacaaagtgagttccaggacagccagggctacacagagaaaccctgtcttgaaaaaccaaaagaataaaaaccaaccaaacaaacaaacaaaaagaatcaataaatggatcttgtctgacaaaaccggaaggctgcaatgaaacaggcaatccaaagagctttggctgtaactatcaacattcctaaaacaacacctcataactgagttccttagcttccacccgtgcagtagtcaggtcttgcttgctggctttattctagttttctaggggaccaagaatgaagtgcagtgttggttatgccacttggtgatccattcaaaccactgagggtctcatgaagccagacgctgagtcccaccccatcattgtggactctatgaaagagggctatggcttgaggatttacgcctctggaaattccaggggattcctatggagtgatccaggaagccattttgagaaccattgaggtagagttccctaacctccagccctggcaaggtgatgaggtgtagaacatgggcctcttgttcacatggaggtggccttaagtctaggcaccttcctgaccaacaaagttctgttagacaaaccatctctctgggactgaacacacccttgttctgttatttttaaatatgtgtaggtaggcatgtgtcagcatgcaggcatagagatttgagtgtgggtacctctggaagccaatgacactggatcctgtgcaactatagagtttcagatggttgtgagactcctgattatgcactgggaactgaacttgagtcctctggaacagcaagtgctcttaacagctgagctgtgtctccaactcctttgaatctacctcattaagatcactgaagaaatctaagatgtttgtatgatcttttgttcattatctagtatgcattaaacaatatgagtctggttatttattttaaaatcacttttgataaattatatagatatggcctggatagccaagtcttaccaagtatatcctgtaatattgttcatattaagtggctaaaacatgtttcagtatttcactagaattcaacttcagaattcccttgttctgggccgggctttggctcagtggtagaacactcagttgtcatgtatggggccctggggtttgaatcctgcacagcaaaataaacaactaaataaaaaccaggttcccacggcttctttcaagttgataggtatgtgtgcattttggagaaggagagagggaaggaaaggaagatgaacccttttattatgtaagttgtttctcccatctaacccttcacctgaaaaaaagagttgcatgatgagttaggaattttatcttcatctagttttgtaagttggaattttaatagattttgatttgtaggtggtagagagcaggccagaggtcacagagagtgtaaaccctgaatctttataagacatgaacattaaggacccaccgtattgtcttcttgtattcagaagaagccatgttaagtaacctcgtggtatagaatcacacaaattgaacttcataagaatgtagaacctagttcctggttcctaaaaataaaattcagtatatctgaaatagatccaggacatggtcacatgcattctaaagtgtcgcttcaggagatactaaggcatgattccagaaatgcaggggtgatttagagcagcacagactgcattcaaaggcagatctgtggctcagctagctgagtggatgaaagtttacacagagtcaatctgcagactgcagtaggttgtagttaacatatgcaaggtgcctagcatgggggcacctaatgggtccttccagagcatcaaatggcgggggtaggtggataagggaagggtgagaactcagaggtgggagtggatagtaatgaagtcagttgtctctgccagtttataaagcttattaagccttgaactccaaagaattatgttaaagcgactgattaagtcacttccattgtctttagacctggcacattctagcttgttagttttcattttttcctttggagtgctttaaacaatgtttgacaacattgaaacaaattgttccatctcatctattgagtcagcagactctcgtctctaccgtgccagtacattaattttccattcactttaatgtgacaagataatgtcctttcatgaaaatagacacttcagaagagcgtagatgtgaccatattaattcacaacaacaccatcaataccattcaataacagggtagaaagtccccgtttaaaaagagaatgtcagatgttactgggatttggtgcagatttttatttgaaaggtcagaatatactatatgaggacatggtgactttgaagatcttcaacatccttttggctgtcatgtagttcttcagcaatttcagaatattttattcttttgcaatatggtctttcttagctcactgtcgtgtttctaatttaagtgcttaaaattagtaatgtagctatttaaaaaaatatatactctatgctattcttgaagctccaagatgtcagcagagttctcagacaagaatcttggggcaaccatcacatgtccatcaagcagaacataaaagacaacagtcttgatagcatttttgtttattaattctttagagtagggttccccaagcacagtggtcaacatcagtttacacatcccagcatctccagtccacagctgctcacatcctcaatgtgagatgtgattggcagcttactcagaagcctcactggggaatacggtggatgaagagaatttaagtttcttatattttatatctatatgtaggaactttaaatcctgcagtcttcagagtctctgatgttgaaacagctcattgccctagaggaacaatgttttatatgtgcagtttgtcccaccttgggggcctctttctacgtgtagtacaagtatgtctagggatgggagatcttgcactatgccaggaacagcaagaacccgggctgccacaggtctcgcccatgcttatgccctactggactgggaagatggctcagcagttaagagcacttgctgcttttccagagggcttggaagttctgctctgtgctcctaacaacttaaaaagcttttgctccaggtatttagtatgcaaattcagagcctcagggatcctttctggaactgtgccagtgcactgagctcagacaggatcctctgagcatgctgcctgtgggctgtatgcaagcctggttcagtgagccctcatttagtcacacacagagtcgacagaaggcagtggaattaaaaaaaaaaaaaaaacataaacacctttatacaatttcatcaatgaccatgtgagatacacatttagtctatacgtaactctagtataaataaaaatgtggctttgaactagcagaactttccttctaggttggacctcgaggaaccataaaagattatccaggctttagcccgtcggtggatgccgaagctatccggaaagcgatcagaggacttggtgagtggagcttttcagctcctcctgtatggctggtaagaccagccaggaaagttcccgtctaaaaagccggttggcccaatttggatcctgaattagagaagttgtcaggagatattttaaagtgtgaagcaatgaagaagagcatgagagctgagtctctcagtacataaagcatttgtaatgtttgctcgattaaatcctaccagcaccacaacagctccttcaactgcttatcaccatcatgatcacaaaccatgatggattcggtccagaacagtcttcccaggttctatttcaccccattacctagagaaaatcatctttctaaattagactttacacttccagtaccacagctacatgcctaagtacgtactagtttctatagtttcaaccggtaaaaccagagaagtgcaccatccgttctttgaccgactgtttttacctctttttttttttttttaagatttatttatttatttatttatttatttattatatgtaagtacactgtagctgtcttcagacgcaccagaagagggcatcagatctctgttacaggtggttgtgagccatcatgtggttgctgggatttgaacttcggacctttggaagagcagtcgggtgctcttaccccctgagccatctcaccagcccctgtttttacctcttaacgtaatgtttttgagatttattcatgttgataagtttggctctgggtcattaattttaacttcacagtagtctattgtatattatatcataaactggaaatgttgatgaaacattcaaattgcctataactcttttctattacagtgcaaaagtccttggtgaatgctcccgcttagacttcactgtgcacagttgctagtatttctctaggacaggacaggagttgtgagttctgggtggagatggccagaattcttatttttaaactagaaattttgccaaatcgctctctggcgtgattatcaaaattagtagtactcttgggcctggagataaacttttctaagtaaaatctcaagccacagaaacatcctcctccgcttagtccatctcctggacaatgtttgcatctcccctcccccaccctacccctgccacaggaaagtatcatgctaacattttaacactatcacccagttttaacattaacaaaaacaagcttagtaatattttccctaggattcacatctactgtaccattttaatcgtaaagtcataaagcccttctgcatttccctcccaggtttagaagtcctgcttttttcctgtttacttgatcatcagtctacaaggggttgacatatgggaggagcacttagagatatccacctatttgatctctaatgaacatttaattgtctcagcacagttcttcatgttcctttccgtctgcataggaaagagtagacatggattgacttgactgggttttatttttccagccctcaaatcacctaaataaacttccttttcaaaaaacaaacaaacaaacaaacaaaccaatcaaacaaacaaacaaactgcaaacactcagattctaacccagcaagaagctggaaacttaaaacttaaaaagctttcctgactgagcttgttttggccccctgaatctgttgtttgaaacagataaggagaatccttggctcataaaataactttgttctcatttagggactgatgagaaaaccctcatcaacattctgacggagcggtcgaacgcgcagcgacagctgattgccaagcagtaccaagcagcgtatgaacaggtaccatccatgaacacagcgggccacagagacagtcacgctgtgctccggttccacccctgagcaccactcacagatctttggctttaccccgagtgtggtagagttgccctgtgcatctgctcaagagccaggactcttagttcaggttttggctttcaccacctcaatggtttggggcttctgcttcttcactgtggaatgaagaatggtgacttagagcagtagtttagagcagggtcaccaccctgttgaggttaaatgacccatccataggggctgcatatcagatatttacattatgattcataacagtagtaaaattgcaggtataaagtagcagtgaaataattttatagttggggtcaccacgacatgaggaactgtcttaaaggatcgcagcattaggaaggttgagaaccactgcgctagagcaatggctctagagtccagagcacacttgacacaaagggagactaaccttttctttttctgagacagggtctcatgtagcacagactggcctagaactcacaaagtggctgaaggtgattttgaacttccccctacccccatccccgtgttcaacctctaagtgtggggattatagccaggagtcactaggcctgcattatatggtactgaggaacaaactcaggtctttgtgaatgctagacaggtactctaccaactgagacatgcccctagtctcaagagagacactttgatgacctcaagtcagactgtgggtagagggtgatcctgacttccagtgtgtagaggttgaagatactgttaagtatcatgtgatatgaaggacagtcctcccaacaaagaatgatctgccagctatctgagaaaagcagcctttagcttcccttttaatgctaaaatagttatgtaaatataggctcagaaaacccaacataagaaaacccattaagtgtcagaaaatagctacatacatatccaaaaatagctacacacgaacaagactgtcattgacacacaatgtttgtcatctctttgttgaatagtgttctctgctggagactggagattcgctggtaagagaggcagttcctcccatcacctgtggggctagcctagcctcctatcagaaacataataagttcagtcactgcaagtggagcatgaaagtggggtgatgtggtggaaggtaaccagtgatggggactctctgaccgtggtgagggggtgatatcagcagggtgctgctgcctgacgggctgctagaagagtcaatgttgtgtctgacctgctccatctgcagatgcacagggcaagcagtggggagaacaaatgtaagggtcctgggagcaggcagctggaagtctgggggagacagaaccccgatatagccggagtgtggcattgatgtgacagagcatgtgtgtggctgtgtaatgctagagctttttagaaaatatttcaggtgccaccatgtttctcagcctagctcaaatgattgtcccaccctaggctcccaagcagctagaaataatatacaagggtgcatcacagtgcctgactactaacatttttatctgtgggttttggcatgggattttgccatactgccaatctgcttttgagctcccctattcaaatgatcctactaactcagcatctctcccagtgctgggactacagatgcatgcacgttacagggctgagcttgagcgctgtgttagcagttctcaacctgtgggtcgtgaccccctaggcaaacctccaactccaaaatatttacatcacaattcataactgtagtaacattacagttatgacgtagcggtgaagcaattctatggttggaggtcaccacaggatgaggacctgtgttcaagagtctcagccttagcaagggtgaggaccactgctttatgcctcgtgcacgggctggattttattctacagtagggactcattggaagtgtgtaagcaggggaaataatagcatccagttttgaacactgaaagatcatttgggagcctggagatttagcttaatggcagagtacttagctaccatttctagggctctgtgctccatctccagcacaacaaagaagatagaaagattattttggatgctgtgggtcacgaaggaaggagggagggccagcaggtaacagcagagtcagttcagacatcacccctgagagtgttctcagtacctcaggcactcaaactcctgtatcacacactcaacatactgtacaataaaatcgtactttatctattaatgccttaattttcttattaggctgaacatcgtaggcataagcattgtatcacagctacctttaaatgtctagcattgattaggcaccctgaagcatgtactgaaatgaatgaattgccaagcatctgggccagaacccctcccatacatgtaggtgacatggacggtccgttggctttttagagcactgtaaagtgtggaggaagaactagtagaggcaaagggcaaacagccatttctcactgtgtgacagaatgagagcatgtaaaataagatttctttgccattgtgttgagaacaggtggcagcagaatgttgcatttaaacatgaaaaaaaaaaaaaaaaacccacccgctgcagttcaagcccagaaagtgatacatggctccatctcatgacgcactgtgtccctggtgggtggtgatggtgatcgtctgtatcatcagaactgccagaaaggtgccagcctctctaccaggcctgaaaataaaacagttccatagaacttctttgattattggaaatagaaaccacgtccctgccattaggtgagagaggtagacttcctatgtaatgcgtgggaaacagtcccaaaggacatggtcctgcctgggatgtctaggatccactgaaagagactgaccagctgttgtcctcccttctctctggaggccagtggagtctctgagatgcaaggcactttaacaacaagaccctgtcccttcctcccctacccaacccaagcatcgagagcaccaattacattcgttctgtttgtctgtttatcagttgttattttaattgtgcatatttgtaggtatggtgtgacaatttggtatgtgtgtacaatgtgtaatgagcagggtcctcggaggaatggcattctggtccacttctaaagcttcctttgggctttgcagaggtctctgtaaggcggggcattgtggaaatttcataaaatgaagatcaatatccactgagatattctcagcattcccgctattccctgtgggtgaacgccctttcatctcatctttatccttgcgtttctctttccctgggcagctgctgagaaagagaagagagacacgaagtttcatgatttcctccttgcggttttttattttaggagctgaaagatgacttgaagggtgatctctctggccacttcgagcacgtcatggtggctcttgttactgcaccagccctgtttgatgcgaagcaactgaagaaatccatgaaggtaagctcttcatgtccccagattccactgtcaattaggggcctctcgggacactcccttcagatttgctggggtcggatgccatttttattgtcctcttaaaaggatggggcgatcctgaggagctctgtgtaactggtagcccagatgtccctgggctgcacggatggtcacgtttttctgtttttggactaccctgtctctctttcctttctttgattaaatgaaaatgccatcatccatccattacttaggccctataccttgtattaatttcaaccccttgttttcttttacccttcagaacccccaaacctttcaccaaatctgtacactctgctctatagtctattggatcaagcacatctcagagaactgcagaatgcaagctgatatctctacccattggcttccgctctatggcagccacccgcatcttttggttgcactgaatcagtaccctaagcaggtcccttcatctccatttctgcccattctggaactattctctctgggatgtccaaaattacttttataaagatgttttctttttctcttcttcttcttcttctttttttttttattaggtattttcctcgtttacattttcaatgctatccccaaaggtccccaatacccaccccccaatccaatacccacccactccccctttttggccctggcgttcccctgtactggggcatataaagtttgcaagtccaatgggcctctatttgcagtgatggccgactaggccatcttttgatacatatgcagctaaagacaagagctctcgggtactggttagttcatattgttgttccacctatagggttgcagttccctttagctccttgggtaatttctctagctcctccattgggggccgtgtgacccatccaatagctgactgtgatcatccacttctgtgtttgctaggccccggcatagtctcacaagagaaagctatatctgggtcctttcagcaaaatcttgctagtgtatgcaatggtgtcagcatttggaagctgattatgggatggatccctggatatggcaatcactagatggtccatcatttcgtcacagctccaaattttgtctctgcaactccttccatgggtgttttgttcccatttctaagaaagggtaaagtgtccacactttggtcttcgttctttataaagatgttttcaaggaaggtgatgtgattcacctccctaaatctccagtgaacacttaaacccccgaatcctcatcaccttcatcacccaatagagtgtggtccatgactgtctatgctttttttctttaaaattttccagccataattccccagagaaatggggctattaggcagaacatatatattaagaaatttactgtaaggagctgggtatgccttgtgggtctgggtgataagcacacaacggcaggacaggtggtcagggaagacaggagccaccagcagtctctgaagctgctgcccacaggcacatactcttcattagagaagcctggcctttgctcttatggcctttcaagagaatgaaacaggcacaaattgagtgcagagtatcaaaagagttaacttaaagtcagttggtaatggacctattcataatggaccttcacacacaggtcagcatcggacaggatgaccggggactgtagcctgaccaagctgacacacagagctgagcatcacacccctcccttcccatccccattcactggactttgcttcgctggcctcttctctgtctcctgagcattctgagcgaccttgttttggaatcctcatccatgatgttccatctcgacccctcctctgcagacattacacattcatatgctcaactttactgttattgtctttttgtgccgttttaacaattttgtgtttatgatgagtttaccctgtgacaggaggtttttttggatttttttttctgggatgtccttttcttctgtgcagcttcctcttcttgcataggagcaggttgctcattttcagtgagggtcatctcaatgcaaggtggctcacatatacgctaacctgaccctgtgaactctgggagcatggggactctggtgcttcgttcagctggatatgctgaatgatcggaggagtgacacttagaatttgaatctcagcatacactctgtatcttttgggccaccgagcttgtatctcaattctcttcttcctggacacacctgtctcagttcgaataatgtagcaatgggatagctcccttaaaaaacaaaacacacacacacacacacacacacaaacaaacaaacaaacaaacaagacaaagcaaagcaaggtctcactttgtaggccaggtggccttgaattcatactcctcctgcctccaactgttggaatcgcaagcatccagctagagcacacctgtcacttcttcaaagcagcatctcccacacacttagaaggcagatgtgcacctggtggcccaggtagtgacaggtagcctttaagatttgaacctctttctcaactttgattctgtgggagttttctgaagtgagtgaacaatgagtcaggcacgcctgcctgttgccaggtaactgtggggcggagcctagacaaatgctgacatcccagagtattagaaaatgttctctttggttaagaagaaatccacagtaaggataccagactgagaatggtgatagcctcattaacagggaccctttggtcttaggctctcccatcttagctaaagttgtcagcactggtacagtgagtttgtctctacactgatttggctcctggcagatcacacatatatacttgctcaggagcgatctttggatcaaagaatgaaagacacacatgttagcttatttttaaaaatgccatggctacctcacagtctggtcactcctaaactttctcctgctacctcaggcccaaatcaggaagtggccaatggcccctcacctgaaatctcacatggttcagtggctctctctcctcttctacccccctttccattctggctaccccaccgtgtccactcaactctaaggggtctgtcccatcttttttgtttagccattagccactggcatctttattgatcggtcagaaaaccagttgggggcaaggacctttagcatttggacacacagattcctgattgaatcaaagcattagaaccaatccccaatacaatgcgagtcatctaaaaagcacaaaggataaagagggttttacagcctctctataagggcatgcctagaatgtgtctgcctatgattattctgcacatatccattggttagaatttagttggatggatgagttcagtggcaggcatcccagccacaattgaatctgtttataagtttcattggccttatttgatcaagttctactgcaaatagcttcacaaggtgagttagtgaccttgatataaatgaggtttagaggtagctgggctccaagccagcaagtcccacgacaacatttactgaagagttgaaaacctctgtgtatgagaaggctgctgaccaaccctgcccaggggtacaaggatgaacgcatccaaaattgctgcagagccctttctaaacagagtgctacatcagtttcctgggctaatcctcttagaccatcacttccgatctttaatgacataggcaattttcccttatactcttcctccctagaattatttttgactactttcacagtagaatggagtagtttctttaaaaacctgatgtcagtttactccagatgactttttattttaacactaaaatgcacggaaaatcagaaacctagtgtcgagcaatatgaggtcctacactgatttacttagagctgttctttcatctgtacaaaatgagatattaagcctgaaaagcatgaaattaattttttaagtgccctaaagataagatttctttttcctttgttagggaactggcacagatgaagatgccctgattgaaatcctaacaaccaggtcaagcaggcagatgaaggaaatctcgcaggcctattatacaggtaaccttgttttcttctatcctttaccactgatcacgtgtgtgagccaagttgtttctcctagcatcttgcctatcatgagcatcttatgagggcaggaagtagggaaagaaagatgcatcctacaatgaactgtgcatgttcagggcaagttagaatgtgatctgccacataacaatggtgttgctatcttgcctttatagcacccttgattcagagggctctgccctcaacattcacttaattgaatcagccattctcatcaatatcagagtttcaaatcattgtgcacttctatcataagttaaaaaccactcagattcatgattttgggtgtgggaagtttggtaagccattttagagctgatgtctgttagctgtgtaaaaaattagaacgtcctcactatgtaattcagaccatgctcaggggtggtatgaactcataggtgaccctcagccactacacttcaggctcagacatgagcacagatattcccaggcctcctatacctctaaccaattgcctgtaactcaggatcctcactgcacactcaggctcagtagctcagtagatggctaacagaagtcacgaaagtacagtactcccaatgacagttttgttataaaggaagtgactcgtggacagccaaatgacaacacacagaggtggggggtgcagggatcagggcgtctgagagctccaacctgaagcttctaccccaatggtacattaatgagcgatcgcatgtcaccatgttcacttgaatgtcagtagcctctgtttctaatcaggttttgtcactgagatacgattgattgattgattgagtcactattcgtgtgattgagctcatctcatagcctgtcctcggaggttggtatgactatgtcacaggactcaaagcttaactctctaacctcagggctggtctgtctaatcttactgctttctattcttggtcatcttgttagaaaaactcagaagaatactgtgaataagggactcaaatatcagacagagagagattggagtccaagggtttgtcccaagaaccaaggactaagtatcaactcaattctgaattacacaacacccaaaaagttctctaaggacctcgacagtgccatgttttctaaatttgcatttccaggaggtctacttgtgctgtgaaaacccacggaaatgggaatcctgggccccagatgggtataagaaaggttatttttagaaattctcattaaatgatagatacctaaataataggtgactaatttgttactgatgtatgaattagggaccagtcagaaaaaccacaaacaatacaaaacgatactaggcattttaacagagagagtttaatagagataactgcatcaataattttggaaaatagaaaaagaacagaaatggaagatagatgataatacaccaactatttccaaaattaagaactcaatggcacagaagttagggttatttggaactgtaagctcaggaggcggaaactacctgcccagtgttggttcaccagggactctaaggaagcacttgggattctaaggagaaggagtttgcttatctggagctggcacctctatcgttttggtaaggagcttgctgcagaggccacggctgcctctcagggtggaatatacagcaaagacaggaggtcacatgcacttcttttctagtacgttcctagctggcagtgagtggagaacactgggccgggagaggaaagaagtagatgtgaaaactggttaataaaaggcacaggtaaagccgggcaatggtggcgcatgcctttaacccctagcactcgggaggcagaggcaggcggatttctgcgttcaaggccagcctggtctacagagtgagttccaggaacagtcagggctacacagagaaaccctgtctcgaaaaaacaacaataacaaaaaacaacaacaacaacaaaaacaaaaacaaaaaaggcacaggtggatagagaatgagtgtttagaatatttgattcaagtcttctgggacttgcaagatgacttcagtgggtaaaggcacattccttcaagcctagaaatatggtttacattctagggacccacgtggtagcaaaagaggactgactccaaaagttgtccttagaccccaacacaggggctataacatgcacaaacagatgtccactgtaatgtgaaattgtgacctatacataagagtctatcaaaggaggccatcaatttggccttcataaaagccgtcccatttatgcagtgacacaatagtctaaataaacaactgggaactaagcttttcccaggattctaaggttactgctgtgtgtgaaagaatgccaaatcagggatcatgaactcctaagtcctggttcaggctccttcctattgcaacaccaacctcattcctttaccctgatatgcttcaaaatgcacaaggcacttgtcaatcatttggaatcatttctgcctatttcctctttgctataattattggtacatattggttgcacatcttaatgagtttcattgacatgattgcatacatgcatgtgttggcatgtttgcatatatgtgtgtgttaggcaggaatcctgtccttctactatatgcattttcaatttttaatagtccagcttcctgcaaaatatgtggtgaagaaggaagccagagaagactgcgtggcatgaatatttagtcttatctagataattctaaaattaccaaacacttttgacttgtttttagattaaaattccttctctaaatagagtgtagggtgggacaacaatattaagactggtaggcataaattatcaccattgagataaataatttatatctctgatgtcttttatttgtcttaatttcttgaagaatgatcgatttcattaaagagagtcattaaattgtgctgaggatatttttgctgtgctgtgatctatcgctttctgtaattgtcttctattgatttaaagatggttatccacgtggacagatgacgttattgaaagggcatagatgggattactattaacacctggtgttgcctccatccagatgtgtattaccagcaagggaattaccactccaaaggaacagaacagaaaagttaaattgtgggcaggacaggaactgtgctcaggacccggcctcaatccccaacactacaaactagtaagaataaatatcaaagccggagaaatgcctcagagtttgagagaatttgcagctcttacaggggacccaggctcagtcctcagcacccacatggtggatcagaaaaatgtaacttcacttccatagaggcctgatccctcttctgactgctgtcagccccaggcatgtacaaagtatatttacatgcatgcaggcaaaacactcacacacatgaaagaaaataaataaatctttacaaataaaaatacaagtaaaaagtgaccacagtttgcaccccacttgtcatgcaaaagggactacaactagtatatactagtgtatactagtgtatttgtatactagtatagcatataatatattagtgtgtactatagtatatagtattctagtatagtgtatactagcatatgtgaacacaaagctggtattggttacttttttatttctttcttatttttgagcaatattaatataatctagaagtatttcttaagatgatttcttaagatgaaagttagattcaataaaactgaacaatagcgtgcttacacattatcaatctttagttctcttatatgcagaggttgacagattgacgattctatgtctatagtatctcaaaactttcagtgactcaggccccatccttcacagtgatggacagggtcaaagcattgggcctcaaaccacagagaggcaaaggataggacaacgatggctatggcttgtccctttaaatagacttcccagaaaatcactcacacctgcctacaggtgatccagaacttaataactgggctgcacctagcttacaggacaccaagaagccagcttctggctgtttgatttacctctgctgaaggttaggactctccatgtgaaggaagagtaaatgtggaaacctaaagccaactggtagattcctgacctgggtattcctagccattgtcacataaagtgaaccacaattctatccagaaccacggttcttcctgttgtttgcctctcaccacacccagagcaacgcctccatcccacacctccatcccacacctccatcccacacctccatcccacacctccatcccacactagcagagcatcaggaagttaagcagaagggacactcggtcgctgccctctgctctgcggtggtctgttttagttcctcactacttaatcccgttcttatttggtttcagtgtataagaagagcctcggggatgacattagctctgagacgtctggagacttccggaaagctctgctgactctggcagatgtaaggtttgactgtttattctctgcttcccctcgcattcagggagttcacagaacctaggaccatgagatttttcactttctgtgaaacgattcatgcacatgacatttgctttgccatgatctataaaacatttatccaagatcacagaagcatatgtggcgatctaaccacaacaaaatgccttggttggctcagatcggtctacagattacaagtgtttccattgagattcacagtgtgcagttctgatgcaccgcccacctaagctcaaagttgctcattttccgccatgtttgcatctttagaacatacagaattcttctgggttgcaaagaatatccatttgtttaagttaagtgagaagaagacataagacttccataagaactaggtagtaaagccaggaaaataaatgatctgtttcaggactttgtccccaatacctcggaagtgatcctatgtgagcacatgaggccactgctcaccttacttggaaggcttatgatttaggtaacctcaggagaccaggcagggagctgcatcaggtaaagacacttgccattatctctggcaaacagggtccaattcctcgaacccacagaaaagtggagagagagagagagagagagagagaggagagagagagagagtgattcgcctccatagggtactcctctgaccttcacacttgcactgtggtgctcccaccaagcatatacatattaatgtgtaataaataatacgtattttttttaagatgctaactttggggctggagaagtggcttagcagttaagtggctgctcttcagagagcaaaggtcggagtgtcaccctcacgtgttggctcacaatctctcttcagccatgtgtgtatgggtatcaggcacacatacacacatgcacacaaagtacccacacacattaaaaaaaaaaaaaaccaaggtggtaaagtcaaggataagatttattcgcaggcttgagtaagagaggacatgattaaagccccatctcgttgacttcttgcagctgatttacacagctcctgatgtgtggggaaatcccaaggggcacagcatgtcagctgaggcagctcttgaaaagtgaggctttaggcttcaggtgctttaactgctgaaaacctcaggaaggttgaagctacaaacccaaggcagcggcagacgtggcctcctcgatgtgtgtcctggtgcgcatcctcatgtgtttgacgtgggctcacccactgtacgcaggaagaataacgccccagggctggttttggatcaagcagaactggaccctcctgctgcctcatggtttcctgtatctgaacaactaactttaagctttcaggaatccgtgctcatacctgtgacgctgcactttagatagatattaaccccttgaggtgttgtgaagagtaggagagaatgagaggtgctggttgcatggaaatcagtactttggggttcactcgagtcttctatggattttaacagatctatgaatggaccttccattacagtttcatgcagaatagttccacttctctaggaagtctgtcttctgcctatatatatcactctttttctctccctcagaaaccatccttatcaatctacttctagtttgcctcttgtgtagtgttcagtagttgaagtcactcaccatgcagccctttcagacccgctttcagtatttacccatctgctgttctgtgtggtcaggatactatcttttgatagtgacactttagggtttttgtctgtttgtctccctgtttgtttgtttgaatgagtgagtttcttagagtgaacaaaagtaaaaagcagttgcagaaggataaaacagctctatcaaatggggccactggcaggatccagcacaaaccactgcagtatcccagttgaaagagtaacaaaaggtagcaacatcaaatcggtgattgcaaagatccagtagtggttccatggggaaagacagttgaacagaacttgcccagtggagctctggaatgagaggcataggtgagtagagtgtgcctgccggctaagctaagcatagcgtgcctgctggtgaggtttccaagtaaaagaaccatcagtgagtagcaaagataagagaacatcctcaaaccaacacttacaaccatctatcagaaatgactggatgccctgctcagttcagggcagggcagtattctttctacagtgagcttctgccttctctttccctccataggcattgtgatattatgatattataatattataatatgattaacaattgtcactgcagatggtgataagtttacttcttagctgttttcaaggacagcatgtcttatcacacttagctgcttgctgtttttctctcagttaccaagtcagggggtcagcctgacccaggacaggggcatttggaggacacgtgacataaacatgcctgagcctgaacttggagggtcagtcctgtttccagagtcaactgcttagtgatatcaaaaacatatgtcattttaccaacataatggatattgtgtatgcctgtgatgtttctctatattctttttcacaactaactggtcagctggtgccttttttttttttactgaataatattttgttatataaactgttttataagttgaagggcatcttggttgcttcaaagctttgtcagttataaataaaattcagttaaatatttatgtgcaaggctgtgtatggacatgtgcccatcttgcttaggtaagtgtcaaagagcagaattgctggattacactgtaagaatagacctagcaatataaggaactcctggaaggtccctgtaagtccatgtgccatgttacatccccatgagcaaagaaagcagagttcccgctgtttccactctttcccagcatttagagtcgtcagtggtttggagtttaatcctgttaacagatcctgccttgatttatagtccccagggacatgatgaaaaccatctttccatgttttctctatgtctaaacatcttctctggtgagatgtctccttagatcattttcttaaaactgggttgtttattatcttcttcctgggtcgcaaaatttctttatattttttgcttatttgtcttttatcaagcatgttttgtaaatactccttgtcttctcattgtaacacctttgagtttccagaggacctggagactgcagattgtgtaccctgctacactgactgactatcgatggcagagacagactcagaaccaagagagcctgatttttctctgctacatagtctgtatggaaaaccttccaagatgagctggtgggtggagaactgtgtccttgcagggctgaccttgattttctcattcctgctgctttagggtagaagagatgaaagcctcaaagtggatgaacatctggccaaaaaggatgctcaggtcagtaacagtcaggagaacagctcttttacacctaccaccaccaatggctctgccctggccctgtcctctcctgtcctgtctgaggcaaagcctggagacaagtgtcatccagctactgtagtgtcaagcatccaccattccctcctccaggtcctgtatttgaccttcagatttgaatggcctctaaaatcgaatgaaactcccacctcttctcattccatcccttcaaatagagaaagaattgcatttctgatgacacacagggatttttccatttgtcaacagatcctctataatgctggtgagaacaaatggggcacagacgaagacaaattcaccgaggtcttgtgtctacggagcttcccgcagctgaaactaagtatgtgtgacacaagtcttcttggctctgtgttgttttggcaaaggtctttgtagtttatgtagcaacatcttaggagaccaaatggagaagttggattttaactaggtagcactgacattctcttctgttttgccctaaagacttagcaggctacctaccctgtgcggcactctagatgagaacgaggaagacaggggcaatcctgtagagagcaggagctggttgccctgcttcaacccaagctctccttggctcaccaccttctgaaaaagtcaggcactgccttacctttccctggcattggtttgattgattgatctttgttgattgattaatgctgtgaacagtggcttctgtctgatatgaagggtaatgagggtgggggaagaaccagctcttctctgagacccctgactgagtcccacccagccgctcagtcaggagtctccctgagctcttctacaagtacccagagctccatgtcagtattctgacagtggctgccaggtgccagtttagacagcagctgcagtgcaggaccaaccttatgctgagctgagaaagcagaagggtgttgctgtgacttttcattttgaaatctgcctctttcacttggacagtgatttttatgtgtaatgtattagtgcttttctctaagtctttgcttgaaaacagagaggtagggtgatcccctgtataactttgccaattttccatgtttaaaaatgtgttggatggttcatgtctttactcctagcagaggcaggaggatatctgcaagttctatgccagctagggctacatgtgtgagaccgccatctcaaaacaaaagagcagcactaaaacctcattgaaagaaatgtacttggcttatgaaatcttgtacacgtgatgacataagtatactgatcaagacatattgatggcttctgtgaaatagtaggtgtgaagtgggccaccctgccttagagaatgacaccctctgcacaagaaaatccaaaccctcctagacagggttagtaacatcaggttggctcatcaggtcaaggcatttgccaccaagtctgaccgtctgagtttggtcctagaaacccacatggtggaaggagaaaactacctcctataagttgtcttctgacctttgtagatgcacacacatgcacacacacacacacacacacacacacacacacacatacaactatatatatataattaatattaaaaatgttttaagaaagctttccagttaccattctgcagcttctgaccagctagtaccgcattgcttcctagaactgctatacttttgcaatagatgagttatttgtcacagaacattataagctcttttaactgcttcagactggagagaggggaagggagatcactgaagaaatggcctaaggagttcagtcttcattgtgttcaacttttgatggctgctgaggttttgagcttgcccgttgatctgctacatcttacattttaaactgtgaaatatattctagtgtggccctctgggatgctttaaatatttttatggtgctattttttagcatttgatgagtacagaaatattagccagaaggacattgaggacagcattaaaggagaattatctggacattttgaagacctgctgctggccataggtaagcccttgagtgttaataagtggaactgtttgtacttctttgaagtccatgtcaaggtgagctaattataagaatctggactaatccatctctgctcctacagcctcctgcatggcacaaacagctgtctacacaaatactgttaaataatacacggagaagttatctacttttaagtttgtatttggcttgtcattgtgtttagattataccctctttgagagcagaaatattacagtctactggtattttttattgaaccttgttgaaactgagttttaatcaatttggtattccactgtactttgttatctctggaagatgtcaatggcctcccaaattggagccaatcagaactatagatcgcttcctctttagttgagtgattgatcaggtgggattcaggctgaatccatccccatatagacacataaattagttactggtcagcaatgctgttgtacaggcaatgaaggcttcacagtttgctcttccaggcactaagacagggcttcaaaaggaagatgagatcaaagcatgaggcacaactcaaagtcgggattcttgacctctttagtgaagagtcaaaaaatgcaagcatgtgtctctgtctttgcctgtctctctgtctctctcatacacattcacagagaggtggggatccagtctagttctttggagggacactggagaattgacttcagaattccattggggaatgcctagacagtgaacaccttgtcacctcaccagtgggaagtcctttccaatacccactgtcgtaattcatgccacctgcactaagatcacctcgggttgcctgtacaacagcattgctgaccagtaactaatttatgtgtctatatggggatggattcagcccgaatcccacctgatcaatcactcaactaaagaggatgcgatctatagttctgattggctccaatttgggaggccattgacatcttccagagataacaaagtacagtggaataccaaattaccctcagggtaatttcctcttcctaccagagattcattccccagatgctaattgccatctctgaagagtgactcctaattatggtgcctttacttttatgtttaagcaaattctttatgttgggcactgtgttcaacccttcacacacgtcaactcatctaaacctttgacaatccttcaaagcaggtgtagtagtaattttggctaaaccactctgtgctcctggcagatcacactcccagtcaccctccagattcctctgtgtaactgagccgtggttgtcctggacttgatttgcaaatgaaagatacacacacacacacacacacacacacttccatcctgtaatcctgacctaacaccctctaattttatattttatctttgttgccctatgtagtcaggtttctatttctgcacaaacatcatgaccaagaagcaagttggggaggaaagggtttattcagcttatacttccacattgttgttcatcaccaaaggaagtcaggactggaactcaaacaagttaggaagcaggacctgatgcagaggccatggagggatgttacttactggcttgcttcccctggcttgttctgcttgctttcttatagaactcaggactacctgcctagagatggcactacccacaatgggctaggccctcccaccccttgatcactaattgagaaaatgtcttacagctgtatctcatggaggcatttcctcaagggaggctcctttctctgttgtaactcctgcttgtgtcaagttgacacacaaaaccagccagttcattctattaccttctgagcagccacctagtctttgatgcccaagacacttctgggcagcccttctgggagctgcattccttcttacctacattttggatgattttccttttgtggctttaaatctgacctgtctgcctcagaatcctggtgattctccttgccctccttctagttcctagccagcacaaattcaaaggtaatgccttagtccacctacccagccattggccatttactctttattgatcaatcaaaaaccaattggggacaagggccttcagcgtttaaacacccagactcccaattttggttcaaagcattagaaccaatccccaacaagcaggttcatccccctggtgacacggtaaacctggggctcaggtggattaagtgacttccttggaccaagggcatctgagtttgtgagataagttgataaaggcatttggtcttaattttaatgcttgctcaagatcaggagcaaatcagagattaggaatctatagcaatttacaatttgatcaagacaataaagatggtaggaaataggcaattgtgaactgttggtaatggttataattgaggtggttcctcctccagtttcccttcctatgatgttgtatgcaaaagtaagttccttactactgagttactctactgcttcccttattttcagatacaaagaacaaaccttatacttgggaacataaagaaaaggtagggtaaaggaaaggaaggtgctgggcagtggtggcgcatgcctttaatccaagcacttgggaggcagaggcaggcagatttctgagtttgaggtcagcctggtctacagagtgacttccaggacagccagggctacacagagaaaccctgtctcaaataactaactaaataactaactaaggaaggaccctgattagaaggagtgtgtacgtctagttgtgggaaggaccatgattaggaggagtgtgtatgtctagttgtgggaaggaccatgattaggaggagtgtgtgtgtctagttgtgggaaggaccatgattaggaggagtgtgtgtgtctagttgtgggaagacagaggagaagcttaagaagatttaaaaagagaaaggaaaagactcatgatggttttgtccaaatcttaagagttaatgtttgttgaagaaagtttagtagtagcagtgggagtggttggtttcttgtcagaaagcttcatttcttaagttttccttaagtcattatagttactttcctgttgctgtgagaaaaaataataccatcaccaggcaacttagagatgggcttatgcttccaccgtccacattggaaagaacatcatggcagcaggcttgcaggtgtggcagcaggaacaggaaggtgacagcttacatcttgaactacagccgcgaagcagagagactgaattagacgtagctcagggatttcaactctccaagctcgcccacagtaacatactttctgtaccaaagccacaccccctacacctccccaaacagtgccaccagctgggaaccaagtgttcaaatgtcagagtctgtgcaggacatttctcacttaaacaccacatacatatggcaagtctttgccttgctgtatgtaagtgtgtaagccactagaggggaaatcaaggctttttccaagaccccaaatccattattacattcatctgctcacctatggccagacttctgcctgaatcagatgtaagaacactaaaacaactgtgctgcatgaataggtgtgtcctctatacactttacttttcctgtctatttcactttgcctcaaagaaaactnnnnnnnnnnnnnnnnnnnnnnnnnnnnnnnnnnnnnnnnnnnnnnnnnnnnnnnnnnnnnnnnnnnnnnnnnnnnnnnnnnnnnnnnnnnnnnnnnnnnnnnnnnnnnnnnnnnnnnnnnnnnnnnnnnnnnnnnnnnnnnnnnnnnnnnnnnnnnnnnnnnnnnnnnnnnnnnnnnnnnnnnnnnnnnnnnnnnnnnnnnnnnnnnnnnnnnnnnnnnnnnnnnnnnnnnnnnnnnnnnnnnnnnnnnnnnnnnnnnnnnnnnnnnnnnnnnnnnnnnnnnnnnnnnnnnnnnnnnnnnnnnnnnnnnnnnnnnnnnnnnnnnnnnnnnnnnnnnnnnnnnnnnnnnnnnnnnnnnnnnnnnnnnnnnnnnnnnnnnnnnnnnnnnnnnnnnnnnnnnnnnnnnnnnnnnnnnnnnnnnnnnnnnnnnnnnnnnnnnnnnnnnnnnnnnnnnnnnnnnnnnnnnnnnnnnnnnnnnnnnnnnnnnnnnnnnnnnnnnnnnnnnnnnnnnnnnnnnnnnnnnnnnnnnnnnnnnnnnnnnnnnnnnnnnnnnnnnnnnnnnnnnnnnnnnnnnnnnnnnnnnnnnnnnnnnnnnnnnnnnnnnnnnnnnnnnnnnnnnnnnnnnnnnnnnnnnnnnnnnnnnnnnnnnnnnnnnnnnnnnnnnnnnnnnnnnnnnnnnnnnnnnnnnnnnnnnnnnnnnnnnnnnnnnnnnnnnnnnnnnnnnnnnnnnnnnnnnnnnnnnnnnnnnnnnnnnnnnnnnnnnnnnnnnnnnnnnnnnnnnnnnnnnnnnnnnnnnnnnnnnnnnnnnnnnnnnnnnnnnnnnnnnnnnnnnnnnnnnnnnnnnnnnnnnnnnnnnnnnnnnnnnnnnnnnnnnnnnnnnnnnnnnnnnnnnnnnnnnnnnnnnnnnnnnnnnnnnnnnnnnnnnnnnnnnnnnnnnnnnnnnnnnnnnnnnnnnnnnnnnnnnnnnnnnnnnnnnnnnnnnnnnnnnnnnnnnnnnnnnnnnnnnnnnnnnnnnnnnnnnnnnnnnnnnnnnnnnnnnnnnnnnnnnnnnnnnnnnnnnnnnnnnnnnnnnnnnnnnnnnnnnnnnnnnnnnnnnnnnnnnnnnnnnnnnnnnnnnnnnnnnnnnnnnnnnnnnnnnnnnnnnnnnnnnnnnnnnnnnnnnnnnnnnnnnnnnnnnnnnnnnnnnnnnnnnnnnnnnnnnnnnnnnnncagggtactggttagttcataatgttgttccacctatagggttgcagatcccattagctccttgggtactttctctagctcctccattgggggtcgtgtgacccatccaatagctgactgtgatcatccacttctgtgtttgctaggccccggcatagtctcacaagagacagctatatctgggttctttcagcaaaatcttgctagtgtatgcaatgatgtcagcatttggaagctgattatgggatggatccctggatatggcaatcactatatggtccatcatttcgtcacagctccaaattttgtctctgtaactccttccatgggtgttttgttcccatttctaagaaggggcaaagtgtccactcctcaattctttaatgggtgtttcctgtggctccaaacgttatgtccaactgaataccttattttcctcacctcaggccaccaccagtcctggctcctgtgttcagggacctcacaggttgtgctgaccaggactggccttgctcagctttggacactgaactctgcctccttggccttgttccttgggtctcagccacctccactttcttgctgttcccaggttatcactgctgtccccacctggcaactttgtgtttgttttcctatctgtagtgttcctctaccatagctgtggctggctttttctcatcttttcaggtctcagctcaaatgtctcctcttgaagtaacccctaagtatccatgtttactaactggatcaaggtcacttggtaaggccatgaggaattgaatctggcctgatggatgatccacagcaagactggggctgtggcaattgtagtgagagcaactggactttttatacctttatcagaaacagaatataatgaaaagtttcaggatcaatatagttgtccttgccaggatacaatgatgtatgcaaggtgcatggggtacacaaggttgatgtctaagaccaattgtcatgtcttccatgcttccttgactttaagggagcatacagaggtgcacacagcagcctgaatgtttcactgcctgaggaagtgcatggatctctcaagaactgggaggcacattgtgccccaggagccatgaactcttccctgaaaagcttatgaaacaggcctctcaatcagctaggccagaacaactccgtggttctttatgtaacactccctcatttacccagtcaactggctttctctccatcactctgcattcttctgccttgtgttttctcctcactcttattaatattcactaaaataatcagataatttgctatctctgtctaatagaaaataaacttcacggagacagaatctattcactgctgtgtgcatggcacagaaaataatgtcaggtacacagtacacgttcaactggcatttgttggaaacatcacttaacagacccagcattcacttaacagctaccttgaaagtttcactctctttccccattgttccaatggtacatcatcactttgaccatctactcacaaacacctcgcacatgctctctccatatgtgaacattacttccgctgaggccacgaccatcctctattgctgcagacatgtccgcgtgggtcgcagagactttcctcttacccctttgtcttcgttctgtttctcccctggaatctgtgcttcctgttgcaaacggacagtctcagaagccaaccacaaataagatgtgatcccagctttcttagtttaaaatgttgtgacagcgctcaactttgggatacagttggagtttcatttcatggtcagcgaagtctagattttccagatgcatcatttgctgttgtttattatttatacatcctaaactttcacatacttcacgcacagacacacatacacacacatacacacagagagagaggttgagagagagagagaatcctttactagagaattctttgctttctatgcaagcccatccccttccctagtgcatctgttacctgggtcttgatgcctctgcctcagtttccccagtgcctcaccatcccagcatacccctagctgatgatttaggcttcgctgcagatgtcactttcttaagcaggccttcctaatttttagtctttcccaggttctgttaaaactcacctctatagaacccggtatctcctatctgtcagactaattttaaataactttttatttaatgattttatcctttcattgagaacttggtacatgttttgatcatattcacccacacatccagctcctcccagatccactcccctactccccttccctttccaccccccaactctctctctctctctctctctctctctctctctctctctctctctctctctctctctctctctctttctctctctccaaggtcaatttaagctgcccaaatatttttgtacctgtggcctttcaacggcatatgggtgacttatcagttgctggacttctagaggaaactgactctttctgtcccagcagctaacaaatgccagtagcttcaaagttcctccatgctaggatttggtgtcagactcattttcaatgtcctgttttgtaacctgtatctgctatagaactacacgctcattagggatacttcctcttcatagcatggtgaaggctcattacaggggctcaacacatatttcattaataaatgaatggtagagtttggtgctaaatgaatgaagaggagttgctgtggttggatatcctgtttacgatcctcttatctcttacaactgaatgtctgcatatcattgagtaactggtgaggtctcacggtcctttcttcccagggtgctggaacagatgaattcactctgaacagaataatggtttccagatcagagattgatcttttggacatcagacatgagttcaagaagcactatggctactctctatactcggccatccaagtgagtctcctgtaggaacagcagggcatggttctccttctctgctcacaagctttctgtcatgatcctttaaaacacagataggctgactcacatttctctctccctgttattgtgctttctgagtttaaaatagttctaccaaaacatcccttaaaggtgggagcttgggaactgaagagatgactccgtggtgcctaaggacctggatttgatccctagcatccacatagcagctcacaaccatctctaactccaattccagagaatccgacagctttttctggcatctgtgggtaccgcgtggacatggtgcacaaacatgtataggcagaacatgcattcacatgaaattagaaagaaatacatcttttaaaaaattgttaaaaatggtaactgttttccagttcttaaatactaagaatgtaatagtaagccatcttttaaaaggtttattggacatacaattttattttgggaaaaaaaaaacctgaacatgtaagttgattgtctattgtttgtgctgcagtgtttttaaacaattatttcagcatggtggcaaagtaagaagtaagtaaggaaaaaataaggaaagaaaattacatgtttcacattttcctttagtgacgccggcatgtagatcagtagtaaacatttacctggtatgtgcaaggctatgagattaatccccaccacagcaacgataaattaataatgataataataataataataataaaaggaggaagccctgtgttgtatactatagatgatgggttctgtatcttcagttcttatctttacagtatgaaaaaggcttctcatttttcgtgactgtattattattccatttttatttcaataacactaacagatatttagagtccctagctattcaaaacagtgctacagtgtgcatacccggattcatgaggtgcaactgttgggggtgatgggtaaatggctgagatagataaaacttatttttgattttggtaaaaatgagcacttggttctccttcctgtgttttcctcagagcctcagagttatctctactcatagacaacccttttgcatttttatagtccaacaggtgcatgttaggatgaacgtatttcacatttttaagtgccatttttatttcctttttctctgtgctttctgtttctgtgttttgggcccattcttcgtttggatttctattgctttctgttaacgtctaaggtctccttgtacattaggcagattagctatttttttttaaatctcattataaatattttttgttactttttgcctccgctttcccaagtagaacttttatttgctatgtaactgaatttattaatccttgtagtttcttggattttatttttatgttccattgtttctgccattctgctaagaatatttctaaaatgtctgatactccttcctttctgcttaacagcaaacccatggtcactgttcccaagtctcaggaaaaaaaaatgtatatatataattacacctttaatcccagcacttgggaggcagaggcaggtggatttctgagtttcaaggccagactggtctacaaagtgagtttcgggacagccagggctacacagagaaaccttgtctccaaaaaacaaaaaacaaaacaacaacaaaaacaaaaagtaaaactgatcaaattgatagaattgttcagaaaaagtctcctataccataaaaattctggttcaatgtcctagctgaaagagaactattccagctagctaataaatgctaaggaactagcccaggtttccctcgtagtattctgtgggttctgctttattgttttgttttgccttagcccctagatgtcacacaaaggcccctgttaatttagagaattcatccagcctggttccctggatcagtctgggcactgaggttgagtgaactacccgccatcctagtcacccagtgtagagtctggctccacaagggccccacgggctgcatgacttatttacctctgagttcttacatgctttacaagctttctcaggaaaatcagctttgaggcccaggctggtgccttctgagaacctgtgcccagaagaattaggacaaagaggatagcagcccggagggaagcattgagagtctcaagctgaaagcacacaccccaggccagctgtgggaccactgtatactgtacagatccggattcttggcagctcctagccctggttcttgaggaattgatgcttagccttggcaactgggaatgtctggcctaggccatgttcctgtgccacactgagtagctggggtctttccttctacccacagtgtagacctacccacactagacacccttaatcagcacacacattggcctgggggatcgctaactgtcttagaagcattccagcctcagggaccacagatgatttattttttgttttaaaggaatgaataaatgtattcacttcagtcagtcagctagattggctcaccaaattcctttgggcttttaaaaaaccagagtctttgttttctgctaaactttgactgagaaagatgcatgggtaagtcaaaatcataactgatccaaaagagcaacaggctctacctagggcttagcacggattttgtcagcagcctaccctcagttctatgtgaattgatcctgacacattacaatagtttcaatcatcataggaagattcaataacattaaccacattgtacttgccgaggcagaaaagcagactcattcattttataacaattgtcagtaacaaggttgacacaccaggagggcttctggttcaccttcagcaaaccagaaaattagattaagttgtggtgctctgtccccaccccccaaccccccatgatggagacttactgtagtaggagacacttaaactatttgtagtttgataaagagaaaaatccaccactgaagagtctggtttgagatgtgaaataacacagactctgtccgttctcctgcctccacgtgttgtcaggtagtctcattcatgatttcctggctggccagtgggatcttttcaagatggttgttcttgaaactcgggagtcggaacatggaaacgctgcatacattccgctcttggtctctgtcatcctctgctttcccctattatccagacatctaactgctgttcagtcctctcatggatgataactggtgaggtgaaggaaagggagagtgtaagtaaaaaaaaaaaaaaaaaaaaaaaaaaaagaagaaggagaagaagaagtcctccttcctcacaagacgattccggtgtagtgacacgtgcttataacatccataatccgggagtggctgaggcaggaggatctttagtttgaggccagcctgtattatatagttgagactctgtctaaaaaagtacattaatggaaatttcaaggagacctaatgttttgttaacttccctagtcagtaataaaaagcgtgctataagggcaatagagtgactactccgagaatctgagtaatcttatagtctagaacacagaatctagaacactagaatctagaacactagaatccgagtaatcttatagtctagaacacagaagactccagatgaaggcttaaagaaaggcattgacatagatggcaattggaacagcatcatctagccaagtgctaaatgtgagtatgggagtcaggaatacaggaactgacaaaaaagacatttgagagttagaaaagaacattttttagagcaatgggtcctgagtctgcctatcaggtcaacaacaggaactaggcacctcctctggaattctgctggtcagcagggtcctaagatgcatcttagaaagagaatcatagtaagaggctggaggaaaaggaaccttaagtcaatggcttaactagaaaatctacttcagggaatactcgagcataacatagtgaaatgaattcacccagagtcccacagttgggagttagtgctgtattcatctaagcacaaatatttactaagggaatgctgtgtcagactcagggctaaagatgtgaggaggaataaggtttttgctcctatgacattacaaatatgcattaaaaatcactactttcatgtgagggaaggagacatggtactaaaatataatataacatgaggacttgactgacaagaaaggcttctatggggaaagataattttaatctggaaagttcagtaggcattagcaaggagatggttgtgcctgtatgtatggagctagccaagcattctaaaggaagaatgtgggatagatgaatttgtaaagatcttgggacagaagaaactgtgaatacagggtaaagaggccaggtcatgcaggacttctctggtaccattgaaatagtcctgtctttagcacaggaattgtggagtcaatagaatggtagacaaaaggatgtctcagtcatttaaaataattctggtgactgtgaagagtgacttaagtagggaccaagagagacatggggtgatgagtgtgtgtgtgtgtgtgggggggggtgacacagacacaccggagtaggtctgacttggatgggagaccacgacacagccgatctgcaagctcaatagagagggacttaggatttggtaagagaagcgagaaaaaagtgtgaaggatgacacccaggagtctatcttaggaaagagcaagaagtgctgttttctacaagaaggtcagggaagagggtgttgtccttggggacgtgtgaggaagttcctggtctttcgtgtcttgagtttgggacatgctaggaggcagtacttgaagaggtcagcacaatggctgctagtgtgggtccattgtgagagtcagtgtcccaggtgccttctattgctggatgacaaaagcaacgtcaggaatcaggcatggtggcacatgcctttaattccagcatcagaagcagaggcaagcagatctctatgagtatgaagcaagccttgtctacatagtaagttctaggccaccgagagctacacagtgagactcttgctttctaaaataagtaagcaaatgaataaacagctcactaactaactcacttaagggataaagagttcacctttggcttacagttcaagagggaaagaatccataatagcatagaaggacctggctacaggtagttggagtatgggacccaggtgcaagaaactggctgaacagagtcttctatactcagaaaacacagagagaacaagtgggcccatggcgagaaaaaaaacttaactaaaccaatagcctaccaccctgttgtgtattgccctagtgctgtttgtattttgatgctaattctagttcccaaagaggggctgcccccaacaatcaccacactcaggtgatttcatgtgaaccttctccccattttaactggtcaaataaagtctagagcctgcgattgggcagtggaagggaaaggggaaagtggaagtgttagagaaggagagagaggagtgaggaaaagagagacgatggagggaaggagagagcagaagatggaagaagaggaggtggaaaatggagcagaagcacgtgggcttgaggagccacaagtagcaagggatctcatagctggggaatagggtagtgtagtgatagatctgcccaatctagatgtgcagcttataaatattataactgagttgtgtgttctttgcacaggcatattggggttggagatttaccgatacaaatatggctggtattaaatgttaaggctgtctggtgtttccgatttgtgaggatttaggtgggcaagagggagggcaaaaccgtggagtggtcattggcagtagtggttgtagcagaccactggggccgtctgtctgtggaaccagaactgtagctccaggcgttctcaggaaggacatgttgcaggacttagcaagccagcctcaggaaccagggtaagatgtggaacagacaggatggaagtggagcccgcctgggcggagctaagtatgccacccaaacttgagaaatgcaagaccaggaatttcctcacacttccctatggacaacaccctcttctctgaccctcttgtagaaaatggcacttcttgctctttcccaagatagaatcctgggggatagaatctcggagctaagtcataaggggctgtggcactgggcaaggagaccaggcaaagggaagcttgcagaaagagtgccacaggtatgcactaatccctcagctgacatgattgtttctcaaaccacctttctctgctggctgggggaggtgggtgggtcactacagctcctctaagaactggaaatgactcagtctttgtagcttggcttgtctgagaggcactgttggtttttattgcttcctctggcaaggaagggtctagtgaatttggtcagtttcagggacttcctggaactataataagttgtttacctccctgcttagggaacttcctgcaggatggaatgtttgaatctcccaggaaactgacacagtaggagtgaggggtgaaatcacctgagtgtggctctctgatttgagggttcctttcttagcttctgtaattgttacacgaagattagcagagttcatactctgctgcatagatgttttataagggttacaatagttaaacttttcatttaagcattttatattgaaaattcaggttttcacacatgctaaacacactacatgccattgagtgacacctccagttgcacatgatgtttacattgtaaatagaagtgtcagttaacgttatttcttattaagcaacagatattagagtttctgttagcagctaatatggaatatcatgtcattgatgaaatctttccagttgcactactccagcaggatttgaacattatgaactgcagagaacatgctaggctggggcacagctgtcctcaagaatgaaagaaaaatggcacggcaggtgtgctgtactgaaggatacagctcaaacgtcatctcatacccaagtgactcccctagccctgtaggtctgattctcctgtaatcccctccttatttatgctgtgtttaatcttccctgtcggtcctgtcctttgcagtcagatacttctggagactacagaaccgtgctcttgaagatctgtggagaagatgattgaagaagatggctcccaatggctgcctgccctgatggtggaccgcctcaaaatctctgcacactgctttcatgcagcactctaaagtgcaagcaaatgcaagacagaacctgtctgcctgataggcattggcatcgttcagtgcaatggcaaaaatgaacttgattttatttcagaccatctcattcatgataagggaaattcaatctagaattaaagacctactaatgattttctgtttggcttaggaagttggaatctgtgtagttcaaaaccattaaacataaatcaggatactaaagatggctgcctttcctaattgtaatttgtgtatttgttttcagtatctactaatactgtatgttgcctggtgccaacaaatatttcaaaatacatttgttgtaaatgctctgggtgcttctgttacttgattagtgtggtctaaaaagctagtcataaaatgtcatggtgctgctcacctacaagcccaacatttaggaggtggagaccggaggatcaatagtttgagccatccttgtgtaggtgcaggagatataaacaagtccattaacagtttattgcggttgaggcttgggctccgagaaggagaatggtgcctggtgaatttatgttagggaaatgaggtagtgctgtccttattgatgttcagcaggtgctagaatctggcagggaaaaaacaacaacaaaaggattgctggcagatacttccactattccacaggatttctgtctgccaggaagagccacttctgtatctctccttcctctggcggatgaggcattaggctgattgttaatatgtacccatggtgcatgctaacctccagacttccccagttcgttccaggctgctccagttcagagggttcccttccccacctgcaactactgtttttctgcctaacccataaaaggttttcctgctcctgctcctgctcctgctcctgctcctgctcctgctcctgctcctgctcctgctcctgctcctgctcctgctcctgctcctcctcctgctcctgctcctgctcctgctcctgctcctgctcctgctcctgctcctgctcctgctcctgctcctgctcctgctcctgctcctgctgctgctcctgctgctgctgctgctgctgctgctgctgctgctgctgctgnnnnnnnnnnnnnnnnnnnnnnnnnnnnnnnnnnnnnnnnnnnnnnnnnnnnnnnnnnnnnnnnnnnnnnnnnnnnnnnnnnnnnnnnnnnnnnnnnnnnnnnnnnnnnnnnnnnnnnnnnnnnnnnnnnnnnnnnnnnnnnnnnnnnnnnnnnnnnnnnnnnnnnnnnnnnnnnnnnnnnnnnnnnnnnnnnnnnnnnnnnnnnnnnnnnnnnnnnnnnnnnnnnnnnnnnnnnnnnnnnnnnnnnnnnnnnnnnnnnnnnnnnnnnnnnnnnnnnnnnnnnnnnnnnnnnnnnnnnnnnnnnnnnnnnnctcctgctcctgctcctgctcctgctcctgctcctcctcctgctcctgctcctgctcctgctcctcctcctgctcctgctcctgctcctgctcctgctcctgctcctcctcctgctcctgctcctgctcctgctcctcctcctgctcctgctcctgctcctgcacctgctcctcctcctgctcctgctcctcctgctcctgctcctgctcctgctccctctcctctctctgctccctctcctctctcagctcccaagagcagtagtcctggcctttgacagtctgcccttctcctctctgccccagagactattgccccagagaccatggctattttggaagttcacaaaggctctggatattctctctctcatatctacaaaagtataaaaaaaaatctataaaaactttccacccatggatcagtcagtttgtcagctctctgtgcctttgcttacatgcccccacccccaccccagatttcagcacacaatcaagaaatcactgagatgatcactccacgaatggggaggtttttattaacactaaaagagagagaacagtcagaagcacctgtatgagtccagagcagagagaataagaggaaagactgaccatggccagagctagagaagtgggcatgaaaaatagtgtgggttacaaagagcacaagtagcctaggggaaggaatctgtgaactgaaacagcctggatgttcagagcagaggaggaggtttgaagggccaagatgctggtgtgggctttgaaatgcataacaggtacaagtgaatagggaccaaaggagcctcaaggcaaatgtgggcttttgatatgtaaccagaggtataaaccaagggaagtggccctttctgacaggctcctgaggaatgcttgggcctgacacccacaataaagagacacaaggacacctgcctctgcactttacctaactgctagtgcagttagagctccccttcccaccttttcaagcatagatgcctcaggcctttgaggaggacaaacagagagggcaccagaatattgcaattccccttttcatggtggcactcccttccccctaacatccccctgccccccccctccactgggggggggagcagcagatgccagctttggggacagacagaaaacagcataccttagcctccctgtcaccaaggctaacactctccttgatagataaccaacatttttccagtgcagatcgctcctgtccttgaagaaaacaaggactaaacatccttgaaatgataagaggcctgcgcttggaccaagacacaagggcaattaagtgttcccagacagctgtgaccactttgtaaaaatacactagctcccgatagcaccacaaagttacttcccaggtcaggaaggtccccttccagctacacagttctgccctgctgtctgaacaaatgttaccaggtttgaaggatggtttttcccttgtcacctcctcagtcatggaaccccaaagtttggggattcccggcatatatatgtacacacacacacacacacacacacacacacacacacacacacacaccaagcccctggttcggccattgtatccctaacctgcacagtgggaaagtctttctatctgggtctgacttataaaataaagactctctttgtttttacattggacttgcaattcctggcgttctccgggggttcccaagaactgggcataacaacaagattgttttataatgaaatgaaatatttaaaagtgtgttcatggggatggagagatggtttaccagttaaggatgcttgctcatccagtgaacctgaattaaagtcctagcacccatattaggcggcccatcaatctgggttcccaagccaaatgaggggtggtagaacactgcctatacccccagacagctccgagagagcacagcaggaataggactgctccctacccaaatcaggcttgggcctacttaactccatagagacaaaggccacttcataataatgccagttaaacttctgttttcccactagagaactggcttctgagaaattatgtgaagggcagtctgctaatcttgctgataagattggaaggttccacccctctgcaacacttcctcccttgtccttccccctaaagctatataacctgacccctctatttcaataaacaagctgtcctctgaaatagtctcccgggtggtttatatccaccatactcattgctgcctgagaccctgttcctgaacgcctccaaatcctgagactgccagtgcacaaaagctgatgggggcaagagacctacatctggtgcctgaacaggaacactccaggatgtgtggaagagagtgagtaccctccctgtccccctcccctcagcggcttccgcatcttgcttcgccatcctaccttgaggatctgcttccttgctcctctgctttgatttgacccaccttcaagtaccaattttgaagtgaaactatcattgtttgactgggtctacccccactcacccctgaattgactgaaggctcttagtcctctggtcggaccctgacaacccttcggcgacagcaaaaatcacccctctaaagctctgaaagcacctggtaatgcaataaccaggtaaaagtctttaggatactcggcagttttcttaaatgtgaggataggctaacaccccagtttcagtggaatcccctggaactcgtgcagtttggagagcgtccccatttgactgagcacttccattattttctgtcatgggaaagtctgcttctcaccagaaggaagcccttctgtaacatcttcacaggagcacagcaggtttgcccaacctctagggaattttgatcaagtactcctttgtgtccttcaggcctgggatcacataacctcccctcccccaacttctgaatcccgaaatggagatttcttgcttctcttcctccagcaaaaccccaaagaacccttctctgactttgctcttcgaacaaaaaatgagcctaggacacaaaattcctgatccctgtggctagagaaaccatcgttaaaggcatggccttgcaacactggctagcttgttaggggttgaaaaatgaacgttatgataaatggatagttaccactcaagacattaggatggtttctcataaagttactcccttcacccaggcctctgaggtgacctttaaaacaaaaggaaaaaagttttaaatttggaaaggcgagactctggaaggacaaatattctaactctggctcatctaagggcttggaagccacccctcctaaaaccaagtgtccctgatgctgtaaagaattccactggggactggagagatggctcagtggttaagagcactgactgctcttccagaggttctgagttcaattcccagcaaccacatggtaactcacaaccatctgtaatgggatccaatgccctcttctggtgtgtgtctgaagatggctacagtgtactcatataaataaaataagtaaatctttttttttttttttttacaaaggattccattggagaaagaattgccattctacatatgataaagatgtttagcccctcaatcctttaaatgccaaaaggggaaatcttcgaccccaaaaacaaaaggaaaaacctacaaaatcttgtgggtcactaacattttggaaggctcacaccccaaactcaatataaatattgcagaaaaccatttaaatgcctaattgacaccggagcagatagaattattttgaagcaatctgatgtccctcagcattgggaatggatccctgggcacaactaatgggcacaagaggctcctcccaggcatacaccacaaaagaggccttcaaaggggaggatccagatggtggtgttggccttatcagacctcttatctcagacatggccaccaatgtgttagggagagaagctttagatatggtccttatcagtaacatggaaagtgaatgcatccagatagaggaatatgacaaacatccttccagggaattctaagagccactgtcagatttgagactccctgcctcaactgggtctcagatgagcttgtctgggatgaacaatggcctttaccagggagaaattagaagttcttactcagctcattaaagaacaactacaatatccatcctttccttggctgatggaatttccccatctttgcaattaaaaagagttctatgagatgggagctattacaagacctttgggccatcaacatgactatgcatacttggggatccccatggaggggtctttcccttgtctctgcaatcctggccaatactctactattggccattggtattagagattgttttcttctctatccctgtacatcccaaagattgtcaacatttcacattttcagttccccaaattaacaactctggctcagcttcctgatatgaatgatgtaggcacgatgtttctgtgcactgggtaaaagttatccttgtattattcaaatactgatttctctgtccccttgtttcaatctgggcatggcattgtaatacttaagtcaagaatctcctatgtcaagtttgtataaacaatgtttatcatttattcgtgtcaataaaagcgattacccagtggctgggcagaagatagaatatggtggaactcccaccagccagaggagnnnnnnnnnnnnnnnnnnnncagggagggaaggagggagggagagagaagagtaagacagattgagccacaaggagggaggagaggtgattttagctggagcatgaaaggccctacatgaaattattacagggattttggccgggaagtagccagattaccttagaataatgagatggatcaatgactgcctaggtatttcagtgaagcttgaaaataaatcttggtttctctgtgtcactactggggaattagctaggataaagaaaaaagagccactgtattaatttatatttactatttatactaatttactatttattctaatttactatttgtatttatattatttatatatttatattaatttatattatatttctataatcatacattaataaaaataaagataatattaatacaattatatataaatatataatgtatattaaaattactgttacagaatgaagactcctccaccaagggatggccaccagccacactatttgccaggaagtagttgctgctgctctgaaatcacatttagaaaagggaatacacacttatcactctcctggttaaacaaccactgtactaactaccacctgagactctgctccccagctcgtccgaatcctgacacttcaagcacataatggccaattgggagctgggaacccacacataactacctgtaattccagctccaggagattgtagaaagagctggcctttgagggcacctgcatttatgtgaatactgccccacacatatgcataattaaaagtaataaaaataggttttgaagataaaatgaaaagatgctcagtacagtagtagaacataacccttaataaatgttattttaagccatggttggggattcacacttgtacttacagctactaaatttgttataaaaattaattaaaaattttcatacaatatattttgattgtttccctcccttaattcttcccaaactccctcacctccctatgcactcaacttcattgtctttctctttctctctttcataacacaaaatcaaacgaaaaccctccaaaattaatttaaaaacatggaaatgaaaatcaaaacaagcaaaatgcaggaaagaaaaatgaaaattccaaaataaaatgaagcaaaatgggaagaaagaaaggagagagggagagggagagggagagggagagggannnnnnnnnnnnnnnnnnnnttaagtattacaatgccatgcccagattgaaacaaggggacagagaaatcaatatttgaataatacaaggataacttttacccagtgcacagaaacatcgtgcctacatcattcatatcaggaagctgagccagagttgttaatttggggaactgaaaatgtgaaatgttgacaatctttgggatgtacagggatagagaagaaaacaatctctaataccaatggccaatagtagagtattggccaggattgcagagacaagggaaagacccctccatggggatccccaagtatgcatagtcatgttgatggcccaaaggtcttgtaatagctcccatctcatagaactctttttaattgcaaagatggggagggggagggggagaggactgtgcctgggcatgggtcctgccctatagtatgattgatatacacagtgagactccactggagaaaactgacttgcagtttcttgagtttagtttttcagcaggtatcaactgtaaataacttcttggttagagatgggactctgtccaatttgtcccatcagtgctaggacacatctggattgaacttgtgcaggtgttgtatgtgctgccacagtctctgtgagttcatatgagttctgagactctcacaacagctggctagaccagctggaagctgcttctgcctctggttatcccaagggactagagactgcagatacttatgtaagcgctatgtgcctgagggataaaagccggatagaacatggaggcagagccatgaccttaggatcaggatgctcagatctggaagaccctgtttccttggagtcattcctcagctacagccattcttcctcctcttctgcaaagatcccagattcttgacaagacaggcttgatgacaacgccccatcaagtgctcagacgtctctcactctgtatattgtccaggtgtgattctatgtcagttatatttttttactttaatcataagataatcatacaaaacagctattattattagtttggagattgaagaaggatgattacttaaatagttctagacattcttgagctagtgatattgatcctggggttgtttgggacagagcctcggtcctggcagtcctcacaagctaggtttggacacttgtccttgatagatctgttaaggaaataggtaataatgaaaaacagaaaagaatttattcaatacagtaacatttgaaagaagaacaaagaaagatattcagtggtgtgcaagcccatcaataaatgtggcatctgggtttaaatagagggaaagaggtgggcataactacgcagtcagggtcaagatgtggccaccactaaccccctgtctaggctctcatctgtcctacaagatggtcgacaagttgttagggtctctttgccagagacaagctccttttctggttggcatcttgggaattgattgtctccataatttgaaggaaaagttgtctctctgtagtatatcttcacacctaccacacagttgcaagatcttacctcaaaaagaaagaagattctgctaccttataccatatgttattatagtgttagtcaaggagggtggttttcattgcctctgatttccacaaggtggcaggtcaacttcaaagccagatagttggttttgtgtccaagtgacaaaacctactttacttgtttaagagtccagataggaactacgtggaaacatgctttgacgagtgcatgtcatagtccaggagtcttgttatgactgtaaacactttctcaatgatgattacgtaattcagttctttggtgtccatcattcttggggaagtctgcatttgtatgaagaatgtgtatgtgtgtgcgcgcgcgtgtgtgtgtgtgtgtgtgtgtgtgtgtatacatatatatacatatatataatacatttgtatgtatatatgtatatactatatgtgtctgagtgtgtgtatactagcttagtcatggatcaccttcactgatgagtatctgcaagtcagctcacagaacactggttaatccatgaagacagtgatggagaaaccttgcaatctggaaggagccctggccttgtaatatggttaacgttagaaggcaggagactctagatcaagaatatacttggtctggagattaggtgcttcaaaaatggcaaatgacgatactggatagaaggttctcaaagaacctactcgtgcttttgaaggaaatgtttagggtaatgtgatccagaatttacttctgtatattttctgctgtccattttcatatcatttgcatgccatgttgatagcctccaatttctgcatctgaattgtcttgaatgcattgggtttggaatcagatcagtctgggctcagatcttggctttctacttaactacaacaacgtgtatgtaaatcagtatgtaattggcaaatactcctctctttgcaacctgatacttcagctacaagtaagtccttacccaaaagagttatgaatatttaatgacatgaagagtattaaaaagttaactcaataaaattcaattagtggagaaagacataaaagcatttgccctgccatactaacctgaggtggccagaagaaagatacctaagcaactacctagggtatcactaccacaaatgaatatgtgatggagagatgggaagatggagtttgtggtggtgagatagaggaaaaagcaaagccaaggggtttgtatactatggagaaatgtggaactggagactgaacagcagcaagatgaggaggccatggtggtctccacatggtcttagcccaggtctctgccacaaaaggccatgtctggattcatgatgcagctagggtctgtgtcattgtctgtggcctgagttaccaccaaaggtgaaaaccatgtggatgtctgagggtgtgctggcatgggggtgaaggggatgatgtactgatctgaatagcgcgtcacctgaggccatgggacatccaggcccaggttgttgctagggatcatgtctgg

SEQ ID NO: 44 - DNA, 1506 bp, Mus musculus
gggcagtccgtgagtagaaacaggaggaggggctgaggaagggtgcggtctgggttgccacccaggctagccgggagctacggccgaggctgatcgttcaccttcgctgagcttctgcctgggcttcgcctccgcggccccaaggattgctgtgatctcggcttgagagaaaggtggactgtcatggcctctatctgggttggacctcgaggaaccataaaagattatccaggctttagcccgtcggtggatgccgaagctatccggaaagcgatcagaggacttgggactgatgagaaaaccctcatcaacattctgacggagcggtcgaacgcgcagcgacagctgattgccaagcagtaccaagcagcgtatgaacaggagctgaaagatgacttgaagggtgatctctctggccacttcgagcacgtcatggtggctcttgttactgcaccagccctgtttgatgcgaagcaactgaagaaatccatgaagggaactggcacagatgaagatgccctgattgaaatcctaacaaccaggtcaagcaggcagatgaaggaaatctcgcaggcctattatacagtgtataagaagagcctcggggatgacattagctctgagacgtctggagacttccggaaagctctgctgactctggcagatggtagaagagatgaaagcctcaaagtggatgaacatctggccaaaaaggatgctcagatcctctataatgctggtgagaacaaatggggcacagacgaagacaaattcaccgaggtcttgtgtctacggagcttcccgcagctgaaactaacatttgatgagtacagaaatattagccagaaggacattgaggacagcattaaaggagaattatctggacattttgaagacctgctgctggccatagagggtgctggaacagatgaattcactctgaacagaataatggtttccagatcagagattgatcttttggacatcagacatgagttcaagaagcactatggctactctctatactcggccatccaatcagatacttctggagactacagaaccgtgctcttgaagatctgtggagaagatgattgaagaagatggctcccaatggctgcctgccctgatggtggaccgcctcaaaatctctgcacactgctttcatgcagcactctaaagtgcaagcaaatgcaagacagaacctgtctgcctgataggcattggcatcgttcagtgcaatggcaaaaatgaacttgattttatttcagaccatctcattcatgataagggaaattcaatctagaattaaagacctactaatgattttctgtttggcttaggaagttggaatctgtgtagttcaaaaccattaaacataaatcaggatactaaagatggctgcctttcctaattgtaatttgtgtatttgttttcagtatctactaatactgtatgttgcctggtgccaacaaatatttcaaaatacatttgttgtaaatgctc

SEQ ID NO: 45 - protein, 330 aa, Mus musculus
SFTFAELLPGLRLRGPKDCCDLGLRERWTVMASIWVGPRGTIKDYPGFSPSVDAEAIRKAIRGLGTDEKTLINILTERSNAQRQLIAKQYQAAYEQELKDDLKGDLSGHFEHVMVVTAPALFDAKQLKKSMKGTGTDEDALIEILTTRSSRQMKEISQAYYTVYKKSLGDDISSETSGDFRKALLTLADGRRDESLKVDEHLAKKDAQILYNAGENKWGTDEDKFTEVLCLRSFPQLKLTFDEYRNISQKDIEDSIKGELSGHFEDLLLAIEGAGTDEFTLNRIMVSRSEIDLLDIRHEFKKHYGYSKAIQSDTSGDYRTVLLKICGEDD

SEQ ID NO: 46 - DNA, 78728 bp, Homo sapiens
  misc_feature (1)...(78728): n = A,T,C or G
taagtaaaatcctctgaaaaccacgggagcctctgcctcctcagccacagagaactccctcctacaaagggggagactgaaacccgagttaaggaggggcctggcaggcgtatcagagcacattagtgatgcccttcaccccagggaggtgtctgttcccaactagtttatgtggcactgagacatccatccctgaccaaggatgctgcgaaacaggatcaatgtactacggccttttaattcaacattgccataaatgctttaaagaaaacccaccacactttcctcctactccggtctttgcccgttcctgtaacagacaatcccatgtcctaggtatggttttttattctgttagtgcttcgggaaagtaagtgattcatttgaataaggcaaattaggagaaagcccaggttggggtgaaatcagacttaacagatacatgctggttctccttgctgtgtgtgacacagcagacagaggcactattcctggtgcagtatttcagggatttctctttgaggggttcttttctggtagctcaggcaattatttttaccatatcagcacatgacaaggccatgaacacatggctctaaaataatttagtgttcaagtatcagcttaactattttgtgtaggctacacacagcttgcttttgtttctcttctgtttctgccttattggcggaaacataagcgtgcatgccatgttgttttgaattggaggcacaatttcattattcgagagtaaaagacatgtcctcttttgatgcatggcacaccatagtcaccaagcaaataacagagccttcacattgtgtaatatttgtatgagaatgactcaagctctttgagaacattccaaactagtaacatttcgctactaaaagctagaaaggatgaactgtgaaaggttctaggcagctctgtgagactccaagctccttgaaagtaggacctttgtgagccacgcctttcattcttcaacagtgccttgcatgtaacaagcactccagaaatgtttgttgaatgaatgaatggtgtcatgggtgaatgatggggagtaaatttaggaaggggaagtgagagagtatggtggcaatatcacaagggaggagagaggaaaacaattatcttctctacttggattatgagataaccttttcttggaggaaagaaacaccgctttacaaaggcatgactctggcggtggtcctaaggaagcatgagcagaaaattcataaaaatgtatcatcagcaggagatgagactatgaattggcatccagaacaggagatttagagcaaaatctaatttagcattctgagatgagtgtcaggttttcaggagagaatgagttggggtgagcccagagtctgaaactcctgactggtcaggtgctacttaagaccagcttgggcaattcagggcagaactcctgtatcagcctcatggacacccagaattggtatctcatggctggagagctgatcagccaggcacagaatctccagaacaacctagagagtgaatgctaatttgtagagcgaacttccatttggcccattatttgtaactgtgtaactgctccaagtgccagaatgcttacacgttaaagcagcacctttccatttgcccacatattcttcttgcacaccccttccattactgctgaataggacattgcatgggaagagtacagaggtggcagaatgaagctagagtgggaaggactaaagactgagccccagagtgctcccagcaaccgccacgtacaaggtctgaaatgacaagggcaagagtgagataggaaactgtgtgtgaaaggaaagcccttgcagtatttctgcctccctttctttctgcctttcaccccactaaatgtatgttattgaatgccagtacttctctagtggatgcacacttgttaaatagtgttaagagatgtggagatgagatatacccctttgatgtagaattattcatttggtttgtttcatacttcattataggaatcaagtaatttgatgactaatgtggattatatttcagtcaaagctctgctttcaatttctctgatttgctcactaatgccttgtgtgtgttttactaaccttttatatcttgccttcaagtgagaaggaacaaacaactctcagtggttactacttgcttttatatgctggctgtgaaggttaaaagaaagaatggtctgtaccattctgctttgctgcccttttattgtaccccaggcctcctagaggactcctgcagattctattgttgggtgggaaatagtgttggaatgtgtttgcacagtcttatgatattcagtctcagtctgctataggtatttgttattcttggatactacacacctgctcagactgagtaaacatttgtggtgctgtcaacctgatttcttgactctcaaatgatttttgtatttccaatatgaatttgtgtgttatgaatttctgatttctccaatagtatatgccactatataaatttgtattaataaatgacagtcttgttggttttttgtttgttttcctatgttctttttagattatatctcttatgaatatagacattgccattaagatgccaaaattcattctaaatttgaagcggtcttctggagaaaacccttctaatgagggtgaatctgagacgctcattaactgtgttcagagtaagatgctgaataaattatatgtttccagattatcataggtctttggcaatcagttgaaattctgagacaaagaggaataattaaaatttccatgtgccatataataagatgatttttgtatttattatcaaaacttctaaagagacatgatatagtatgagggtggcttatgtccttctgtgcacatgcaaatatttgagcatccatcactgaccctggaaaagaccaaagctccaaacaagagtttataggctcatggaaggaaaaatcagagtcaaaatggagctgtacccagctggtctttgcattctgcaagcctgtgcatttgtgtgcctttcccttctgataaaacaaataactgccaataacagtgaccagcagggctctgttggcacgtttgcaaactcagcaagacttgagaaagcatgtttatagaaaatctggggaagggatgccacaaccaattctggaagttgctgagatgctgccaggagcttaatgtaaacttccaatcctcacaatttcctgtgattatccgttgccttagagcagactctctgccctggagttcacttctctagagtgcagagaagctgtaccaggaattaatctaagaattgttaggattgtctataaaaatgcttctgagactggaaatgtcatggccataaaatttagggatcttgaggaatagtggcagaaaatgagttcccatttagaatttaaaatgcctcatagactgcttttgaagaaatgcactgggagtggtggaaggagactatatttggaatatgttattacattcaactacatgaaattgatttgataggttaaaaatagtccaatatcaatagttttgtatgtctcaacctaatattatgataccacaatatgtaatagagattctgtccccaaatgagccacagagaactcttaactagaaccctgtgtgctgagagtagctaatgccccaggactgttacagggactatatcaaatgatatattgggcatatctggcaatgctccgatcaagaacaatgactcacttatattctgtacctcattcagtcttcataacaaccccgtgagacatagttgtcctggataagttcctttgaaagtttcatatgaatttcagaatttcaaatctttgaaggccttcacaagcacaacttgatgttgctttaaaatggtcccaactcctatcacctaaatttaatgcttgtcatgaaaaattacatcacttgattaatacaacaaaatagacctatgctgcaaccctctctaaaaaagctagcagaattttatccctaggctcattttggtttaaggccaagttccaagattactcagcaagttataaaagttattagaatttcggtctatgggataattttcataaattgtgaaaaactagtatcaagatatctcagttccaagactactcagcaagttatagaagttattagaatttcagtctctggaataattttaataaattgttaaaaactagtatcaagatatctcccttaaacatcccactaaggaatgctttaaaaatgaaccagtgctggatactagcaactcccaagagtccctctgcggctgattctgttgctgcacactgaatctgccctgccctgtgctctgggaaaccgacttttcatcaactgcttcttcaaggctcccttgcctcttgcttctggttgaggttggccaagtggaaccactgatgagagagaagatgatgtgtgtttagcctcctccctgcttccttctgccttgtgattctggggtggctgcatccctccctggccacaggtgtcacgggttctgatgaaaccccttccctcccttgcccacgcaaggctagtcatgatttcatcctgtccctagtccttggagactatatcatccctgtggatacctaaccgaactctgcccatgcgtttgtaaatagctcctttatttgactctttattcagaccctttaagtactctgtctttctgtccaaactcttacacagtccttaaattcagtgccatttggttccacttctctaatgtaaatcaaaattaaatacttgaactcaaatcttgtctcaattttaaatttgcttgttattataaagagtgatgtgctgataaatgcttcacaactgacctttcgggtaaagggaagctccatttacagtatttcctagtttttgtgttgtatatactcccattatggctgaatacaacccattagcataatttcactgaatgtggagttgggaagagatgcacagtagtaccactttatgcactatttttcttttcttttttttgagtcggagtttcgctcttgttgcccgggctggagtacaatggcaccatctgggcacactgcaacctccgcctcccaggttcaggcgattctcctgcctcagccttcccgagtagctgggattacagacatgtgccaccatgcccggctaaattattattattattttttctttctgtttttcttggttttttttttttttttaagatggagtctcgctctgtcgcccaggctggagtgcagtggcgcaatttcggctcactgcaagctccgcctcccgggttcatgccattctcctgcctcagcctcctgagtagctgggactacaggcgcccgccaccacatccagctaatttttcgtatttttagtggaaacagggtttcaccgtattagccaggatgtcttgatctcctgacctcgtgatctgcccacctcggcctcccaaagtgctgggattacaggcgtgagccactgcgcccggcttatgccctattttcaccacatggatgcaataaacacaacctggaaagcatcactaataataaaatgtcctctccccctccccctccccctccctctccccacggtctccctctccctctctttccacggtctccctctgatgccgagccgaagctggactgtactgctaccatctcggctcactgcaacctccctgcctgattctcctgcctcagcctgccgagtgcctgcgattgcaggcgcgcgccaccacgcctgactagttttcgtatttttttggtggagacggggtttcgctgtgttggccgggctagtctccagctcctaaccgcaagtgatccgccagcctcggcctcccgaggtgcggggattgcagacggtgtctggttcactcagtgctcaatggtgcccaggctggagtgcagtggcgtgatctcggctcgctacaacctccacctcccagccgcctgccttggcctcccaaagtgccgagattacagcctctgcccggccgccaccccgtctgggaagtgaggagcgtctctgcctggccgcccatcgtctgggatgtgaggagcccctctgcctggctgcccagtctggaaagtgaggagcgtctctgcccggccgccatcccatctaggaagtgaggagcgcctcttccgggccgccatcccgtctaggaagtgaggagcgtctctgcccggcagcccatggtctgagatgtggggagcgcctctgccctgccgccccgtttgggatgtgaggagcgtctttgcccggccgccccgtctgagaagtgaggagaccctctgcctggcaaccgccccgtctgagcagtgaggagcccctccgcccggcagccgccctgtctgagaagtgaggaccccctctgcccggcagccaccccgtctgggaagtgaggagcgtctccgcccggcagccaccccgtccgggagggaggtggggggtcagcccccaccaggccagccaccccgtcccggagggaggtgggggttagccccccacccggccagccgccttgtctgggagggaggtggggggtcagccccccgcccggccagccgccccgtccgggaggtgaggggtgcctctgcccggccgcccctactgggaagtgaggagcccctctgcccggccagccgccccatctgggagggaggtgggggggtcagccccctgcccggccagccgccccgtcagggaggtgaggggcgcctctgcccggctgcccttactgggaagtgaggagcccctctgcccagccaccaccctgtctgggaggtgtacccaacagctcattgagaacgggccatgatgacaatggcggttttgtggaatagaaaggggggaaaggtggggaaaggattgagaaatcggatggttgccgtgtctgtgtggaaagaagtagacatgggagacttttcattttgttctgtactaagaaaaattcttctgtcttgggatcctgttgatctgtgaccttacccccaaccctgtgctctctgaaacatgtgctgtgtccactcaggtttgaatggattaagggcggtgcaagatgtgctttgttaaacagaggcttgaaggcagcatgctccttaagagtcatcaccactccctaatctcaagtacccagggacacaaacactgcggaaggccgcagggtcctctgcctaggaaaaccagagacctttgttcacttgtttatctgctgaccttccctccactattgtcctgtgaccctgccaaatccccctctgcgagaaacacccaagaatgatcaattaaaaaataaataaataaataaataaataaataaaaaataataaaaaaaataataataaaatgtgaaataattaggaagtggttaattttgagtacctattacctttgcttttaacgtaatttattcaattgtatttatttaacttgtaataatgtctacattaatactggctgtgaaataactgaaaattcaggaactggctttcacatgctggtataacccagctccaacacatcactgtaacagcagctatgtattcaacagccacaatcacgtagtcggtctttccttcacattttaccatatgttctaaatatatctcaataactttgctttaaaaatttgtatttggctgttaaattgttcttttgatcaggatgctataggaaaattccctttttactaacctgtaaagttctgtgtattcagaataatgaaacttttattaaataaccttttctgaattctttttctggataaccataaacctggattctaacagcatcctctaatatttccttccaagaaaactcatcctttggggaaaaaatagttttataatatgccatagcatgtttctaatataaatggtggtaattgggctgttgatacaactagaaaaactcaaaaaatgataaaagtgcatttgttaaagttaccatcaggaaatcaaagaagttaaatcctgaatggtttaaacaattaaaataaagcctacatgtaaaacatcacctgttactcattttcttctggctataaatctagccctatgacttcctagttgcctggaatacaactcgtagaacttactgagtccctctgagcctgtgtctgtatctgcaaaatagaggcaatcatacctaatttacagctagttggtaagcatgacatagatcacgtacgtcaagtgcattacccagtgtctggcacaaataataataaatattttcccccatttcatgctaatctcagaattttttgaggtaacatgggatttaacagtttattgtggtgaagtctgaatgggagtcaggaattactatgcagaacagaatgcagaacaccatcctatcttctctcttgcagaaagcccatcacttcggatttgtagatctgagagggctcccagggcactggccttttaagcatgaccacttctgccttctccgttgtagctcctcttaaaccagtggttctcaaactttaggatgcatcagaatcacttgatggcgcagggtttcagggaatttgcatttctaatgagtttctaggtcccaggactcagccttaaggaccaagactgtaatctcttcaactcacactcaagcagctccagccatgcttatcctctaaaaatcctctgtgctccacctgttcaccctacctcctctcaactcctagaaaccagtgattttttttactgtctccgtagtgttgccttttctggaatgtcatatagttggaatcatagtgtgtagcattttcaaatgggcttctttctcttaataatatgcatttaagtttcttccatgtgtttttatagcttgatagctaatttcttttcagtgctgaataaaattctattgtatagatgtatcacagtttatttatccattcacctacgaattacatcttggttgcttccgacttttgatacttaggagtaaagctactataaacatccatgtgcaggtgtttgtggaggtaagttttcaaatccttcgggtgaatacataaggggcccagtgatgactgagtgcaagcaatactttttacttacgtggtctcggataaatcacttcacttttctaagcctcagttttctcttctgcaaattgtgataaaaatagcacctcctagagttcccttgaagataaaagaggtaaggtattcaagcacttcaatgcctgatactcaatacatggtaactttttctacatccttcagcacacaactgctcataattccctcatacgagtagggctttaaccttttagcctcgatgatttgttttgctcttccaaatgcctagaatgcccttccaggttaccgtctccctgagcctttggttggaatcctcataccagagggtcaacacgtttagtagaggaattactgaaatagttgggttccaaacactagctctggcatttaccttctgtgtaaattggctgaagttacccaacgtctctgtatctcaatttcctcatctataaaatggggataatagtatctacctcatagagttgttgtcggagccattttaatggcaaaaaccgcaattacttttgcaccaacctaataaatccgcgcatattcttaaagaagttagaacagtgcctggtacaaagtaaatgccagatcaatgttattaatgttaggtgtccgccacctatgccacgcagtgagttccttaggtatagggacagtctaatctccgaatccacactgcctagaacaaaataagcattgcagtacatttgagaaagtaaaggtgtagtggaaaccgagagcgaaatgagggcgtagggagaaaagggtggggaagcttagagaccggtgagggagcagagctggggcgcctgtgtacagggatagagcccggcggcagcagggcgcggcttccctttcccggggcctggggccgcaatcaggtggagtcgagaggccggaggaggggcaggaggaaggggtgcggtcgcgatccggacccggagccagcgcggagcacctgcgcccgcggctgacaccttcgctcgcagtttgttcgcagtttactcgcacaccagtttcccccaccgcgctttgggtaagttcagcctcccggcgcgtccccgcgagcctcgcccacagccgcctgctgacgggtggcttggggaggtcgcggcgcctcgcccagttcccccgcgagtgcagctcgaccctgggcagggctggcggctggcgcccgcgcccggccccaacccagctgcgtgggtggggagctggagggacctcagtcctgcatttcagagtcgaggagactgggcccacgggggggaaagtgccgtgccatgggtgggtcacccaggtcttggtggggcccaagctgatactcagctgtcctcgctccctgaaagcttcgcttattacagctagcagcgtaagggatccacttagccatctcggcctccccagtcctaaaggtctaggggacagaaaaaagctgggagtcggaaggttcctcgggtccccggcatggcagacggggctggctcagaggtctgctctgtggacttggaatcgcacccatcctgtgagcatcttctccccctcacataggcaatttattttattttacttattttttttagaaggtagaaaacagtggatttgcatattgagggttggaagttcaagaagtttgctttttcctgaaaagactaaccgttttctttgcaacagaatcctattgactagatatgaatcattcccttggtatttgagtcaccaggtggaagatttggatacttgattgcagatgaccatatataggaaagtatgcaggtgctgggaggttctgggtcgctggaggcccctctggctactgatacgaaattgcatagcccaggccgaattctttccaaggatttgtgttcagcactgacagcaagaccctgccctccgggaaagatacatttactatgttcaccaacatcattttttaaaatgtaactaattaaaacgttactccatgaagataccacctttggttttcacgaagacggaaaacttcagactgaccagaaagggaatttttaaatgtaaagaaaaccagaatcttgttcccagaactatgtggttgtgtagagaaacctgtttagaaataaccgtagaggaggaagtaaaaggaaatgatgtaatccctttcaggaaaggatatattgaaattctgtttaagtcatttggccttcgctgtggagtaattctttacatcttaaaagttaaatgatagattagtaataattcttaataattttccagttctgctggatcaatgcatattaagtgtcagatttggtcaggtgtgggccaggcagcagattaaggcagaagcatgggggttaggttcatacctttagagtctagctgcctagatgcagtaggggtccactcactagctgtgtgactgtgggacattaccatacctctctgggctccagcttcttcatatgcaaaacgaagatgtaatacctaactcactggatgattgtgcggcttgtattaaatcattcatttaatcaataagttttttttttaaatatctaccgtgcaccagtgcacacagataagaagaatctccagccctgtgaaactgacctcgttcaatgctggcaacacccccttcttcactttttacagatgaggaaattgaggcccaaagaaattgtgtttagctttaagaggcaaaatgagaaccaataatgccttgttttcactgtacagatggtttgacttctgatttttagacttcagaatagtttatctggctgtaacccctcataagtcaaagagcatgtatttagagagatgcagtattagactctaactggagagttgactgccctaggctacagagagcctgaaaaaaccaaggtgaaatatttccagagactaatagtgtaatttcccattgaacttttctctgggggtgtcagggaatttttagaatattttgttcccaggaagggtgggagcaacttgcatttctaaatcaaccctggagatatgccagcatgtttgaataatatctatttaagaaaaatgtgtctggcttcccaatcaaagaactgtgcctttcacctctgcaccccaccaaggactggaccacctcctcaaagagcagatgtgtctttataacagactgtaggcttggagccttgtaaaatgtacatggagtttcacaatcaagcacaaggaatccaactgaaggcagctaaactttgtgttgatttggtgaggaggagtaaaatcctgtgtttttgttgttattgatccccgtagtggtagcctgtcagtaatcagcagagttctcctggactttaaataagtcaaaaattggcttttcaggaagtatatttgtaagcatcttaagtacaaagatttttttctgtctcttgtcttgaagtcctcacaggtctagcacagtcccttgcatatggtagatgctcagtaaatgtttgtttagcaaatgggatacccaatgtcagatatatgctcttcctgagaaggtttttctgtgaatgttgacatctgttttctggattcaagattaagggttggactaagattattgtgttctgaatcacatattgataccatttactaattgttttcttttaatagattagtgtgatctcagctcaaggcaaaggtgggatatcatggcatctatctgggtaagtaaaaattaagccttcacaacacagtaacatatatgagtcaaaccaaaacacagaaggtcaagatagcaaggaaaattttaggaaagtttttaagtttatctggcaaaattaacatgctagaaaagccagaggatgtcaaaaataataaaatatttttaaaaatgcattgtaaagttacatagttaaaataacttatgatgacaccaaggcggaaaggtcaaaatcagataataaatttagtatataatttgggaatttattatatgaaaaagatgacatatcagagaagaagagacggattattcaataaatgttaggaaaacttctagctgtttggggaaaaagtaaatctgtattcctttttctccttacaataaaataacttccatgtggataaaatacagaaatgaagaagatgaaatatgaatgggccgggtgtggtggctcacacctgtaatcctagcactttgggaggccgaggtgggtggatcacctaaagccaggagtttgagaccagcctggccaacatggtgaaaccgtgtctctactagaaatacaaaaatagcccggtgcgatggcagatgcctgtaatcccagctactcaggaggctgaggcaggagaatcgcctgaacctgggaggcagaggttgcagtgagctgagatcatgccactgcactccagcctgagagacagagtgagactccgtctcaaaaaaatagaaaaagagaaagaaatatgaatggattgaagaatattcttggagtggggaagatgcttacaactgtgacacaaaaccaaacgcctaaaagaaaaatattgatctattttaactacatacaagtttatcactatgacagccaacaatcccattggtagaggcagaagacagctcgcagggaaaaaatatttgcagcacattagacaaaagacttatttccttaacatacaaataacttgaataaattggtttaaaaaatgaacttgacagaaaaagttgtaagggacataaacaggacataaaaagaattataaatgtccaataacatcagaaggtgctacaaggttggacacagtggctcacacctataatcccagcattttgggaggccaagatgggaggatcatttgagcccagaagttcgagaccagcatgggtaatatggcaagacccagtctcttaaaaaaaaaaaaaaaaaactttaaaaattagctgaacgttgtggggtgtacccatggtcctagatacttgggaggctcaggtggtaagatcgcttaagcccaagaggtggaggctgcagtgagccatgttcataccactgtactccagcttgggtgacagagtgaaaccctatctattaaaaaaaaaaaaactcctgcatctcagaattgaaaaaaacataaatatcatgatgagaaacacttttctacttaagagattggtgaaggttaaaaaaaaaaagtaatgtagaggatgtggcaaggtgatatttttattctctgttcatgggagagtaaatttggtacacttttggatagtattttggcaatatctctcagtccttaaatgcacatgtcctttaaacccagtaattccacttgtgggtatgtatcttatagataaacttgcataaggttgaaaaaataggggcccaagtacatttgtttgtattaatgaaaacaaacatgcagacagcataaatgtccatcgatagggtaggaataagtaaattactcatttataacttacaggcatttttatgtgatcattaaaatgaatgggaaaaaagtggatcagctgtatgtgaattgacattaaaaaagtcccaagatgtaataatttaaaaaatcaacttatagagtaatatgtacagagggattctgtttaaaagaaagaacaaagaaaataaaaaatttacggaaagactattacatcaaaactttgtggaaaggtggaattgtgagaaaggaattttacttttcaatatatcaccttctgtactgtttgatttttttttttaatcatgagcatacattatattttataagtaaggtggagggcaagtttaaagaaaagcctgtgcagagatgtgaccatcccttggcctggcgtatggatggaaggtgtgctgttggaaggctttgtttggcccaagttactcccttctcactggctaggaggctaaactctcatctttcatctgaaatccctgctgcttttatgaacatatcatagaatcagatgaaaaaagcatctctccaaaatgctggtgttaaaaaaaaaagtcgccctctggccctcgcccatgagtaaattaacatggaattatttgggcaggctctcctgctgacaccttcaaaggcgtggcacatttctgaagggctaggagagacccaagtgcgtgtgatcaagggtgtattcatttcctattgcactatgacaaattatcataaatttagcaatttaaaacaacatccatttattatctcacagttctatatgttagaagcctgaaatgggtcacacagcactaaaatgaaggtgttgttgggactgcattcctttctggagactttgggaagaatcctcttccaagcccttttaggttgttggtagaatttagttccttgtagttgtcgaattgagttcttagtgcttgctggctgccagcagaagctgtctttggctcctggaggtctctgcctgtccttgtatgtggcccctgcatctcagaaccagcaatgatgcatcaaatcttacttatgcttggaatctctttggcttttctttctgggggatctcttttctgccattctcttctccctccagctgaagacatttctctgcttttaagggtgcgtgtgattaaattgggcccacctggataacacgggctaatccctgtgttttaaggtctggaaccttaattatgtttgcaaagtctctttcatcatgaaacacaatacattgacaattcccaaggattatggtgtatacattttaggaggctgttgttctgcctaccacaggggctaggagtatggctacatcagggatggtagcatttggcatcagatagcaggaaagaggtggggaggggccaaaaacaggaggctaacctgagcctggagggcaaacccacacgtggagaaagaggccctagccaaagaagggctcctactgtctctgggtttttctttcttttttttttttttcctgtttacctcctctccctcaattaaagaactaatacttatgagtggctcagagagcaaacattaggaacaactcagaactgctatggaaaacaagatagcaattctccaaaaaattaaaactagaactaccacatgctccagcaatcccatttctgggtatatatccaaaggaaatgaaagcaggatcttaaagaaaggtatctatacacccatgttcactgcagtactttttacaatagccaagaggtagaagcagcccagtttccattgacagaagaatgaataaacaaaatgcggtacacacacacaatggaatattattcagtcttttaaaaacacatgttgtgtgagaggaagaaaaccctgtcacatgctactatgtgggtgagccttgagcccagtatgttaagtgaaaaagccagtcccaaagagacaaaatactgtatgatttcattgataagaggtatccaaagcagtcaaattcataggaacagaaggagactggtcgttaggaatgaataaggaaagagaaaaagaggagttgtttaatgtgtagagtttcagtattgaaagatgaaaaagttctgaagatgtttcaaaacaatgtgaatattctaaccactactgaactatacacttagaaatggttaagatggtaaaaaccctcagatttccaattgtaaacattcttatcacaaagttttatgtgttctttttttctctctgccacacaaaaccacatacacactcaaacataaataagcaatcaagtcattgcatttctacaaaactgtatacgtgattatgtgtatgattaatttattacagtggtatgatcaagggagaagtcattagttgcaatttcaacgcattaccattgaagatgaaagaatggctggtttcttaggtcttttatattctatctaggagtgttgcaaccctaccattgtttcagatgaatcaacaatctatgttgcattagtatttcctttgtttgcaaattttgaatatctctgttcagacatatgttctaccacttcacccttgatgaaagggcctgatatcttattggtttgtactccttggacttagagtcccttgtcatatgttgcctgtaggtccacagcaagcactcaggaagcccacaaattagaatgtcttagaacgtgactttttattaagctaccacagcagtattttttctgcgtaccttctgttatacaatgctggctttcttaggtaaatactctgagctctttcctccttgatcaattcctaacttacatttacagaataataataaatgtaattcctattagtttgaactctcaaattagaatttttattatggtactagaatttttctttctttatttctttatttttttttgacagagcttcactgtcattcaggctggagtgcagtggtgcaatcacggcttgctgcagcctcaacctcctgggctcaagcgatcctactgcctcagtctcctgagtaggtgggaccacaggcatgcccccaccatgcccagctaatttttaaaatttttttatagagatgggaattcactgtgttgcccaggctggtcttgaactcctgagctcagctgatccacccacattggccttcggaagtgttgggattacaggtgtgagccaccacacccagtggtgctaaaatttttttaaattaactcacaatcattgtaatcaccatgaactgttagtaacatcctaacttgggatacattctcctttcaccactccaaactctaatttacaaaatgaggaaagggaatatagagctactctgcaaccaagggataagagaagttttataaaaatatattacctaaatacaatgcctactaactttgttttgaagttcatccaaaacagttaaacaattaaagcagcaagtacctagtgcgacaggctctgctgggagcagaatgaagacagtctaaccaaaattgtaactctccctttcagaactccctaatcatttaaaaggtaggctcttgagcaaattgcttagtctttctctacttcagtttcctcatctataaaacaggtagggtaatagtgcttatctcatctacggtttgtaagcattaagccagttcatgtaaaatgtattagcagtgcctggcatggagtgagcactcaataaatgttagttttaatcagcatgatttcaatatattaattttattctaaaatgtatttcttgccaaataatatcgctgcaactgtttttgtagaggggcttctgcctatttcctgggcctgattttattacacatcaatagccccctctccccattggaatggttctttcagccatctaaaagagatgtcatgtcctcaatcagattccttctgaccactcttgttttcaatattttataatattttaaacacatatatatttctaaagacataaaatactccctttccactcctagtgggcatactggaatacagttctgacactaactacccagcattagcatcagattccacaggattaagggttcagtcctctgcaaaactgccctcacttcagatgtcagttcaagtgtcgggaatcacctgcacttctggccaactggctataaatttaggagttttcatgaccctctgaaattaaagaattccctagaatgattcacagaactcactgaaagtgctatccttatgaatgcaagtttattatgagggatacccatgggcaagctctggaagggtcctggacccagagcctccatgccctctccctgtggcatcagggcacctcaccctcctttgtgtcagtgtgttcaataaccaggaagctcctctgagcctcagtgtccagaattgtaattggagttccattatgtagacacgaatgattgattaaattatttgttacatgattgaactcaatctccagcccctctttcctcctcagaggtctggctgaccagagttgcaaccctgtgatcacagggctaatctttctggagaccagccatcattctaaggctatctaagggtctaccatgagtcaccccaattgcatcacaaagtcactcctatcactcaggaaattccaagggtttttgaagctctatgccaagaaccagtgcaaagaccagatacattcctaattatactacacatctataactcacattaaggcacacagtttccaatatatattcttttatttttgactaacattatattaaaaataaataaagttatattaataccaatggccctggctatttatgttgatcagaagctctgattgttagatgtatttttcatatatgggaaaaataggaaaatgaattaatgtttggtaataaatatagattagcaaggcagaatcattcaaaacatgggatccatatagaagataccgaaaaagggatccgcggtggtagaaatgttgggaaaggctgccaggatggacccttgcagataggaaaagctaatctatgatcaagtgttcatggtgagagaaggcacagccccccttccctcccgaacccttcctctctggtgggaacaagattggtgcagtttgacatatgaggacacagtcatctcatttccactgttaacccagaggaatggcagtagtggtagaggctcttaggaaaggtgcaatgtgctaacatgagagagaaatttgggaagataatgcctttcaaattctgtcccatagaagacaccagccctgggcatttggatgctgttgttcctgggttcaaagagtttgtgagtgtcctgtccagtttcatactccttgctttgacacagacatcccattagacctttctttcctgatgtgattgctcttctttgctatgcaaatttaaaacgtgtgaggagaaagctgtgttcatgcatgtgaatatgctgaactcctcctctggtctccctcacatctaccacatccaggaatggaagatcaagcttggtgactattttcactgaaagagacttttcacatcccaagcagaacaggcatctttcctggttaggtgctgttcaagtctgctgtgtgttttaaaccatgttccctgaagctgctttaggtaaatattggcattcagacaggtacacaaatggtcttttgcagaaagttgatttaaaacaggttagacctggatttcaaatcaaaacatttaagctttgttttgggacaaagcctggaaagtttctcatctgagtgagaacagagaggcttcctaggaatgagtggaatgaacactaaaaagctgttctttgccattctctgatgttagcccaactgtgaaggagggagggtccctcttttatatttaatcatgataaaactatagtatgcaaagctaatgtttaaccattggaaaagcctggtaaatcagaggtaaagaggaaaataaaaagctctagatcagaggaaggaatgtaaagtggagaaggtatgatttgttctcttgaaagtctatttttttggtggatgtaaagcagttagaaaaaaaagaagtatatagagtactgagcaataaaatgaatacacaggtctcacgtgaattataagagaataaatcaaaagaggagaaaattctcaagtctatcccttcattatcagatctttatttctttcatttgtaactctttgtgtttgattcagtacctcacgtaggttctggaggcatgtttaaataggagtagtgacagtcccatgtgaacagggtttaagaaaggtgaagattgcatttgtagaatttttaccatatggcatggagctctgaaaagtctgacaccggcatttgagaattattgaaagaaacaggatgcagaacaagaaagcatttttaattcatttattcactcaactaatatttactaactatcttttatatgccagatattggctctggcaacacagcagagaaagagaaataaaaaggatggcacctacattttattagggaagacagacaataaatgaagaaataaatgtacagtataaaaagacagttttaagtgctctggggaaaagtaaaggtggataataaatatgatggggggtgtgattttctgctcagatataggaggagaagtcaacgtggcatgagatggtgagctgagggaatatctcgggaaagagcagccaggcagacggaatgataagtgtaagccctgaggcagatgggcaagacacatttgaatgcaacaggaagattcccacgaagcaaaaacagggatacaagattacaaggggattgggggaggtattacaattctcttttatggtactttattatcctccaagggccacagagagtcccaagaagtcttcacatggactgttcaaggagtttccattctctaggtttactttacattaggaagcattcttaaatttgctgcaacttcttgttgggattatcgctttttaaaaaaactcataaataacccataaaataatgcatttaccatcatgtccagtagacatcatttaccttggccatttatgtaagaagtattctgcccagaatattacaaacaggagacatccctgatcccagtccctcacaggtttctcatcctcataggagtgaggtggatagagtaagtgtccccaaatcctgcaaagccagtgctgtggtctaaatgtctgtgtcgttccccctcccccaccaacctgccccttattcataggttgaaatcctgaccttcaggatgattgggcgatgggatctctggggggtgattaggttaggtggggattattgcccttttaaaagaggtctgagggagcttggtcacatcttctgccatgtgagaacacagccagaaggtgccgtatatgaaccataaagtggaccttcactagacactgaatctgctggcaccttgatcttggaattttagcctccagaattgtgagaaataaatttttattatttataagacacccagtttgtggtattttgttatatcagcctggaatgctaagacagacagccaccgttctctagccaagggccatttaagaagatgtggattctgcacttcagtgagccaaattccctatatttctccatatatccaggaagatataaattctctatatattcctgttagattgcaggacccttagacagggacgtctcccgcagaagttacacatgcacagggctgagtatgtggccagaatagccatgttagtcttcaaatctttgtgacccttggccaagagaatttggtcaagaactcttaactaggttaagcactttactttgattgtagaacaaagagataatctacaaatactggtgctagatgactcaaaagaagattaatacaaattatttataatctgctttaaacaaatacatgaaaattattctgagaaagatgttcatgttaataaagtctctggggaggccaagtgtttcaaactcaatccagatagttgggtttgctacctttgtcagagaaaccctgagcgcttggagagacaggaaggaagatgtaacagaatcaccagacacagtcatgcatttcatgtctccagtgtactagaaaacactcagcttctgaagtatctcccaaatctcccagaatacaataggaactttgatttctagactattgatacttgaaggaagcaactcatcgggcagccaaccatctagtgtagagcttggagaaagtccacactgtgagatgtcattgtcttgctttcatattcttacttagcaaactaattcacagttatgtattaagcccctatctggggactgagcactgggctcccagctggataaataggaatgagtgaaacaaatgtctctgccttctggaattttattttagagggggtggagagacagatataaacagcgagaggtattactcaatgctgagtgccctaacaatggagaggtggctgagatgcagaataacagtagaagacctactcagatcaagtgccaaagaagatctgttagagaagatggtctttaaggagaggactgaaggtaaaaatcattccagttagagagaacaacacaaaccaaggcattaaggtgggaaagagttcattgtataccagcttgactttcaaagaactgaagtgtgggaactctacctctcatctggagagagtggctccagataagagtcatgaaggtggttgggccaaaccatgcagggccctatggaccagtgtaaggagtttggactctattcagtgtgaaataggggagtgacaagatctgacttagattttttttttttttttttttgagatggagtctcgctctgttgcacagaccagagtgcagtagcacgatctcagctcactacaacctctgcctcctgggttcaagtgattctcctgccccagcctcctgagtagctgggattacaggcacctgccaccacgcctggttaaattttgtatttttagtagaggcagagtttcatcatattggccaggctggtctcgaactcctgacctcaggtgatccatcccaaagcacagagattacaggtgtgagtcaccccacctggcccgacttagatctttaacagatcccttggctgctatgtgggaaatggctggagatgggaagtaggaagtagagaggaacatgactcagatgttcaagtacgggagagcgatgattgtgagttggacaagagcaggagcaaagaacctggggaggagcgcccatgcgattatcttcttaaaataatctcagcaggccttgctgatagatggaattcagagggaaatgcaggtgaaggaatcaaaggggactcccaggtttctggtggctgatgattgctccttttacagggatggggaaggttgaggaaactgagcaaattggcgatgagcacagaaactggagccagattgcctaggttcaaatcctggctgtgccacaaactacctatgtgaccttggcgagtgtcttaaccgctctggaccctcttttttctcctctataaaatcacggtattaattgtacctacctcatagggtggttttgaggattaaatgatcaggtatatgtaaaatacaagtaagtactatgtaagtgtcagaagggggaagaaatagcttgggaggaaacaatgagttgatataggagataatcaaaacaaatacatggaggagacattgaatatacaagaccagtgctcagaactgaagtctgggctagagctataatgtgggatttttctgtatacagaagagggagtggaagaaataacccacagcaggattagagggaaagaaaagagagagccactttccactttagaattgcgtattttatagaggtcagacaaaggtgagtgcatcctggagaggcgggaagaaacctaggaggtgaggcacaggagccaatggaaggcaggctagctgtgagtgacacatgctccaaggggtcaaggcttcttattataactcatgtgtcatggaaaatacaacatcaatggcttgtttgtccctgtcttccctgatttctgaatctcattcatctttctactccatcccacaccctcctctgttctcacattccagtcctcttgctctgacactgccctgatgatgaaatcactctatttaaaaaagaaaagctgaactattcacagtagcaaaaatatggaataaaactaaggtttatcaacagaggattgaattaagaaaatgaatgtagaatactatactatactatactatagaatactactcagccactcagccacaaaaaaaaaaaaaaatgaaatcatgtcttttgcaggaacatgaatggaactggaggccattatcctgagtgaaataactcagaagcagaaagtcaaataccacttataagtgggagctaaacaatgggtacacattgatatagagaacggaataatagagattgaacacttcaaaaggtgggagggtgggaggggctaagggctgaaaattacctattgagcacagggctcactagtcgggtgacgggtacactaataaaagccaagacttcaccaccatgcaccatctgcatgtaagaaatctgcacttgtaccccctaaatatttttaagaaatttaaaaaagaaaagctgaaaagtatgaatattttttctttgagtgagcccaagaacaaatataaactttttcttcagtactttggacacattatgaacaaagccatgttgtcagcctggcatatctcagggatcccagcgtctgccagtcttgcctgctgtggacgttcagcaccgcctactccttactgccctgtgggctgcagagcatgcctgcggtggtggtgggaggcttctgtttgtgcatcatcttccataggcacagtgatcattgccagccagtggcacttctaggtgaggaggctcttaggcgaggcccccaggatttgccctgtaggaaccgcttggttaccagtatttttctctggcctttacctgctgtattagtttcctagggctgctgtaataaagtaccacaagctgctggtttcgaatgacatgaatatattatctcacagttctggaggccagaagtctaaaatcaaggtgtggtcagggccgtcctccctctgaaagctgtaggggagaacttcttagcctcttcctggtttctagtggtttactggtataggggagtaacagtaatccccataggttcttagttggaaagcacctttgttacaaaagacagattgacaagagaaaaccagacagaagtttattaacatgtgtattttgagtatacatggagacaccaagagaatgagtagttttcagaggtggctttgaatttcagcttatatagcatcttcaacaaagaacagtaaattttttgtaacaagacaatagaaaaggacctttgaatctctgtgggcagcaacttgcaggtggggcagtgaagaaaggcaaataacttgcagataaaggttagttagtacagcttgctaatataaattcttctaataccattgtcaggctgataagggtcttaaactatcttcagtctttaacctttgttctccctggtagtcaggagggcagaataccttttgtcttcataaatctttgtcctgcttttaggcaaatggaggaaagatatctcttgagtatctgtttcttcttgtcttcaacaatccttcatgttttgaagaggcacattctggtctcatactggcagctcgcagctgcgtaactccagtctctgccttcaccatcacatcacattctttctgtatgtctctgcctttacatggctgtcttataaggataccagtggtattggattgggggcctgccactgtgacctcatcttaattaattacatctgcaataacctggtctccaagtaaggccacattctgtggtactgtgggttaggactttaaggtatttttttggggagacacaattcaacccataacacctgcctcacttgactgcattttatttcagggctgtttacagtaaactttctttggttttgaaaaatgctttttactggaaaaattgaacaggaagtcttaacaatttccaagtttgattgctttattttttataatctactccatttttccttgtatcataaagcttcatgacccaacatagcatcttgacattgaacagagagccatcgtttctccccggctctttgagagctccttgtcctggagttttatctggagctttgatttgatgcctcaatttttggatgtggcctttatagggctttctgaagtgatgagtgatctggcttcaccgcatcttcaaaatgtccctgcagcaactgctattcttgctctgtagcatttggctttaaatatgtttcatatcaacagggttggcaccttctgtttttctcttccactcatccttctgaatgtaaatgtttaacttcttgcaaacacagtacactttgcataaagaaataggtacaactggcttttgtgagtcaaaaacagactggcctctcccaggggcaatagcaaacagctccctaggcccagcttggccaagcagtggcttcaaggtgtcatgtgctaaggctgacctccgaaggatgattttagaagatcaagggagattatattgtcttgaaaaagatggtttaaatgagatgaaggctagtctagtttaggagcaaagactgttggaacagaccacttactggctgtgggaacttagacaagttacttaatcatcagtttcatcatctgtgaaaaggatttattatatctaccttataagtttattgcaaggattgaataagcaaatgcaggaaacgcgcttagcacagtacttggcacatagtgattagcagcaattgttcttagtataaagagctcctgttactttccccctttatctagacattctttgctttaatttgttttccaactggcttcagcagcatttttcttttggaggcatctgaaggtcaagtttcagaaaaggaaagcaactaaatgtgtttaaatgtgtggatggaaatctgatcaaaggcaatttttttttttttaaatagactttgccaagtattcaggtgatgttctacgctagcactgactatgttaggacactagggttactggaaataaactcagccaagtattgattagtaatataaatgtcaaggaattaagcttgcagtggagcaggcaatgcaagcagtcctgtttggctgtaaaaatgccgacattcctgaagcgatgagctcatcattaaattcttcatcttccacacccataagagaattcatggcttgtttgctcatttttgctttggttttctagacagctaagaaggaaataaagcagtgcttcttaaactttattgtgtactagaatcacctggaaggtttgttaaatcgcagattctgcatcctggccctgcagttgttggttcaggaacactggggttgggcctgagaatttgcatttctgtcacattcccgggtgatgctgatgcagctgcttcaggaaccacactttgagaaccactaagatgaactccctcgaggcattgtgatgtgacatagagcagggggcattttagtcataaggtgatgggtttgagtcctggggctgtccttattagcagagctcttttaagcaaataatctctgtgagactgggtttcttccattttcaattagaaataataaaattcacctcatgaaggctcttgtaagagttaaatgtttgtaaatcactttgttcatgtattagttttaaaagatttcattaatctttgattgtaagattattttgtaagtcatgtaatatttccgaatgatttgggcaaccaagtctatcaaatgaataatgccattcgtttaaataatggaagcagttttaaatatttcactaaaattccacttcagaattcccaagccctttttcaagttggggtgtgtgtgtgcgtactttcttccccccttgtaattaaacaagttattcctcccccatttaattcttgctaagtactaaattgcataataaattgggaatttcctccttctctaattctgtgcattggcattttagcatattttgatgtgtaggtggtaaaggccagtgaaaagttcacagctggagtgcaaaccctgagttttcatgatgcatgaacaactgggatctgaccacaattttgtctttttatatttagaatcagccacgtcaatatctgcatggcacagaatcacctgggagcttcttacacatgtagaatttagcaccccatctctaaaacatatgattcagtatatagaaggtgtgtcctggtcatatacatttaaagtatcactccaggtggtacagagactgcacttcatgaaacaccaggaatggtctggaatagtctagtttgcttttaaattcagcctctgcctgcaactagctgtgtagacttgatcaaattctctggtcttcttaaatcttggtgctgtttatgtgaaattgctcactctcatttattggggctgttatgcagattataattaacatatataaagtgcttagcatgtaaagtgtgctgggcatgaagcattcaaacaatctaacattggggtagttcttttacaatgccagacactggaaggtggacaggtaagatcaacacaaaagttcctagatggatagaagtgaaatgaagccagttggctctgtgaatccataaaatatttatcaagccttggagaaagagaattcatcaaaaattatattaaagtgactaatttattttctttctttctttctttctttttttttgtgagacacggtctcactctgtcacctagactacagtgcagtgacacaatcacagctcactgcagccttgaccttctgcgctcaagtggtcctcccacctcagcctcccaagtagctgggaccacacctgcacaccaccacacctggtaattttttaatattttgtagagacagggtcttactgtgttgcccaggctggccctgaactcctgggctcaaatgatcctctgtctttggcccccgaaagacctgggagtacaagagtgagccaccatgtccagactaaagtgactggtttgttacaggtatcttcaggtcaggaacattcacaactagtttctaacttgcaattattttctaggttctaaagttcttattttagatgctataagattaaacagtgtttgagtgtattgaaatcaattattcagtctaatctaatgaatcagcagactatcatattttactgtgccagaacactaattttccattcactttaatgtgacagataatgtcctttcatgaaaatattaaacccttcaagagagccaaaatgaacccatattaatacaagacaacagagccaatactattcagtaacaggatagaaaaatgctgtttaaaaggaaatattattactgtaaagacagatttttattcaagaagttaggaactaccacataaatctacgtttactttgatttttctcaacatctttgtggctgtccttctttagtctcataagcaattttaaaatattttttctatattatggtctttcccagcttactgacatgcttctaatttacatgcttaaaattagtagtgtggcattttttacttccttgcaattcctgaagatctatgatgtcagtagagcttttagaaggtcttctaattgcacattcattaaacaaagcttaagaacagacagtcctaagggggttttcatttatggatcatttagtctgggattccccaaggacaatggtcaacattaattaaaacatcttgaagtctgtaaaccacagttacttctgtgcgagatgccatgatgagctttgaattatcacttgaaaaataagaagatttaggaaatttcagctttcttgttgctctcctgcaaatgctactttaaaacaaattttcttcagtgtcaccaagattaacacaacttactgctctagagaaccaatgttttatatttgtaatttgttacacaaaagaaaaagaggactcctgagatatggggtagatatcatattccctgtgtctggggggtagaccatcacttcaactgtaactgccagatgggttcttcctgctcactgtgcagacaaaatcagtccactgagaccatcacattgcagtaaagaaaaagtttaattgatgccaggctagccacaccatgtgggagacagagttattactcaaatcaatttccctgaaggctcaaaagttaggggtttttcaaggttaaaatggagggcagggggctagggaaggggcatgctgattggttggagatgtaattataggggtatagaaaacagtccttgtaggctgagtctgcttctaagtgggggccaccaaaggagttgctggtctgggtggggctgtccagtagtcagaaatgcaaaaagcctaaaagacttnnnnnnnnnnnnnnnnnnnntagtgatgctatctgcaagagtaattggggaggttgcaaatattgtgacctccagaataatggcaggtaattatgtaactatgcctgcatcttagtaaaattcaggcccctctcatcctcctaacttggtagacttccattaattttacaagggtagtttagcttttgggaagagctagtatcatttaaactataaactaaattcctcctgaagttagtttgccccacacccaggaatgagcaaagacagccagcctgtgaggctagaagcaagatggagtcaaccatgtcagatttctcttactgtcataattttccaaaggcaatttcagagccactcctgaagtggtaggaaggtgtgcgaattatgggtttgtcatatgcctctcatatgcatgaaggaatatgcatatgtaatacaagaaagatgtcattttgaaccaatgggactttcaagtatttccttctaggttggacaccgaggaacagtaagagattatccagactttagcccatcagtggatgctgaagctattcagaaagcaatcagaggaattggtgagtgatattttacaattcctttcttaatgttgaagcaaatcaggcaagttacaatctaaaagttcagtttgctcagattggcttactcaatttaataaattgtcaggaattttctaaaattgtgaaataacgaggaaatatatagagaacccagttttattaaatcttaacatttatcatatttacttaatattaaaaattaccactgatactagtggtctaggggagatccccaaatgccgggggaatctcaaccctggctggtatccagactcttgacaccatctagagaagaaattcaaggatgggtcaaaaaatactgaaaacacagagatttattgcaaagtgaaaaatacacactcaggaaaggggagtgtgagtgtactcaagagacagtcgtgcacaagggggtttggggctgttgcctttatgggtttctttaaccaaggggtggaatagtcatgaagattctgggaaaaaggtgatttcttgaaactgtagtgccacccctttttacaccaaatgtcggtgtttccggaactgccatggcactggtgggtgtgtgattgagtatgttaattagcatataatgagatcctaggagaatcctaggtcaaatccagcgccatgttgggtccagtgggtcttagccagcttgatccacactatgggttttcagggtcatatcagcccctagtttctgcagctatttcaacagtttccttttgctagtcatgtgaaactgctgcctggaattttctgttctcctgtgaccatcctgtattagtcctatctaaccaccaccaccactgccaccaacaacagtaataattatcataataaatcattacaaatatggcccccttggttgggcatggtggctcctgcctgtgatcccagcactttgggagggggaggcaggaggatcactagagcccaggagttcaacaccagcctggcaatataaggagggcccttctctacaaaaaaactcaaaaaattagctgggcttagtggcttgggcttgtgatcccagctacttgggaggctgaggtagggggatactttgagccagggaggttgaggctgccctgagctgtgattgtgccactgcactccagcctcgatgacagagtgagagtctatttcaaaaacaaaacaacaacaacaaaaaaacccaacacaatcccgtcagttcttcctggatttcactcttgcccctttccctagagataaacaccatcccaaattagagttcattcccatgaaacttttaataccataactacatatacatgtacatattgttatgcatggtctcaaacagcataaaatgaaatcatactgtatacattcttctgcaatatgtttttgtctcttaacattatgtttttgagatttatccatgttgatatggtgagctctagtgcattaattttaactgcatggtagtctattgcatcactatatcagaagatgggaatattgatggaacatttaaattgcctacaattcttttatattgcaatataaaaatgctgcaatgaatattcctctcatgtctcattgtgcatatttgctagcatttctctagaatatgacaagaactggaatttccacattgatggggatgcttctcttcaaatcaactagaaattttgccatactgctctctgaaatgaatgcagaaattagcattcctttcagcaatgtacaagacttccttttgctccatattctcaccaacacttgctatagtaagactattccatttttctaattaagtgtgtctaaacagtatcttatactgcatgtgtgtttgtttcctgtctctactccaatgactgatgcagttaagcatcctcacttgtgcatctgcttccactttcatatgtcaataaaatataaaatatattttatctatttttttcagttggtttgtcttctttatgattggcaagagtttttttataattcctcaatacagactttttaaaaaatattacaagccatgaaaatatttcctataagtttatggttttttttttaacattggtgacatggtttggccctgtgtccccacccaaatctcatcttgtagcttccataattcccacgtgttgtgggagggacctggtgggagatgactgaatcatggggacaggtctttcccgtgctgttctcatgatagtgaataagtctcacaagatctgatggctttataaggtggagtttccctgcacaagctctctccttgcctgccaccatccacgtaagatgtgacttctcctccttcccttccaccatgattgtgaggcttccccagccacatggaactgtgagttctccattaaagagttccttcataaattgcccaggctagggtatgtctttatcaacaacgtgaaatggattaatacaattggttacagtaatttttattgcatagaagttttaaattttagtgaaatcaagtttaccaatatttttgtccaggatttatgcttattgaatcttttctataacgaagtcataaagttagatattctcctactttttttttcaaagttttgaaattttatttttcgtattatgatcttaaatctacatggaattagtgttcatggatggtatttaaaggtgtctcattttattctatttcatgtggacatttaattgtcccagaacaatgtattgaagagctcttccttttcacactgatttgtacgtaatatcacctatgttttatgcttccctatttttctcttctctgttatgcttcatttatctatttggccctcccaacaccacattgtcacaattattaggattttataatgacactaaatatctaccaggcaaggtctttcttggctctttgccctcctctatgaattttaaaatcagcttgtcaaattcaataaatatactatattagaactttatatcaatataatattatgttttttctgcctgtttgaggtttattttttccatttttcaatgtaagttatttcttcatttatctcttgatttccttattttttttttaagagagaagggcttgctctgtcacctaggctcgaatgcagtgatatgatcacagcccactgcagcctcaaactcctggatcctatggcctcagcctctggtgttgctaggactacagatgctcatcacaatgtgtacctaatttttaaattttctgtagtgacagggtcttgctatgttgcccacgctagtcttggactcctgggctcaagtaatccttctgccttgtcctcccaaagtcctgggattatagatgtgagtcactgcacccagcctgattgccctatttatatctagtgttgaatagactgtttcatgaggttaatagtctttaaattctgtcacctctttttaaacattatgtttcttcatgaatttgcactttggcttacaggccttctttaagaaggaggttattgtttatgagcaccacttctgataggttctgagttcagaatgaggtatcataacggtgtttgcattagggatgggtcagacacagtctctgaacctgaggcatcttggcttagtttttgatcttgggcatgtttaaaaataagagatgagaaactgccaggcatacaaactacacataactgcaggtagtttggtatagttgtagtctaggtgcataggttatagagatgcagagagggggtagaaaatgagaacaaagacataaggcaggagagatcataatgagctgatacatgagctaaggggcttaaacttcatcctgaagattacaaagagccattagaattttagccaagggggtgacatgatcagattgtatttttaaacatttacttaggcagtagtttacaggaataattatatgggagtcacattaggaggtgatttaggttatccaggtaaaatatgataaggacacaggagcagagggcatgcagaggagacgacaaatttaagagatgcagataattgctataatatagagaataagataaagaaaggaatctgagatgattcccagggtttttgcctggatgactatatccatagttgtggatgagggaacataaaaagaaagacaagtcagagaggaaatacaataaattccacccagaatgtgctgagtttcagatacttgtgcagttgtggtggccggtagtgtactgacacagatgctgggtacaatacacagcaccaaattggtgctcagacccacagagcacaaatacactttaatctgattcggtatttatttaactatgtgtaagaatacaaaaccaaagacacagaaaggcagcatctttcattgggaggcccagcagctaaccaagtacacagaagcttttgcttcatcattgatgtaagctgtgtaccactgccacggaagtgtgtagatgaggtctgtgagggtcaccttgacacaaagaagttgagcattgagttccaggtgctcttttatacctctctagtcatgcatgctctaggcctgcaagccaattcacagcttcccaaaccaggtatcatcgtgggttgggaaattaattagacacaactttccacgtttttcttactactgtagtcaccaagataagaatgaccttgaggtcattcttaggcaggccagcatcagctctggcctgatgttaccttttgcttacaaacaattcattttgtatatgggtttgaaatttatgagagaggccgggtacggtggcttacccctgaaatcccggcactttggaaggctgaggcgggtggatcacctgaggtcaggagttcgagaccagcctgatcaacatggtgaaaccccatctctactaaattaaaaaaaaaattagctgggcatgattgcacatgcctgtaatcccagctacttgggagactgaggcaggagaatcgcttgaacccgggaggtggtggttgcagtgagccgagatcgtgccattgcactgcagcctgggcaacgagagagagagaaagggcgaaggggagagagagagcgagagagagagagagagagagagagagagagaaagggagggagggagggagggaaggagggagagagggaggaaagaaggaagggagggagggagggagagagagatgtggaagaaatgcatgagagagatgtggaccaaagatagaaatatatgttttggggtcagagatttgggttcaacttcttgctggaccactcagcagttgtgtgactttggcaaggaagataagttcgtgtcttcatctttagtacagcgggcccctgtgaatattaactatggcaatgaataaaagggtgtttcatgcagggcagattttcaataagtgttggttcctgttttccagaggaagaaatattttgatatcaagtatgggagagagataaaaggcaataagacagtaaccaaacctcataaaggtaaaaaagtcaagttcaaaagtagtaggttgttttgtctgatgtacagaaaggagtatttagacaatgattgtttccttccccccaaaactatccaaataaagttaacttttttttcccaaaactcaggcaaacaaaataaataaataaataaataaataaataaataaataaaattccaaccagataagatgctagaaattaaaatgccttactctctgcatttgtctcaggccattgatcattttgcttttgttcaagacaaatgttgagcataaatattgagtaaaataacttttgtttcatttaggaactgatgagaaaatgctcatcagcattctgactgagaggtcaaatgcacagcggcagctgattgttaaggaatatcaagcagcatatggaaaggtaaggtcacattaacatgacaggcagtaaagagatcattaatgtaccatggtcgctcccacatggttatgcccacagtcttctgtttcaggctgagtgtaacagaagatgccctgtgcatccagtcaggagcctggaatctgagtcgtggttttgccttgaactagctgactggctttgggcatgttacttggtctttctgggcctcagtttcttcacctgtaggataaggtttgccttagcccagtgggttctaaaccagaagtgattttgctccccaggggacatttgggatgaatggagacattctgatgatcacaaacaggatggtggggagtacttctagcatgtagtaggcataggtcagggatgctacaagcatctgagaatgcgcaaggcagccctccacaacaaagaattactaaggaaactatctgactaattctgtcttaggtaaccttttatttctcttttaattttaaaatatttatgtagttataggtttaattcattcagcaaagaaaatttagtaattaccagaaactatataagaacaagtaactttgggaggctgaggcgggtggatcacctgagatcaggagtttgagaccagcctggccaacatggtgtaaccccatttctactaaaaatactgaaattagcctggtgtgatggcacatgcctgtaatctcagctactcgggaggctgagggctgaggcaggagaattgcttgaacccgggaggcggagtcttcagtgagccgagattgatccagcctggaaacagagcaagactccgtctcaaaaaacaaaataaaaaggaaaaagtaaaagtaagacttggtctttgctatacagtttatttgtccaatgtctatttctgagtactaatctgtgttaggagatatcctagacattggaaatagactggtataaaaagcacatcctgccttctttcatggagctaacattctattagaatataataaacaagtaaataaaaataattcagatatgataagtgatatgaaagaattaaaatggttgatatgatagacagtgactggtgactggctcctgcagatagagtgatgaaggaatgtcagtgaggggttgttacctcactccccactaagcctaaacaatactaggggttctgccctgcttgatcaggagatagtatttaaggtacagaaaatataaaagccctgaagcaaaaagaaactgggaatatgtgagaaataaagaattccaatatggcaggaatgtagaaagtgaagggggcagaagaaagagatgaggctggagacaggttgagaacatgctaagccttgggtcttggtagggtttagattttattctaagggctacagggaaccactggaggtttgtaagcagaggaataatatactgcagtttttatttttaaaggattattttggctgctgtagataatgaactgtggggggaaaaggtacaaacagacccggccaactgttgagagggtctagtgaccatccacaggcacctcaggaattacctcctgggagtgttctccaggcccccaggctccattaagacacccttctctgagctccctttatcagataacatattatattgaaattttatctttgaatatttctgtttttcccatgagggcagaatgccttaggataaggactttgtctaacttacctttaaaggactagcacagagcaggtgcccagaaaacatttgttgaattgagtgaattgcctagcttcagggcaagacaacactttcacatacagagaaggtgaatgatctattggccttttggtatttccaaaatatggaagaaagatggaggtggaggggaacaaccatttctcacagtggaataggatgagagctgtgaaataagattcagctgcagtggcttggattgaggacagatggtagtgaaatttaccatttagagaggaaaaaaacactgtggcaattaaagcagagttgataacactgaatgccaccccatttgtttcagcaggaacatgccactgctgcaccccccaggagtgtggttgtgtcaatctgtgcccacagcgtttcagcaggctcagaggctaccagcctctatttcagagctgaaaataatcaggagcaggaacaaacattattcagtattatgccattgaatattgaaaatagaaaccctgttacccccctttaagcaggggagatggactgtacttaggtgtgaaaacagtgctcaaaacaatatcaataggtaatgtctgtaagaggctaaattctagtgttccatcgccctgtaggataactatagttaacaataatatagtttcaaatagctagaaggaggatattgaatattcctaaaacaaaaaaatgttacatgtttgagatgatgggtatgcaattaccctgatctgattaccatacattatatgtattgaaacatcactatgtaccttatgaataagtacaattattatttgtcagaaaaaataagtctaatgtattgccacacttagggttttcttttctttacttgttgccagaaaattgcttctgatgccacctagttccacattctcaccagagacaaatgaccagccactgtcctcccttccccttcctcttggagctctttgggagttactgagaggcaagacaccgaggaagagagcacctcccactgaagctgggcgtgaatttataagggttcctcttcctcttcccttaccccaatctaagcattgaaagcatggcggatctaggaaatgcatttgaatacagttcctaactgtggcactcatggaatcctcccatttggctctccttcaaaaaacctctacaaaacagaacaatttgggagtaattagaaaatgcagattaatattcatagaaatattttcaacacttctgtttattccctgtggatggacatgttttgtctgattttgatacatatgttcatctttcactaggtgactttagagaaagagaaaaaaagtatttcacatttttccccttggttttttgattttaggagctgaaagatgacttgaagggtgatctctctggccactttgagcatctcatggtggccctagtgactccaccagcagtctttgatgcaaagcagctaaagaaatccatgaaggtatgagccccccacaagccatttctgcccagggtttgaccaagtcatcaaaaatagtgactttcttgcagtgcacacttgtgatgggtggacttggatgcccttttggtctggactctcccagtggtagaatgactctgaaataggcaacagctatagaaccttaagcccaaatgttcctgggctggaagaattttgtcatatcctttgtttgacatgaagagtcaagttctctaatttgtcatcgttgaaagtaaatagcactatgattaaccccaacactcaagctaaaaacctagcattatccttgagcccttgttttctcttacccttccaagctcccaaatctatcagcaagttccttagttttacttcaaaatccattataaatatgtgcacttctctcaaaatccattgctactgttctagtctgaccaccatcatctcttgactggtccatatcaataggcttctaactggtccctttgcctccatttttgcccatctcaaattcattctacacagaatagccaaaattatttttattaatttattttaaaaatcagattatgctacttacctgcataaatttccaatggctttgtacgcttaaaatccaagcttcttatcatgactttcatcacccaacatagtgcagctcctgtctaactctgtgactttttaaaattctatttatatcagtcagggttccctcagagaagcagaaccaataggcaggacatagactttaaaagatttattgtaaggccaggtgctgtggctcttgcctgtaatcccaatactttgggaggccaaggtaggtagattgcttgagctcaggagtttgaaatcagcctgggcaacttggagaaaccctgtctctacaaaaaataaaaaaaaaattagctgtgcatagtagtgcattcctgtagtcccagctacttgggaggctgtggtgggaggatcacctgagcccagaaggtcaaggctgcagtgagctgtgattgtgccactgcacttcagtctgggtgacagtgagaccctgtctcaaaacaacaacaacaaaaatttattggaaagaattggaggccatggtgggaggattgcttgggctcaggagttcaaaaccagcctcaaactgagcaacatagtgagaacttgtctctacaaaaaatttttaaaaattagccaggcatggtggctcatgcctgtagtcccagctatttgggaggctgaggtgggagaatcacttaagcccagcaggtctaggctacaatgagccatgaccgtgccactgcactccagcctgggatgctgtctcagaaaaaaaaaaaaaaagaagaagaagaagaagaaagaagaattggttacatgattatgggactggttaggcaagttcaaaatctgtagagcaggctgtcaggaaaggcaggctggaactcttgggcacaagctgaagctgctgtccacagaaagaatcttctaaacagaagccttgcctctggtcttaaggcgtttcaactgattggatcaggtctgccgagaaaggtaatctcccttacttaaagtgaatcgataataaactgaaattatatctacaaaataccttcacagcaacacctagattagtgtttgattgaataagtggcattatagcctggccaagttggcacataaaactgaccgtcataccccctcctgctcacccattaatgatgtagctacactggccttttctctgctccttgaacatcataagcttattcttgttttgagatctttatacatgatgtttcttccatctggaatgcttttcctccagacattttccattaattcactcaaatatattttcttaactgcacttattactgtctaaaagtatcttgtctatttatttgtttttgagacaaggtctcgcttcattgcccaggctctagtaaagtggtgcaattatggctcactgcagcctcaacctccctggcaagcctccaacttcagcctcctgagcagctgggactgcaggcacacaccaccacacctggctaattaaaattttttttttttgtagagacagggtcttgctatgtcacccagactggtctcaaactcctgagtcaagcaatcctcctgcctcggcctctcaaagtactggaattacaggtgtaagccactgcacctggccttttctatttttaaaatccatttgtttattatcttttttcatctaactaaaaggcaaacctccaccatggcagggaacctcattggtcttggcctatatcttctgttcctagagcaactcctgaaatgaagtgggtgctcaacgtattaattaataggaaggaggaaaaagaagggagcctagatctgaggcataagccatattctgccttgccatcagggaatggagttatcttcttttctgtggaggacatatgggcatctgagaagcagatggcaagatggaatttgatgtacaggagatttattttgagaaacacctgtgaaggataaagaggcgaagagcagggtaggtggggtgaaccttcagactgcagtggtggcctgacccctatgagaggagagaggagaggaagtaggctgagattaggaagagcctcagtgcatagtgaagctccgagaaaaccttggtaggctgttggggagcccctgagcaaagactgccctttggaggagttctgtgttgggcgcaagtccagtacccctgttgtttacagtcattgactgacagccacctggagagggcatgacctcagtgtgaactttggtagacccaaaggtgtggcagttggaggctgttagctaactgcgttctttgcagctgattctcttgaagtgaaatctgagcattgtttctctatggctacccaaaggggagggtttagcaggtgtaattgtaaggattagattcaccaataagtattagaacagtttctcttttacataaaagaaatccaggctgtggtggcaccaccattatcagagactcagtctccttctatcttgaggctctgccgtctttaactcatggttttcacttcctggctaaagaaggctcatgactcagccattatgtcttcattccaggcaactcaaaagagtaaaggacaaagaagggttcactccctcactctaaggatactccctgagcatacatatggtacttctgcatatatcccattggtcagagtttagtttctggacatatttcactgtaaaagaagctgagaaacatagcctttatatgggtagcaatgtaccaagttaaaagttgggggttccattactaagcaagaaagacaaaagagatactgtggtaaactaggaatctctgctacagagagacagaattcagtctctgttcatatgctgcactggccttattcaatcaagtcttagtgtatatgacttttcttggagtcacagtgtgattcagtgaccttgatataaacaggactgagaggtaattagtccccatgccagccaggcccatgatgcacattactgaggatttgaaaggctccctgtatgaagagaatgatacatgctgatagacccagtacagtgatgcaaggatgaaatcattcaaaagtattatagagccttttctaaacatagtggaatgtttgaatgttggtagggttaatcctgttagactgtcacttctaatcttgaatgacacaggctttttcttttatactatttctttccagaattattcaattgattttcacactagagtgaaaaatttgctgtcactttattccagatgatttatgttattactaaaatatatggaaaaatagaaaacgagagcaatagagaaccttgtattgatttacttaaaagtgtcctttcatctatataaacaagataataagaccaaaaggcatgagattaagttatttaagtgttctaaaaattagattttcttttcctttttagggcgcgggaacaaacgaagatgccttgattgaaatcttaactaccaggacaagcaggcaaatgaaggatatctctcaagcctattatacaggtgtcttattttctgcttaccttcaccactgttcacacatatttgagccaatgttgcttttcctagaatcctctcaatctcttcatgaggcattttgagaagacaagacttacagaaacgagaatacattctaaaatcagctaaagactatgagtttccaggaaaaattggaatatgatctgagctagagactgctacataacaatagcattaatgctttacatttataatattacagctgcagtggattttgctctcggcaatctctcattaattgaattaaccattgtcatcaatgtaagagactcaaatcgtattttatttttaggcgttagaaatcactcagattagatccacgattttgggtgtgggaaattagattaatttagaggatgtgttgagcataaggattcaatagaagtagctaaagacctaatagtctgctggctgtgtaaaattagaaagactctgaaatgtaattctgactgtaactacccagggttagtgtgacttcacaggttaaggtcacagtccccacaagactaccttcacctcagacaccagcccacaagctcaggtgttttcaggctacacgtgcttttaaccagctggctacaaattcagggttctcactaccctctcaggttgaatagcacactagaatgacacagaactcaagaaagtgctgtgttcacaaatgcgatattatcataaaggaaacaaatcagggccaatccaatgtggagactgcatatggagatatttggaagggtccagtggaagcttccactctcctgaccattgatatatcattaccaaccagcaagctcacttgattattggtagccttagtttttattggggttttgttatataagcatgattggttgaaccattgttcatgtgattgaaccagtccacctacactccccagaggtcaggctgatattgtggctcaaagcctcaaccttttaatcatatggttgatctttctgatgtgaccagcctttattctgggtcatattgttagcataactgagctgtagtccaagagaccaaccatgaataacaaggacacacctatgacttgggaaatccaaagaatttagagtttacctcccaggaatcaggaataagaccagcccaattctctactattcaatggccccatagaaccctctccaagtactttaagggagccacagtttctctgtttgtgtctcacagaggtcagttgtgtcatagcagcttttgcagtgggagaggtccaaagaaggagtacatattggtcctcatgtaggtgttaaagaggatgctttgggagattcttgttagaaggtaaatacctcaatgtcaggtgactgttttgttattgatgtactaattgggttctaatcagaaaaacagaaacagcactaggtattttgacagatagaatgtaatataaagaactgcttaaagggccgggtgtggtgactcacgcctgtaatcacagcacttggggaggctgaggtcagcggatcacaaggtcaggagttcgagaccagcctggccaatatggtgaaatcccatctctactaaaaaatacaaaaaaagttagatggtcatggtggcgtgcacctgtagtcccagctactcaggaggctgaggcaggagaattgcttgaacccaggaggcagaggttacagtgagccgagatggtgccactgcactccagcctgggcaacagaatgagattccatctcaaaagaattgcttaagctgggcacagtggctcatgcctgtaatcctggcattttgggaggctgaggtgggcagattgcgtgagccaaggagtttaagaccagcccaggcaacatgacaaaacccagtctctataaaaaataccaaaaattggccaggtgtggtggtgcacgcctacagtcccagctcctcaggaggctcaagtgggaggatcacttgagtctaagagattgaggccacagtaagccttgatcatgccactgcactccagcctgcgtgacagagtgagaccttgtcttggaaaaaaaagaagaattgctaaacacctttcagaggactgaaaaagcaaaaagggaacaaaaggattcatgcaggttataaccccccagacctgagacaacaaaggaaagaggttgaggctatcagaaactggaagctagaatgagggacatacctggctgatgtcgggacctcaggggctcagagcagaggcttaaggagcaggagttcagatctctgaaaagagggctccatctgtaggtactggagccagtacctacacgggggtcaaagtgactttttctaggaagctggagccagttgctgctgtcggggtgaacagccttccctgggttgacactgacatgactagccgtcagatagcttgcacttctttccacctcctgccttccagtcccctctactccccagtactggtggaacctaatagggagcgggtacagacagaagtagacaagagaattgcttaatcattaatgcacaaaagagtatgttttaggtgtttaaaatatttcagttcaacaaggtttacatattttacaaaacccatcagaaccaggcactgtttcccaagttggcttggtattttctggtgtttcttagaagagccactgctccccaagtggacctgccctgtgacagatccctggagcccagcatttaggtacaaacagttccaggatgtgagctttatgaggatgaggattttcgtctatgttgttcactgctgtatcctcagttctaagaacagtggggcagataagtgcaaatatttattaaatgagtgtcctcaaaattgaggttaaggtcttaagagccaagtgaaacttttaccattcaggatagtgttgtgcagatatgacagatgataatagcacaaagttaccagagcctcaatttctatgtgagtaatgctctctgaggctacaaaggatacaactgcatcaaggttaccttggttactagagattaatgatacacaagaagatcaagaaggaaattgtctcaatcatgcatagccaaactttacagagattaaagtcacagcactacccgagggacccagttatgttgtcactctctcggcagcaggcatccattgctccccatgctaatgttttccgtgacagtaactgctcctcttcctttttgcttctaatgttcttgacaccagcaagtaacatcccctcccctaccacatggtgtttgtctacccaaggcttataaatatttgtgcatagcttttggttattcttggctactgttttcttcattatttccaggagtcttttggttctttgttattctattgtctttgtctccttttctgtgtcactcgctccctaagagagaagatacaatgggttcaggaagtcactatcatgttggccctcataaagggaccagatgtcttctacagcttattcagtacagtggcacaatagagtctaaataaagagagatctaaattcttaacttttttcggtattctaaagtcaatggtgtgtgagagagagaacactgaaacagggatcagggactcaaagttctagtccaggcacctgtactattaaaatattctatttgattttatactctactgtgcctcaaaatggataaagtagttgtcaacttaggttgaaataattttttactctaatatcccacaaaatatttgaaggaaagggagaggctgtgtgaaatgacttataaagtctcatctaaataattccaaaattacaaaatacttccccaagttctaagaaatgggatattcattcttctacttgatattttcaaatttaaagttttttatctaactagaatgaaggatagatgtaacaatatcacaaccattaggtttaatgatgcctactaaatattattatttagaaaaataacacacttttttggtggattttgcttatatgaattgctttgaaaagttacagatttcataaaaaagagacttactaaaatcatgctgaagaagtttccatctcagcgcagttcttgctattggataatctcatatcactttctataattgtctttcattgatttaaatagatgagaattctcatggctagtatggctaatttatagaattcttgagaatggtgcagacagttcagatagccacatggtgtcacctacaacaaagggtatagtggctccaagagaatcaccaccccatggatggggcagacagagatttaagactgatgggcactgcacatcacaggccatgcaaaaggggctacaactagtcagtactaaaatatatgaacacacagttggcatttgtaaagggaaatggcatgttttgggtagctttcttacttttgggagatacgaaaaaatatggtttaattatattcattaagattagggttagattcgataaaacagaaaaattacagtggcttacaaaaggtagaagtttatttctatcatatgtagaagtctagacattggcaattctaagtctagtatgacagctactcaaagcttttaggaactcagacttcttcttgattacttttatgccatcactaagaagtggtccttatcttcacagtccaagatggctgcccaagatgcagatatcagttcacatgtaaggcagttggatggaggaaggactaagatgaacatggcctcatccctttaaggagatttgtctgccttcatttcattgtgaataactaagttatagaactgtactagctaagaggaaagctgagaaagtagtttttaagctgtgtacattatatcttgcttaaggttagggttctcttagtatggaagatggccagaatggaaattgaaaggcacactagtagctcatccaccccagcttttccactatgcatcccttagtgccattgtcagatgaaataaaccaagatttgctccagaatgacaactctttctattcttttgcatctaccacaacacagtgcagtaagagttacaagaagaatgtaccatctcacaacagaaaagcatgaagaaattaaataaaagggcaagatttatcttatcacatacccattctttgctagtgttggcatttaaacttttctctgttttataatcatatttttcagtttgtcaaggcttaatttcattctgatttggtttcagtatacaagaagagtcttggagatgacattagttccgaaacatctggtgacttccggaaagctctgttgactttggcagatgtaaggttttattttttattttttaactccccagtaagctgcatgctcaataacaatttttagggagtttaaaaataaccaaactgagacaatgagttcacaattttccttatgaaatggtttgttcattttacattttcattgccaccaagcaatataatgtttaaccaagatcataaaagcatacataatgatgtaacaacaaagaaaacttatttgagtcagtaagtggaggtgttttggtcaggtttcacaattttgacattagaagacattctgatacatcatctgacatacaatatttatttccattataagtgtctccattttaaagaacaggtttattttcttctggactctgaagaataaatatttcttttgttagcttctaaattaaataggaagcatgatacagaagaatgatctttagagatgggaattaaattgagtatcagtctcaggattaaaaaaaagaaaatgattgctgcaatttcagccttgccaccttggaaaagctgccaaactattaatcatcatgtgacctaatgaggccacaccttgctttctctttttagaaggcttatgacttttattataaagatggtaaggtcaaggatgaggtgtattcacagctgtgtgtaagagagaacgtgatttaaaccatagctcaccaattttctttcagctgatttacatagcacctaaatgtgagaaaatcccaacaacggtctcagcctcatggttgaaacagcacctgtcaaagtgaggcattatgccattaggaagcgatttatctaaattatggtttcagttactttaaatgtgaaaaacttatgaaggttgaacccacaacaccaaatttatgaagcattgctgcaaacatatgctctcagaggtatatattcctaagtgcacatctgtttgtgtatggacatgaatgcacccacccacaggaggcagtatagagtagggctctaggacagggttctagaatcaaacagggctggaatctcatgctgccaactagctttgtatatttggacaagttctttaagtcttaaagcattcattttcatatctgtaaaactaaaatactaacaataacaagtactcatagggtgttatgaagattaagagaaagagagagtatgtgaagtacttagtgatcaacacagggtggtagtggttagtattatattaagaccgatgataatcagcatttatgtcattggagcgagcgtaagtgaaagagaacaagaagaaagcaaacagcagcagggtatcagcagcacagaaaagaaaccaggcaaaaatcagacagtcatacaaggacctaatgtttaaaaataggaacaaattcattttaaactattgtagctaaatgtttcattcacctataatttgccaaataattcaggcaatcccgtgttttggttttgtctcctgtctttccataatgtgcttaagtatttgtacatgaacacacataccacacacacacacacacacacacacacacacacacacacacacaccacttaaaccatagagcctttaatatcacagttggggatctttgaggactttttattttttcttttttgagacagagtctcactctgtcatccagactggagtgctgtggtgcgatctcggctcactgcaacctctgcctcccaggttcaagcaattctcctgcctcagcctccctagcagctgggattacaggcacacgccaccacacccggctaatttttgtattttagtagagacagggtttcatcatgttggctaggatggtctcaaactcctgacctcaatcaatccacccgcctcagcctcccaaagtgctgggattacaggcgtgagccactgcgccccgcctttgagttttttttttttttaaataaactttactttttagagcagcttcagatttatggaaaaattgagcagaaagtacagagagctcccatatgaccctattctactctctcctttcctttccattattattattattattattattattttgagacaggatctggctctgttgcccaggcttgagaactatggtgtgatcttagctcactgtagtctcgacctcctgggcccaagcagacctcccacttcagcctcctgagtaactgggaccacaggtgtacaccaccacattcagctaattttttttttttttttttttttttttagagcgagagaaggtctcactcttgcattaattagtatgtgtatttattataattggtgaatgaatattgatacattattattaactgaagtttatagtttacattagggttcactctttctgtgatatagttctatggattttaataaatgtataatgtcatatgtctatcattacagtatgatagagtagtttcactgtcctaaaaatcctctgtgctctgccagttcataccttcctccccaccaactactgatcttcttactgtctctatagttttgccatctctagaatgtcctatagttggaatcatacagtacgtagccatttcaggcaggctggcttctttcacttagctatatgcctttaaggttcctctatgtcttttcatggcttgatagctcatttctttttagtactgagtagtattccattgtatagaatatttattttacctgctgaaaggcatcttctttgcttccaagtttggcaattataaataaaacttctgtaaacattcatgtgcagatttttgtatggacatgttttcaactcctttagttaaatagcgaggggtgcaattgcttgattatatagtaagagatatttagctttattaaaaaactgcagaactgtcttccaaagtgactgtaccattttgctttcatatcagcagtgaatgagagttcctgttgctccacattctcaccagtatttggtgttgtcagtgttttggatttaagcccttctaataggttgtgtagtggcatcttattgttttaatttgtaattatctaatgacatacaatgttgagaatcttttcatgtgccatctgtgcgtcttctttggtgagatgtctgttgagatctttcaaccatttttaaattgggttgttattttcatattgagttttaagagttctttatgtattttggatacaagttctttatcagatacatgttacaaatatgttctcccagtttgtaccttgtcttttcttccacataagacctctgtgttgggttgggcacagtggcccacacttgtattcccagagattcaggaggctgaggtgggaggacagcttgaggccaggagtttgagaccagcctgggcaacatagcgagatcccatctctaaaaaaaatttttaaattagctgtgtgtggtggtgtgcacctgtagtcatattagctattcaggaggctgaagcgggaagatggcttgagccttggagttcaaggttatagtgagctatgactgcaggactacactctggcctggccaacagagagtgagaacctgtctctaaatatatatatatatgaattttcggaggagggaactgaggcccccaaaattgtgtgatttgctaaaaatttcatgactagtcaatggcagaaccagaactggagccctgagtacatgatttttctgtgcaacctgtcctgccttaaagaaaaaccactaagatcccctgctggttgaagtactatgtgttagaatcttctatctttaaaggatggcccttgttttcgtcctcctgtttagggcagaagagatgaaagtctgaaagtggatgagcatctggccaaacaagatgcccaggtcagtaacaaagcgggaaaacatttcctttacctattctcctatgtggctgcctttgcatttatgtgaaaagggagaaaaatagcagcaacagggacttttctttttttttttttcctgtttgaaagagaagcctgaagcttggggatcggaaccctaactttttgcctgccccagtggtagttatcattctccttggctcctgacagcccaatttttgatttctagtcttctgaaagtgagagatttagataatagatgatggcactgacctctgaaatacaactccgattcttctcatgtcacctctcaaaaagaaaataattgtgtctctaatatcattctcttgtgaatagattctctataaagctggtgagaacagatggggcacggatgaagacaaattcactgagatcctgtgtttaaggagctttcctcaattaaaactaagtacaaactcacattacaatcctttgtgttgtatgttgtttttacaaatgtttttgcatttagtatacaaagatctagaaaaacgaagtttaaaattgcgaagtctgttccagttattcacacttcaggaaacaaaatgggaaagctgtattgtaactcaaggaagtactgacactacacttttgtttttccatagaggctgagtagattacctagtgagtaccaggtaatagatgggggagggaggtggcagggagaagaaaagaggccaccctctagggtgagagtagaagggcttgttcctgtggaatggagaagcccaactgcttccactccacctaacagttctccctagttagccacttccagaaaagccagacactgcaggtgagtctctgttgacacatcaatactgattaacctttagctatttctgatatgaaggtaagtggtagaatggatcaactcttatcgtcagaccagctattacatggaattgtgggcacccgccctcttgctcatggcatctcctagaactgttctggaagcaacaacacctagaaaactaaaccttcatttactgtgaacatcttctgactgtggcttccagatgctagtttacagaacaaccacacagcaagaccaagcttatgctgagttgacggaacaatgagtaaacataaggatattactgtgactttgaaattctgaaattgttctttcttaacttttgcattaaaatcacatttattttataaaataatgacaacagtatgtgatagttgctttattcatgtctttgtttgaaaaacaaaaaccagataaccctaggtctctctccaaaatttctttttttaaaaatgtattggggaaaaatatacttggcttacaaaatatgcctgtatacttggtgacatatgtacaggttttgcttggggcaaatactgatcaagaaattcaaatgccttctgggaggtgtgaagtaggccatgccaccttaggaaatgattcagcacaaggaagtcttcagaattaagatttctttaccagagaaaacatatttgactagtgattatagtatcatttcccaggtgctgctataaataaaatttaaaatagcccaacttactggataaattatttattatttaactatttaggctatttaaaatgcttactgcttgagagaaggggaaagagaaagagagatcattgaagaaaatcatctagggagtttgggttttgttgtagatgatttccttaaaaaggaacaaaagaaaaacaaaaacttctgtgcccagattttcatggtttaaagagggagttttttagcttgctacttgatcttctgcatatcaaataaaaaactagaatatattcaaatgtgctcaactgcgttgctttaaataattttgtggtgcttctttttagcatttgatgaatacagaaatatcagccaaaaggacattgtggacagcataaaaggagaattatctgggcattttgaagacttactgttggccataggtaagacttcgagtgctggtaaactaagttactttgcacttgctttaactcagtgccgaggcctgctccttttgggcaagaatcctgactgatccattttttttgctccctacagcccccaacatggtccaggatacacacagtacgctcaacaaatattgttaaatgaatgcttgaagaagttatttttttaagtcttttttctttttcttttttgaaacaggatctcactctgtcacccaggctggagtgcagtggtgtgatctcagctcactgcagcctcaacctcctgggctcaagcagtcctcccacctcagcctcccaagtagctgagacaacaagcatgtataccacctggcccagctaattttgtattttttgtagagatggggtttcaccatgttgcccaggctggtcgtgaactcctgagctcaagcaatccatccacctcagcctcccaaagtgttgggattacaggtgtgagctaccacatccagccatctttttaaatcttaccttgctttttaaatttgtatttgtcttgtgaccatgtttagcttgtagacttcttgagagctgaaatattttatttctactggcatttttattgagctttgttgaaaactgagacgtaggcaaagcacagtggcatgcacgtgtagtcttacctacttgggaggctgaggtggaaggattgctggagccaaggagttcaaggccagtttgggcaacatagcaagatcttgtctctttaattaaaaaaaccacacacacacacacacacacacacacatgcaactaagacctaagccagtttggtaatccaccatatttggttatttatgaaagatatcagtggcttttcttttctttctttcttttttttttttcttttgagatggagtctcactctgtcacccagactagagtgcagtggcacaatctcagctcattgttgactctgaattgctaaaagataagccgaggaggctaagaaagggaaaactttcttcttcaattaaaaaagtagaattgagatcagtcttcataattagttctcagactgttccagtggtaatgatacacctggttaatttttttttccattttacattgttaatctttttttctttttttttctttgtgacggagtctcgctcggttgcccaagctggagtgtggtggcgcaatctcaggtcactgcaacctccgccttccaggttcaagcaattcttgtgcctcagcctcctaagtagctgggattacaggcacacgccaccacgcctggctaacgtttgtatttttagtagagacagggtttcaccatgttggccggggtggtctcaaattcctgacctcaagtgatccgcccacctctgcctcccaaagtgctgggattacaggcttgagccaccacccctggcctatattgttaatctttatattaattctgcttgctgtttttcatttggtgttcttgctaagccgtaatgtttgaaaaactttgttgagatgtacaaactctcattcactgagctaaggagcattcttggaaatatatcattgaataatgtattacatttgggctataatgcacattattttatcatgtaaaaaaagaccttataattcaattgaagttcaaaatatgttacactttcattttgtttcagtctaccattggaataaaccagtttataaaattttttattgagatataacttacataccataaagttcacccactcaaagtgtgcaattcaatgctttttaatgtagtcacaaggttttgcaaccatcaccacaatctaagtttaggacgttttaatcagccgcataagaaaccctgtaactattgacagtcactttccaatcctccccaccccctggctcctataatcattaatctactttctgtctctatagatttgcctactctgcatatttcatacacaaggaatccaatacaatggtcaacacatagtttttgacatgaaaaacgatctgagctgtgtcatcttagaatcgtgtaataggagcatactacttgccaaataagaacaaatccagacttaagtaaggagaggctttattcagtagaactatttcaatagagagaacatgttgatttcagaaacctgaaagactgggctgggtgtggtggctcatgcacataatcccatcactttgagaggctgaggcaggaggatccctttaggccaggagttcaagaccagcctgggcaacatagtgagagcagcattctgagactgttccaatggcaatgatagaactggttaattttttttccattttatattgttaatctatatattaaagattctacaaaaaaataaaaaattagctgggtaggttggtggacgcctgtagtcccagctactcaaggggctaaggtgggaggagtgcttgaacccaggaggtcgaggctccagtgagctatgttggtgccactacaccagagcctgagtgacaaaagtgagatcccatctctaaaagatggggaaaaatgtgcaaaagtttcaaaatccaacagaaaagtcttagcagcaacttttaatgttgggcaagcacaagggcatgatcactggggattgacaggaaacacgtctggcagtggacagctggactctcaagataagctgcaacagaggcatgttctgcattttagggcttgcccaggactggggacaagccagagttcaggaacctgtgggaggagagaggcctgatggaagtgtggtcaagacaatgaagagggtagggaatgggcaattatgaattcttggtcatggtaattaactctaacggactcccaagcttccctgcctatggtgctgggtgataaagcctccttcccactgaaacatactgccaccttccaaaactttcagatatgaagaacaaatctagtaggtaagaatataaagcagaaggcaagctaaagggaagaaaggatcatgaaaagaagggattgtacaaatctagttggcagggaggtgactggaaagcttaataggatgaaagtgggcatcattattttttatcaagctattatggcttacttaatgtgagttttactagtttaaatggttagtttcttgtcagagaacttcatgtaacagtttgattctaaatgctgtgtttgggtttctaatacatttctccttctatttcccttaaatcactcaaaaagccaaaagtcttttagctttccttaagacagtctataagccacgatgagaaagtcacttattcttgttctgagctccaaaattcattataaaatccattcacttttggttggattcctacctagagatcagatttaagattataaaaataattgtgttgctgtaaataggtttcttccctacagacttttctattcctattttctttttatttaaaagataatttactcttgcgtttttgtcagtttcctttttcttgttttatttctgctttacttgttatttcaaaataaagaattgaaggattgtattttttttttaaggcaactgaatttagatgacagatacttgttctaatggagtcactctaaccagcctataaattctaatccagtcatttaaaagaaaattctttccatgggaaaaattgcttttaaatggaactccagtgcccctgcgtgcctaatgagttatttggagcaacatcgctgcagttgtcaggcccaggttgttcatcagtagcccgagatgctagtagctgagcagtgtcgcaccctagggagttatcagggaaagcgtaggtgttcggggtgtctgggatccagagatgagtcagtcgctgtgggagtttctttggcaggtaattttattttccccatggctggagataattactgtgctaaagttctgtgcaaatatggtattaaaaggctatgaaaatcagggtaagcagcctttctttcattccaagtaaaagccagttgtggggaggggatagagtggtatgacagtccaaagaatctttttaaaaaacatattacttactatagattaacccaatttctattccgtgaagctgaacattatttgctttttgttacagttaattgtgtgaggaacacgccggcctttttagccgaaagactgcatcgagccttgaaggttggtctggaaagttcatgtgcattcttagcgtcccttaattcccttgggaaagtatgcaaatagtagaacaaatatttaaaaattagttattttaatgtaatttaaacattttaagataaattatattacagcaaatcaaggtatgatacaatacactctttacacagacacctgattttctcttcaaaataaacagacctgggtttatgaaataatttttttctaagtaggtataatttgatttctatttaactaaaacattctcattttctctaatatgatgagtttaagtagatgctaatattccacttgtatgaaagatgaaaattcatgtataatattaaattttaaaagttcatcctctattttaaatagaaaatgagaaggcaggccaggcgcggtggctcacgcctgtaatcccagcattttaggaggcccaggcgggtggatcacaaggtcaggagttcaagaccagcctggccagacggtgaaaccctgtctctactaaaaatacaaaaattagccgggcgtggtagcagatgcactgtaatcccagctactcgcgaggctgaggcagagaattgcttgaacccaggaggcagaggttgcagtgagcctagattgcgccactgcactccagtctgggcgacagagtgagactctgtctcaaaaaaaaaaaaaaaaaaagaaaatgagaaggtaaaaatatggcttaatgttgatagaatgtcatatttcttttccacttagattagttttctacagtagctaatttgtctactgatttgcctcataggttaatagtattctaacccatatagagataggtacagagaagtattgaccacattattttcactgcttcacagtaagtgcaggcagtaaaacttgttttagaatgccaaacctcaagcttgagacccagtagatcctgtggcctctcaaactgccttgcttaaaataaaccaagctgagttggcagcctttaatgatgccgtaaccctgtgtttgcttgtctgtctttactgccagatggtgcgctccatgagtacagactcctgtttatcctcagaccctagggccttgtgcacagaagatgcttacctccatctctttaccagccattttctgtggtcccacacgtaccttcaaagtcatatcctaagtgaacacatcctttccttcatctcgcccagccccacatctgctccccttcccctgttcagtcatcccagagaatggccccaacaggaatttgcccaactctctgaagtcgtaccattcctccccagacttcttgactatgcctcagccaccccaggcttctttccattcctcaactgtggcaagtctattctcacatcacagtctttgcatccattccttctctggaatgctcatcctctagatctttacctagctgactccttctcatctttcaggtttcagctctcctcctgagagaggtctcccctaactgtaccaggccaattggttccctttcagtcactctccatgccatttccagctttcttttcttcatatttctgatcactatttacttaagcaatagttaatttgctttgctgtctgtctccatctactagaacataagctccatgcagacagagatataatctgttctgttcaccgccattggcacagcacatggaataatgcctggctatagtcgatgctcataagcatttgctggatgaattacatagatgaatggaatatcatttagtatgttggccatcattaggtcaaaatccacctaactgctcagctagaaattttacactatctctctttttcattatcctgtagcgatacatcattatgttttgtcaatccatttacataagcaactctcaaatcttcccattttctccatccctactgcctttattctaaggatggccatcatcatctcttaattactcagtctcctcaagatgagtctcaaagcctctagtcttaactcccttatcttccttctactcctaccttgcaatctgtttctcatgctgcagtcaaagtgattttctgaaaccacgaatttgatctgatctcaacattctcatgtttaaaatattacaagagctctccacacttaggataaagtcagaatttcatttcatggttaacaaggtctggcctttccagacacatttctttttatccctctttgttaacttacgtatccttgaacgtggcgttctttattgccctaaaccttcacgcctgctatttcctctataggaagtttctctcctccctacatgaacctactccttcctcttgttgactgtttagtccttgcttaaatgtcactttctcagacttttcctaatccctaatctttcttaggcccccctgaagtatgctcccatggtacccaatattttcaacatgtcagactgttttgcaatggcttactttcttgcctgtattctttacaaaactggaagcttaacatgggtatctcatctctgctttgcagcatttagcatgatgctgtcacagagtaggtgctcaacaaatatttcttgaataatgaatgatgagtttgataataaatgaaaaagaatcactatagttgaatattttgcacaccattatctgattcttataaatatagatctctatgttgctttgtgaccaatgacatttgtgttgtgaacacctgcattccttaacagggtattggaactgatgagtttactctgaaccgaataatggtgtccagatcagaaattgaccttttggacattcgaacagagttcaagaagcattatggctattccctatattcagcaattaaagtaagtctacttttaaaaatagcaaaacatattttgcccttctctacccatctccttactcttatatgccttaaaatataaagatatttgacttagatttctctctccttgtcaatgtataaatgtgttgtctgagcttaaaatagtagcagcaaaatatcccttattttcagctctaaaatcccaggcatataatagacactcaatatttttttaggtgtactagccactaatttttcttcttttgtgaattacatatgcaagttgtttacctgttttttatattgcactgtttttatttatttcagtctttatgacaatgtaagaaaagaaaaatacgtattttaaatttcctctctgttttacatgagacagcatggttctgcagcttagagtgcttttcatttcagtatataggaaactttctcattttatttaacagctgtatatcattccattgtttgtatatttgtacccaccacaacaaacagaggcttccagtttattgctattgcaaacaatgttgtataatgcatacacaacttcatcaggtacgagtgtatctttgggatgaattctcagaagtaggatttctgagacagatataaatgcattttaaattttgacaaatattactaattgaattccattttgcaattccatgaggaatgtatgagaacttctttctccatagctttggcacagagggtattttcaaacttttaggtttttaaaacattttttagagatggggtcttgctgtgttgcccaggctgaagtgctgtggctgttcacaggtgcgatcataatacattgtagcctagaactcctgggctcgagcagtcctcttgccttagcctccaagtagctgggactataggtaaacttttgggttttcataatctgataggtgaggaattgtatctcagtgtagttgtaatatacatttttcttagtataagtaaggctgaatatattttcatgtttgaaataacatttgtatttctctttctgtgatctgtctttttacattctttgtccacattcttttgggtttttgttctttttggtcagtttctaagacgtttttcacataaggtagattagccttttgtctggtcatattttcccagtccgttctttgtcctttgacttggccaaaagtatttttttccaagcagaggttgcacatcttatttaattaaatttatcaatctttcacagtattttagtttttaaaaaatctggtcccttctgtttctttcattctggatgagaatcttcctaaaatgggctccttcctttctcttttaaagcatgaaacccattttcattgttttcagatctcagttgatatattatacatagaaacttcaaataaattacaaattatttgaattaatagggcagtaagcctgacaaaaattgtacaagaggcttctgtaccttaagctcatggttcaaaagtcatagtcccaacaggaagatggcaactagttagtggagaactaaggggctagccccacacctgctcagtagccttccattgatttacttttctaccttgatgctccagaccacatatgaaagtctctagtaaatgagtgatagagagtgttagtccaagctggttccctggaacaaagtggaagctggggttggtgagtggagcaatccactgtccttgcctccaaggccacactgaccaggggaaaagacagagtcagggctgccttcgcagaggacttgcaggctatgcagacctctccgtctctttgctactccatctacccttgaatgtctcgaggaaatcagcactagagagtattggacccaggtgaactctccaaggtctaagctgagacttggggcctagaaggtgatccaggatgaagagggaagcagcagccaagcagagtgtttgctctgagtgctgagggtctaaaactgggaatggagtccatgctgattagaccccctaagctgtggatcattatgcaccatgcacatcctgatcctgggtagcagcaccctctctcaagcccctacaaggctggagcactacctctgtgggggagcttacactcagcgatgtcccctggggacacctggcttagaccacattccagtgtccctgccagcagctggagtctttggtccaaccttcgctatggccctacccacaatagccacccttgaacaggcacaaatattagcctgggtctttctgcagctatcttgggaaggtttctgcctctgactttacaaatggcctttgaatgaatgaatgaatgaatgaacatcaatcagtcaactagattcattcactaaaatctctctctctctctttttaatcagagtttttgtttttgcactaaacttttacagaaagagagctgagatgcatgcataagttgaaatcaggaacttactcaaaaaggcaattctcagactgtgcctgggacttagcacaaattgcatcaactgctcacactcaattctatttgaatcagtcctgacacatcacaatagtttcaatcatcagaggaagattcaataacattaaccatgttgtagctactaaggcagaaaaatagactcacacattttctaaagattgtcagtaacaaggttgagacataaagagggctttcagttcaccctcagcaaaccagaaaattaaattaaccagtggctctccgttccccagtggtctgggtaattgaggcttattgtattagaaaacatttaaactatttgtagtttgatagaaaagaaaaatccatcactgaaaacttcagtttgcagtttgaaatagtacaagatttctttatttctaccacctaacacatattattaagtaatctcattacatttttgctattgaagaacaggatctttttagatggttgtttctgaaattcatgggatagagttccattttgcatatcatctcagcctgtcatcctgcctgttttcttccttccacctattgtttagacatttctttgtccattgacacctttctcagggggtaaccggtgggaaggagaaggcaaggaagaacagaggtgaaaaaccaatgtgtacctcttactactttataagaagatattatggaaaatttagatgaaattatattttttggtagttttccttcatagacaaattctgtatttatttaataaatagcacaattccaagctttttatgggaaaatatagtagccactcacaatcaactcataatctatgtggagacttgaggtaggtatgaagaaacaattagaagataataattgaaacaacagacaattaaatactagattgttgaatatagagctagtactatcggaattgagaagaaaagaagtttggggttagagaaatgggtcttgagcctgcctttcaggtcaacaagcatgtgttgagtgtctcctgtgggccaggtgctctgctggagcatttacctttaagaccccagatcaatagggtcttaaaagtaaatgctctagagacagatatgggaagaagcaagagggaaagaagtaataaggcatttgtttgattagagggtctaccttggggaatattgagaaataaaatccaagtagcaagatgagttcagttgaaagagagctttgagatcagcgaattcactcattcaattaaaaatattatcaaatgcatattatgtgctaggctcagggttacaattataagcaaagggggtagggtgggggaagacattttctgcccttatggaattacaactatgttaaatgtaaaggaaagtgacattgtgctaaaagatcctacaatagtaggacttgacttagaggaaaggcttctatgagaaagtcatgattcagatctggaaaataagtagatattaataaggcaaaatgtatggaggtaagggagccagtagaacattctaataaaagaaatgacaaatggaaaggcctcatggtggaggaagcataatgaaaaatgaggatgtgggggccagatcatgcaggacctttttggcaatgtttaaggaattttggctttagcttaagagtaaggggaagccattgaagagttctgggcatgagctcttgaagagttagtatcaggatcatgaaaagatccctgtaagatcttcttattctggagaataagaagggctcaaaagatatttaggagttgaaacttaagggacttggtataatatcttggtgtgaggaaaggaagatagcaaggatgacactcaagttcctaacttggaaaacagacagtggcgccattccttgcaagaggatcaggttttaggttgtttgtttgtttgtttgtttccttttcttttgggggagtggggggaggtttatgagtttggttttacatgtattgagtttgagatgtctttgagccatgtaagacatgtggagaggtcaagtaagtcattagcggtgtaaatatactttgagttacttggatgtattttcttgactaactggtagaacgcctaattgtttacaactctgatcagagatgtctagaaggagctcttttaatacaaagctggagcattgttgacttgtcagctctgctattgcagagcaagacaggaaaaccaatagcataagaactaaaatctatataaaaacgaagaatattgtcatatattttgtgaaacagacaaatgaacaagaaataaagaaaacagaaaaatatatataaaggcctattgtgtcttactatgaaagtaatgcttaacttcttcactaaatgagccttctctgagacttcctttatattaccactttctctaatattcaccccagtaacagccattccaaatgtgaaacttaagtgataagaagagctcactggttgggttacctcaaataaaataaaaataatgtgagcatcttacacaatccaggttgaaagccaagttttacctcctgtgaagtcttttgcgttacaaacttggtatctttgccctttaagcctcaacctcacgtagtatcttttctggacaacagtctatttttggttggccttgggaaaaggaactgataaacatattctttaaaaatgtggttcatttcactttcctaagttaggcagtgtagcagggtattaaggagccaggatatagggattcaaatcctgcttttgtcacttattctcgataagatttgaggcaagtttcctaacctgtctttctcattttacttatctgttaaatgggggatacgtatagtacctattgcagagagcttttaaaagggttaaagtagttaatacacattaagccttttgaatagcaagtgttcgataaatattattaaaactaaaatttgaagtttttatagaaatcaatattatgtaagtgatgcaatcttattttattaaaccaaaattgaaatttaactgcagtatatcaggaagaatctaaatattacttacagtgaagaagatgctggtcagaacgtaattacactcaggtatgaatgaatgatggaattgcaggtatgttttactaaatggtatagctcatgagtctcacacccaggtgaattccctagtgctataggatttgattcatttatggtctcccattatttatactgtatttgttcttcattgattttattctttgcagtcggatacttctggagactatgaaatcacactcttaaaaatctgtggtggagatgactgaaccaagaagataatctccaaaggtccacgatgggctttcccaacagctccaccttacttcttctcatactatttaagagaacaagcaaatataaacagcaacttgtgttcctaacaggaattttcattgttctataacaacaacaacaaaagcgattattattttagagcatctcatttataatgtagcagctcataaatgaaattgaaaatggtattaaagatctgcaactactatccaacttatatttctgctttcaaagttaagaatctttatagttctaatccattaaatataaagcaagataataaaaattgttgcttttgttaaaagtaatttctttgtttgctttcagagcttgccaacattgtttgatgcctggtgccaacaactaatattttaaaacatgtttctgtatagaagctgttactgcttcagtttatcaccttgttaatcacacttttttgaaagaaaggaataagatgaagatgtatgtgaccctggcctaccctttgtagttgtgatcaagctataggagtggtaatgcatgataagttatttcagctttcagaaaacatctgctgaaggattaatctaaccacttcctgtctgaatggcaagcatgaattatggttgcttcatgctaaatactactttcccagaatgggcatttagaatcaagcctctaaggtttccttttctcttgagttggcaaaactatgcatttaaagaatccatcatgccatctttgagtgggacctaatatgaaataccttgactgatatgaaatagataaagtgaaaaaaattccagttagagttattttcctggaccagaatagaaatgatcgtactggccatgtgcagtggctcacgcctgtaatctcagcactttgggaggttagcaggcggactgcttgagcccaggagtttgagaccagcctgggcaacctagtgagaccctgtctctgccaaaaatacaaaaattagcctggcatggtggcacatgcctgtggtccaagctacttgggaggctgaggtgggaggattgcttgagtcaggaagctcatttggcaagttagttctgtaatcaatactataaatgtcagtcataactaagatgatggcaggagataatgaaaacaactacttaaatatttgggagataaaattgagtaaacatggtattcaaagttaccaagtgtcagtcaagtatgccttcacgattttagtgtaagtgatttagtgagtaagtatatcacgaagcaataaatcaatgttaatactcatagagtgcttactatgtattaggtactatgttaaacagtgtagtatattttaatttgttaatcctcaaggcatcttacaatgtagataccaacacagatatagaaatggaaatggaagcttagagaaattaagtaacttgtcactgtaagagccaggtagtccaactccagtgtccaggctcttaaccactgttttgccttagaatttatcccatcccagggccactgtagttttcaatgcctagtgcttagattagaacagtgctcagcacataaaaggcatttaatacagtgaatctttattttagatctcattcatcctcagagttgttataccacttatgtattaagtactttctgaaacaaagcatggttacatgtgtcaatatttcccctgttttgcaagtgaggaaaatgagactcaggttaggtatccagcccagggttacacagtggcaaagccaaggcttaagatccgggtcatctggactttaaaacttatctgtggctgggcaaagtggctcacacctctaatcccagcatgttgggaggctgagacagaaggatcacttgagcccaggggtttgagaccagtccaggaaacatcaggagactctgtctctacgaaaaatttaaaaattagctgggtgtggtagtgtgcacctatagtctcagctactcaagagactgaagtgggatgatcagttgagcccaggagtttgaggctgcagtaagctatgatcacaccaccgtactgcagcctgggtgacagagcaagaccccgtctcaaaaacaaaacaaaacaaaaaaaccttacctgtgcatgagtgagtttgaagaaggtgagaacttgaacacagtagtgatcacacaagagaattctgcagaaaaaaaaaaagccccaatgaggtaaccctctaacccttctactcacatctgttttgccttgtatgcattggacttcaggcaattacctttctaagccacatattcctcgtctttaaaatgggacaacaatagtacctacctcataagattgttttgaaaaataaatgaaaaaaaacacttaaaaggtattccacatagtgcatagcacatggtaagcccttaataaatgttagcctgtatcatataattattatagagtagtattcaatggccacattttttattgcctccaatttccacaaggtggcatgtcaagttcaaagtgaaccccacggccttgcatcccaatggcaaaacctacttaacttgcttcagaataacatggccaaatctaaactgttggaaacttcttctatagaaggtttgtcatggttcagaaatcttattgtcactgtaaactccttcttaaggaaacatgtggaacatttaatttaatcatctggcttctctggattcccaggaccatcttcatttacatgaatgtgcattagctctgacatggatcacctgcagaattgagtgcattcatgtcatctcattaagccctaagtttagtccctgaagattgaaagaagagaaaaatagccagctgcagagagtcctgggctctgtggttggtgagctgcagaagcagaaggtttgtacacttcacgctacagtaacagaatgtttggtctataaatcaggagctgcaaaaatggcaaatgaggatgttgaataggagattctctagcctatttgtaagaatgtattgaggaaatttttaaaatagtgtacagtagttcagacatttcttccatgtaccttcccctatttccatttccccaatttcatgccatatggataacccacagttttactttgtctttaaaacaataattttggggtcatatcaaactgggttcaaatcctggcttcaccacttatggcagcagcgtagataacagtgctcgacaaatacttaacctccatacaactcaattctttagctgacaataacagcacctaccttaaatatgtgcaaggatgaaatgaaataaagcatgtgaaaaatttaactcaataaaaattagttaccaataactgcattggcatggtgagttgccagtgaagagcagatagtaagtgttcaacaagcatttgtagaataaataagcgatacttgttttagtactactcagcgacagtaactctgaggccttggaagcttcagagaactgtcagctgaaatcagtgttattaatatgttgtcagtgtgtcctccaacgataagagccaactgtgttcacctcagtgatgaggttacaggatctgaagaaagtttcctagtcttatttcctgcccatcagttgacagtagtatgacatgtgagggagtgagtcgcttactctttctgtaccttagtttcctcacctgtaaagccaggatggccatgcaagtatcattcagagtaggcgtgaggtttcaataagccagattaggtgatgcacttaccacagtgcctgcacccgttaagtgctcaataaacattagccattattctctggctcagtttggaagacttacaattgcttatacagtgctctaatcacttgggggattttgagatgttgtaaagctacctcttctagtttgcaattaggaaagaagataaagcaaacttcttggcaatttcctgcctgtgaaaccttgtgttttatgagccacggaaagtaccccaaattttttttcaaccccacccccagcaaactgacaaactcagatctttcccacccactctgtatgtctcccgtgggactgtgagagtcaagcaagtacaggttgctgtgtgctgaagcctttttactggtgctatatttctttcagtttcatcaaactcagctttgtgccagttttacccaccagggccagccctcctctgaaaccaaagtttgcctatttctgtagagtttacaaagtcaacagtgagagagaggagaatttcaaatgaggaggagggttacagagtaggaggtaacattgaatggctgctgcagtaaactgttaaaagaaatcccaaacccagaataccagagcagcccattcagctgaaaggttttatgacacaaccatgcataagaaaaaactagctatcaaaatgtacatgtgacctctttgggcataaactttgtggaactggatgtggcaataaatagtggtccaggccaggcgtggtggctcacccctgtaatcccaacactctggaaaaccgaggaaggcagatcacctgaggtcaggagtttgagaccagcctggccaacatggtgaatccctgtctctactaaaagtacaaaaaaattagctgggcgtggtggcagatgcctgtaatcccagctactcaggaggctgaggcaggagaattcgcttgaacatgggagaaagaggttgcagtgagccgagatggtgccattgcattccagcctgggtgacaagagtgaaactctatctcaaaaaaaaaaatagtggtccaaggtgacctggcagagcatcagacttgctgtgaagcgacagatgtgatttgccaattgctacaatatcaaccaccagataaaaggaagttttgaaaaagaacattgggataaaatcagctcctacgaaaaagagcatgccacagtggggtagaaagtagagaagaacaaaggtcacaagggtagggagttggtgagaattagcccaaattcacccctccttttagagaactgcagcaatccacagcgtaactggcttgcattggtgcccctggccacagacctcagaagagtttagagatttccaaagttgcatttaaattttttgttttgttttgtgtcagagagccaagtccacaaagaaagttccagatcatgtctgcaaattctatttaaaccggtgttaaatagaatttgacatctgataacttcatgaaaaatatttttcttggtttttatcagtcaaaccaaactccttccaacctttattcttccaacatttattacatggtaactgtagtccagaaactacgccaggtgttggagttataaaagtgaagaaagctacacatttcctgacttcaaggagttgacgatctggggaataagcaaaggagaggaaagacagatacttggctaattggcaaggacagcatagtggtgatagcggtgggtgggtttggggattaagcaaatgtggcttccacacaaaattctcacactctttgcaacttgcagagttaaaggataagatatttgaagcaactgccaattactaggtgttcagttaaagactgttaaagttgtattgcacagtggttaaaagtctggagtcagcctagctggacaaattctagctctaacagctctaaagtctctagctgtgtgatcgtgggaaaattacttaagccctttatgtctcagattccttcatctgtgaaatttgagtgatagtagtaattagaccaaccacctaggattacaaagattaaatggatcgatgcatgtaagtacttagaatgacccagtacattgtaagcatatgtaaatgctagctacttaaaattaactatagtaaaatatgatatgtactgtaacaatgctagtaaaaatgctgcggactactaagtatcagaaatactgatagatatagaaatagatacagatacacacaaaagatgtttatgatattttgctaaatggaagaaaagttgcttgacgaaacagaaaaagaaaaccagtgtgagacaacatagcaaatgtaaggaggcatgtctgctcatttctgcatgccagcataatttcacgaagcctaactctgtgacgacgtgcagctctccggaaatatgctttgaaggcaaagcaggatagagcacatggccccatcatgtctcttgcctgagtcactaagttccttaaaagataaatgactctattccctgccttttcttacacgtaaggtaatatctgatggggttagtgatgatgcctctgtaatctataaccagctgtactcttacacccaaacttcgatgtgattctgctttaatgtaacttctgcacacatttgatgtgattttacaagtactaaaccttcacaactcatatataaactgtgagctaaaacaccatttcagagcagtctgacagaacctctttgaaggactgttcccaggctctaggcctcagtctatagtcctcagtaagacttctaaatacaaccacctttcattctttacaagcttgatttttttttctttagttgacaccagaagggctgggaaaatgtacatgaccatggtaactgtttatctctgggtagtagcattacagctgatgcatttttctttttttgtcaaagttgtgttttctaagtaaatttaaatttattgacttaataatttaagaatatctttacatgacatataagaaaatttggttattaaaaggcacctagaactcaaatgaaggattaattaagtatgcagggcaggattcaccaggaatgtcacctctgagctaggtattaaaggaattgattggtagggctttgaagatataaagattagtagagataagaacaagatccccgtatttgataatattggaaaataatgtatcaaatagtacatgagttaagtgagctgttaatccttttctgtttctttctttttttaaaaaatagcaacaaggtctcactgtgttgcccaggctggtctcgaactcctcggcctccccaagtgctaagattacaagtgtgagccaccacacccagccgagtgggctactaatcctcagtgaagaggccatcactgggcactgaatatcagagtccatccttattttttgtgtgtgttcctcttgtttctgaagtatctaatggaaagtctggcttctctgtttctctctttctctgatttcagaaatcttattacggtatcctatctattgaagataactagagatcagtttaagtcttctccatgctggagcttacagaatagatgctaattctattgcctgctttcccagatactgacaggtaataagagggccaagtagaccaccctgccatggattggagccatgtaagacccatcctgtgtacactcagagctgactctttcctaggaagtgagtggtatggatagacatgcgtcttttccaattcttcctgtgcctcacctcagtcttcaggactccaaggaggtaggaccaaaaagcacagggcccctgagtgttatttcagatcctctgtgtaaccagcccacacctgagccttctgtcaatggaaaactccattaggcagcaatgactggagaatgtctccaatttattcaaacatgtttctagagagaagacggtggtggggagaaaagcacttccttcctctctctacctcctgtctcttcctaacctcctctgctttaatttctggctaacctcagcactgttgacatgaaaaagaagcctttgcactgttaagtctactttgaattatttcaatatggggaccttccctggccaccaggcaacaaactgtccattcttgattttctcctctctctctcttctgggtattgaatatgtagtttggctggaccaggtgctgccaaaaacttcttgggaggcccacggcttcccagaatctagaatccacccagagaaagtccctgtgaggaaacttcacagatctttctctggttacgtctctgggaacactgcacttgcccggcttttcctgcactgcttttcttggcttcctcagtgtgatggtcctgtcttctttcttcaggaaaaacaggccccctggccttccctttcctagatgtgaaggaaagatgccagagccatacaatgttggtttcagtaccaccaacttgccgtgtaactttcggcaaattacttagcctcgctgatccatcatttccttttgtttctaagataggagtaataatttatcaattcatagtgccaggaagacccaggtgccaggaaggatggaatgcttagatctgtcatggaagatacaaggaattagatgaggaaacacaagtaaaggaattagcacaatatctgaaatatgtagtcattggctattatttacatctttccccaatttcccagtctcttttgctgttatcaagtatatgcataaggtcttttttattttgaaagacttagtcattatgggaaaattgacaaaggactgcaaattctgtataatcatgtggaactttcacaacttaaccaactgcaccacattcttgacctctctgtgcaggcagagagaattcagctccctttggactgtggctttataacctcacatgctcttctcagccaaccgacctgaagagccagtaggcattgacttgcattctttcagaggtcctcttgtttcaataataataagcaccatttcttaacactcactatgagcaattcatatattttgtctcattttgactttataacaacaccatgaggcaggtaaccttatctcaatttactagtctggaaagaggctcagaaacgttaagaccactctagatatagttctggagccacaaaacaaactgagatttctatacagtagatccaaaatctatacgcttgactctctcacgctgggaccatgatacagcagtagcaacagttacaaagctctttactttagaggcccgtttcttgggctctggggttgggaggtaggtctgaacacttgggtgtctcataaattctctgacttcacacactgagcaacttcaccacacatcactggcatctaacggtcagtaatactgaagtctaaataagtctctcagaagcttacatatcaataatataaagtcatctagtacaggacagaagccaccttgatagagccaagtcagtatctttcaatctgacaagactggtcaggaggctctcagaccagaaggtaatatcttcacttgctgagcactgtactatccgaagttcaaaactatagactgtgccacagcggggcacatgtgcaagggcagagttggagccctgaataaacagttcaccattacttacagaatttccctggttccatgtttccccctttcttttttggggggaaggatgtgaatttttcttctttttctccagcagtagcagtactgaaaccattcagcaacgaggatttggcagcttctaagggtcatgtcgttggtgggtgcagtttgagttgaagtgattgcagacgtgcagacaaacacacagaaatagaggttcagtagggcctgggcctaagccctggggaaagctacagttacttcagtggaaggggagtaggagccaacagagcaaatggaaggaagagcaggaagatgatgccgcactccggaggagaagcagcagagttgctctctgtacctgcaagccaatggagaagtttatcataagacagtaatgaactaataacacaccgctgaccggtgacacacagcaatagtggcaactgttgaagaactactgtgtgctcagcgtcacgctacatgctttagagaagcccttagggcacagtggagttagaagtacgttatttattaggaatgactgtacataggataaaaaaaaaagaaataggtcatttatcctaactcttagagcaactagctttgagaaagtgagcagcttattcaatctctctgagtattaatttcatctgagaaattggagtaataatatccatattactcatttagcctatcaatgtgaactgaaagcctactgtgtactaaacactactctaaaagctgcatatacatgtaaaaatttactacctgttcggctgggcgcggtggctcaagcctgtaatctcagcactttgggaggccgaggcggatgaatcacttgaagtcaagagttcgtgaccagcctgaccaacatggtgaaacccagtctctactaaaaatacaaaaattagccgggcatggtggcgcacactagtaatcccagctactcaagaggctgaggcaggagaattgcttgaacctgggaggcagaggttgcagtgagcctagataatgccactgcactctagcctgggtgacagagcg

SEQ ID NO: 47 - DNA, 1332 bp, Homo sapiens
taatagattagtgtgatctcagctcaaggcaaaggtgggatatcatggcatctatctgggttggacaccgaggaacagtaagagattatccagactttagcccatcagtggatgctgaagctattcagaaagcaatcagaggaattggaactgatgagaaaatgctcatcagcattctgactgagaggtcaaatgcacagcggcagctgattgttaaggaatatcaagcagcatatggaaaggagctgaaagatgacttgaagggtgatctctctggccactttgagcatctcatggtggccctagtgactccaccagcagtctttgatgcaaagcagctaaagaaatccatgaagggcgcgggaacaaacgaagatgccttgattgaaatcttaactaccaggacaagcaggcaaatgaaggatatctctcaagcctattatacagtatacaagaagagtcttggagatgacattagttccgaaacatctggtgacttccggaaagctctgttgactttggcagatggcagaagagatgaaagtctgaaagtggatgagcatctggccaaacaagatgcccagattctctataaagctggtgagaacagatggggcacggatgaagacaaattcactgagatcctgtgtttaaggagctttcctcaattaaaactaacatttgatgaatacagaaatatcagccaaaaggacattgtggacagcataaaaggagaattatctgggcattttgaagacttactgttggccatagttaattgtgtgaggaacacgccggcctttttagccgaaagactgcatcgagccttgaagggtattggaactgatgagtttactctgaaccgaataatggtgtccagatcagaaattgaccttttggacattcgaacagagttcaagaagcattatggctattccctatattcagcaattaaatcggatacttctggagactatgaaatcacactcttaaaaatctgtggtggagatgactgaaccaagaagataatctccaaaggtccacgatgggctttcccaacagctccaccttacttcttctcatactatttaagagaacaagcaaatataaacagcaacttgtgttcctaacaggaattttcattgttctataacaacaacaacaaaagcgattattattttagagcatctcatttataatgtagcagctcataaatgaaattgaaaatggtattaaagatctgcaactactatccaacttatatttctgctttcaaagttaagaatctttatagttctaatccattaaatataaagcaagataataaaaatt

SEQ ID NO: 48 - protein, 319 aa, Homo sapiens
MASIWVGHRGTVRDYPDFSPSVDAEAIQKAIRGIGTDEKMLISILTERSNAQRQLIVKEYQAAYGKELKDDLKGDLSGHFEHLMVVTPPAVFDAKQLKKSMKGAGTNEDALIEILTTRTSRQMKDISQAYYTVYKKSLGDDISSETSGDFRKALLTLADGRRDESLKVDEHLAKQDAQILYKAGENRWGTDEDKFTEILCLRSFPQLKLTFDEYRNISQKDIVDSIKGELSGHFEDLLLAIVNCVRNTPAFLAERLHRALKGIGTDEFTLNRIMVSRSEIDLLDIRTEFKKHYGYSKAIKSDTSGDYEITLLKICGGDD

SEQ ID NO: 49 - DNA, 1482 bp, Homo sapiens
gaggggcaggaggaaggggtgcggtcgcgatccggacccggagccagcgcggagcacctgcgcccgcggctgacaccttcgctcgcagtttgttcgcagtttactcgcacaccagtttcccccaccgcgctttggattagtgtgatctcagctcaaggcaaaggtgggatatcatggcatctatctgggttggacaccgaggaacagtaagagattatccagactttagcccatcagtggatgctgaagctattcagaaagcaatcagaggaattggaactgatgagaaaatgctcatcagcattctgactgagaggtcaaatgcacagcggcagctgattgttaaggaatatcaagcagcatatggaaaggagctgaaagatgacttgaagggtgatctctctggccactttgagcatctcatggtggccctagtgactccaccagcagtctttgatgcaaagcagctaaagaaatccatgaagggcgcgggaacaaacgaagatgccttgattgaaatcttaactaccaggacaagcaggcaaatgaaggatatctctcaagcctattatacagtatacaagaagagtcttggagatgacattagttccgaaacatctggtgacttccggaaagctctgttgactttggcagatggcagaagagatgaaagtctgaaagtggatgagcatctggccaaacaagatgcccagattctctataaagctggtgagaacagatggggcacggatgaagacaaattcactgagatcctgtgtttaaggagctttcctcaattaaaactaacatttgatgaatacagaaatatcagccaaaaggacattgtggacagcataaaaggagaattatctgggcattttgaagacttactgttggccatagttaattgtgtgaggaacacgccggcctttttagccgaaagactgcatcgagccttgaagggtattggaactgatgagtttactctgaaccgaataatggtgtccagatcagaaattgaccttttggacattcgaacagagttcaagaagcattatggctattccctatattcagcaattaaatcggatacttctggagactatgaaatcacactcttaaaaatctgtggtggagatgactgaaccaagaagataatctccaaaggtccacgatgggctttcccaacagctccaccttacttcttctcatactatttaagagaacaagcaaatataaacagcaacttgtgttcctaacaggaattttcattgttctataacaacaacaacaaaagcgattattattttagagcatctcatttataatgtagcagctcataaatgaaattgaaaatggtattaaagatctgcaactactatccaacttatatttctgctttcaaagttaagaatctttatagttctaatccattaaatataaagcaagataataaaaattgttgcttttgttaaaagtaat

SEQ ID NO: 50 - protein, 319 aa, Homo sapiens; identical to SEQ ID NO: 48

SEQ ID NO: 51 - DNA, 27705 bp, Mus musculus
  misc_feature (1)...(27705): n = A,T,C or G
gccaaaaaacacatgtaagaaagatggccagggctggagaggaggtcagaggttacaaagcacttgctgttcttacagagggcccaagttcagtccccagcacccacatgatggtacacggccatctacaggcacgtatatggtgcatatgcacacacatgcaggcaaacactctataaaataaaatagttctataaaaaagaaaggaaggaatggagagagagagagagggagggagggaggaaggggagtagggagaaggggagggaaagagggcctctttaacacattgtactgagatttcagtatccaaacacacataactgacatcagacctgttttttactctggacaaaggtcagttttgaatgggttaaagaccttaacaaacttggaaacaataaaatatagggaaagggtttaagatgcagatattgacaacttggtgaataagactctagtatctcaggaagtaattgcaagagctgatgggcagggccatatcaaattaaaagcctctgaacagaacgaaacgcttgccagagtaaggagagtgcctatgttctaggagaaatcctgccagccttttatctgaccaaaattaacatccatcatctctaaagaaccaaccaatgaaatagaacaagaagactcagtcaagtcagcaaatgacaagtgaataaacctctcacaaaaggagctgtgtaaactcaattattatgtgggaaagttcggcccctttaatgacaagagaaatacaaatcaaaactacattgaaaatctctttcactctgattacaatggctgccatcaagataacaaaaacaagaaaaatactggcaagcatttcctttaggaaccaggaacacttaggactattggtcggagtgtggattagcttacctgctgtggaattcagtatggaggtgcctccacaaactaaaacagaactaccttaggatccagccataccattcctgcaaatacgtcagaagcaataaaagctatcgcacaacagagacgcccacacacacatgcttattgatccaacgtccacagtagccaattgtggaattggtgtgggtgttcatcgatgagttaaaaaaaatgtgttagaattttaccatggaatactactcagtcgtaaagaggactaaaactgtgtcacatgcagaaaggtggatggaacgggagataattacattaggcaaatggaactacagttagaaaacaagcatttctgttttctttcacatgtggaatcacgacataaaggcaaaagggagattatgtgggaagaggaagggaccaatgggggctaagagagaacagcaggtataggaatatgatccaagtatattatgtacaggtatatgtgtgtgtgtgtgtgtgtgtgtgtgtgtgtgtgtgtgtgtaaatgtcacgaggctcataaaaatagaaaaaggaatatttaaattctactttcaaacaaactcaagtacaatttttaaaagtcacagtataatttggagtggataaaagaggcagacagacagacagacagagattataacctcctggtaacaataaaatcacagcatatcatcaagatggacaatgatttaatatagccagagcgtgggagataagcacccgggtgtttttataaagaccacacttcaaaatgtccctggtttactaacatggtggaaatggatgtagatgggtgtatgttttaaattttcttttctctttgaaaatgttttactggtgttcaggatgtgcttgcctagtgctcaaagagttctgggttcaatgtccagtaccacacaaagccaagcatggtggtgcatgcctgcaatcccacccgaaggtagacgcaggaggatcagaagtttatggtcatactcaggcacacagcgtatctaatggcagcctgggcttcagaagaccttgttggaaaaatgtgaagaaaataaaagtttgtttgtttgtttatttttcaaagaaagtaacaaagagaatgtttatcagccctgctgcttcagggactttagtgctattattttctgacctcctgttgagagtagaccaaagaaacctgcactgctggggtggcgggtctttgggagaggggagaaaagactatctcctcctagtttcagctcccttcacatctctctctgccagcttaaagctcaaagcttttccactccagtgcaaagagatgagattttgaatcaacagaatttgttggacttaaatgtcattttaattttttaactgatctagaaaagcacaaaggtgcacgtgtttctggggcagcatgtgtgtgtcaatatgcaaacctgggctaattagaccacttcacttcactgaaacagaaaccactagattccctgtgaatccctctcttcaggaggccatgggggcagggagcacccctacatctgtgggggcactggaccccctaagttcctctactccaggattcccttctgaaggccagctcggggcatggaaagattaccagggctggtccccagcttcacctcagagttcccagaacccctaggttctacctccctctagatactgggtcagacattccttccagagctgggttttgtgagtaatttttaaaagttatgatacatagactctttcatttagaataaagtgtttcacctaacatcctgtaggaagtgatgaaactaaaaagaaaaataaacgcattttctctttctctcgttactttttccattcactaaataaaattgacttttttttttccatgagagttcacactgggtctgtctcagtaagagtcacactgttcagcccacacacgctgtgatatgttatttactcattctcttctcaggaaccactctcacatgtgaaccctgaataccagctccctccctcttcagatctgtgaaatctgtcctgtaaaaacgaacatcttagtgatactatattttataaagtagtgcaattttaacatgccagccagaaaaggatcattaaaggaagataacattttctttgtgtttagaagattcttagcattaatatatgagagggtctcgctcagcctggtgtctggtcaaacgataccagcccttgagattgactgctcaaggatcatcagcagttctgaagacagtttggtctacagagcagcttccagcactactagggctacttagtaaaaacttgtcttaaaaaaaggagctggcagagctctgttatacaaacgaattttaagatttataaatgggaaaagctaagatttatcagcaaataaaagctaatgctaggggctgaagagatggctcagtggttaagagcactagctactcttccagaggtcctggtttcaattcctagcaaccatatggtggctccaaacatctgtaatgggatctgatgctctcttttggtgttcatgaagacagagctctcatgtgtatataaaatgaataaataaatctttttttaaagttgattctgtgtaacagaggacaaaagggaacaagggagagaagttctaagatggctcagtgggtgaaaatatttgatactctgaaggtattccatacacacaggagaggcaggagtctctcatgtacgcacacagggtggagtctcccatacacacatacaagtctcttatgaacacaaatggggagagtcatgtacacacacaggggttgggtctctcatgaacacacatgggggtggggcctctcatgtacacacactgggtctcttgtgtgtatacacatggggggctcttttgaatacacacaggagtctctcctgaacccacacacagatggagtcacaggggtggggactctcacgaacacacattgggggagaaccatggagtacagtaaaacgttttaagagaggcaggttttactcatagtggacatagtatgtcaatttgtttgttgctgaatttctccttaacttactctcaggcttttgtgttgcctattgacatgagtgatggccatcaaatcatactttgactgatgtcattatttgaatattgttttgatcagttgctactcataaaaggaagatttttattttaattgtatatttgggggtgagcatttggaagtcagttatctccttccccacctaagttcctggagattgaactctggctgtggggtttgctggccagcacatttacccattgcccagagataattacttatctcattggcaagttcagatgtcacacaattatcactttgtatttgtttgaatttaaatattttagaaaaaaaaaagcactccttcttctttcctctgcactcactaagatgattcctccaaagataaaaatcaaatagacttatattttttaataccagaaaaatactgtgacatgacagggtgtgtccactgttctaaagaacacttctactaaaataaagaccagttctacaatggccccttccagtctttttagctatttattgatatgaattccctgccttatgtatcatccaggattctacctaaaatagttccaataagtatcaaggaccactcaaatattcactattggacttagaagctccactcttaaaaatagattctatagaaagagcctgaaatgggggcatgaaatgggtccatctccagcgtcacgcacacatgaacaaagaaaaggaggaaatggtgttaagaaaacttacatcatactatttaaaaataaggaggaaggagggaggaagagaaagagagaaagctcaatgcttaggcaagagtgcttaagaaaattacagttaacagatcatttacagcatttaaaatggcaaaagattattataattctaaaaatgtattttgctgacataaaacattatacatacaataataatactatgtagtgttttaatgtcgtgattttcccccctgaagtaaagtttactatagaaagtatgtgttctataaaataaatatgctatcaaaaacaataaacaattatagctatgattttttaaaaaagttatagctatgagattgctttcttttttcaataagactaaaacacctggaaagttttgggtgggtattttttccttatcagaggggaagtaatacactttataatactctaaaaaatctccataagcctcaggtctcttacctacttcagtctcatatcccagatgaatctgtgaagaggaacactgaaggacttccccaccgccattctgcagtgcaggctgattgatggttggactcctggtgagaaacagctggcaaaattgatctagcttgcccatggtcatgggttgggttttggcagaacacagactgataatcatatctaccttcaaagtcatgaagcccatttccctcctggtaacatctctgagcaactcaaaagaggcaaacactaccagaatgcatgctgggagtgcgagtagcgccctctctgggctttcccaagccccagtcttcccaaaccctgcaagagaacattatagatagccttcccatggaaaaaaataagtagccaggattaatatcatctcatcatctttattcacatttcaagtcttttgttgtttatgtgtggccttcctgcctcggcctctcaagtgctcaggagatttccgtcaagtgagtacccatcgtctttatcaatagctatgcgagatggtcctgcagataaataggtgactagcaaataatgtttggaaggtgagagtatttggcattaggcatctacaggtgcattattaatattactttaaaaaaaacccagtatactgcttgaaaacagtgaatgcaatgggttctcattcaccttcctgctctcaatcaatctccatctctaaagcaagaagcggggcccttctggctgagcgaggggtaaagggaggggtaaagggaggggtaaagggaggggaagagatctcctggcaccttggttctctctttacctccagtttagcaataaaataagcaagaggcatgtgagactgctgagcctgagagacaggtcttcctaacatctctgagcctggctccctgctcctccttgtaaacctcttaacctttctgggtccccttctcccttccctgccttcctcctatgctccccaagtatgggaatcactccccaacacctcgatatatctcagagatgtcccatcctcacttactaactgctttgatgtgtatttacttagtttaatcacgggattcaacaaccatctgcctctgacctgctccagttcttactggtcaagtcagaaatcccaagaggccacaacagcaagtagaaagtgagatgattagggttagtcagagaagggcttagtgttcagtgctggtgccttcacagagcctccagcagcacttaaactgctcactagtcacagagcctaggtgggaaaatttgactgagcttctattgaaaacaaaaacaaaaacaaacaaaaaaaactgttttactctatgttttgcttaataagaaatttaattgtattattctttttaattttcttttgaattttttattttccctgttaaaaagaatagaagataacaaggtaaagatttgcgttgggactattttgagatagtcacaacaggacacgacaaagcacacaataagtgaattgttcatagaatatgccgttagctaatacagtgtgtgcagcccctctaaaattgcatgcctctgcattcatctataaagaaagggtgtgttgagaatcctgcatctgaggactggttaacagacaggatgtgtgtcatagcacatagcagtgatatataggccctatggataaaatgccaaatttattaaaaatcttaaagaaatgctatgctagtcaaatattttgcataaattcagattttttttacagttaaaaatatcactgactttttttccccacagaaagggctttttcttataacgattttgactaatctaaactataatagttgcagggctagttcattgtcaggtgcgtggcgaaagagtgcaaatcccgggggttctttcttcagaatcaacgaggcaatacacttgaacatgtatgtttttgtaatctgcggggcatcacccgtcctccaggatctcatttcataattttggttcacgaaataacgctcaaaatccagcccaactcatttggaagaggactgtgctgacaatggcttcacccctgcgaggagagggtgcacacccacagacacacagcacaatagtggttggattttttatttgcagaagagtgaggtttgagctcctctccccgccctgccatcaatagtgttaatcccacgcctccattgagggcaagaccacggtgggcattattctgaagccttcattttgcaatgactccaaaagtccacatggcctagtaccctgctgcagccccaggcgccacgcctcccaccccaccccaacctggaccaagcaagactcagctgagccgcagctccgaagtcgcctttaatttcccagctccgaccaccggaagcgagcgcgaggcgggggccgggtggggaggacgcgcccaccgatgccgccggcgcccgcgggacgcgccaccagcccggcccttgttcgctgggctcgacgctcgcccacctcttccaaatttaaccgttacctaaatccgaagggaaatgagcaaacctctgggattgggtgtcaaggtattttcagcttcgttgggcgtatttatcctcaagtgtttccacaacaagttatttcggggcccgaggcgcaggtttctttctgcggacgcggtggccagtggccggactccaggccggtggcaccggggtccggtgattcacggccgcgatcggggcgatgctgcccaaacagtcgacaggattggggtgcccacgggagccgtgcgagctgcctgctaccagcgcccgcagctcctgtcaatctgtgtcctgaatctgtgacttctcgctgcggaagtctccaggagccaagaatacttcgattttctttctagtcatttctagtgctgatttctcagacatcccggggactctatagatagccccgcgatcccacagacaaacaaattgggggctgctcaggggtgcccaaggagttggcaaggatacccccttcctgtcacctcctgaccccttgcgcaaaggaggctcgtggcccgctgtcccactgggggatggggctggggttgagaaggctagtgagcgcctctaacgctcaggaagtgaagtttgtggttttgggggctgagctccgaaggagattaaaaaaaaaaaaaaaaaaaaagtcagagagacagatcagtctctcccgaaagcaagattcagtttgcacactctcagagctcggtgcccgcgccctgaccccgaaggtaggtttgctgaactgctgtgcctcccgctcaggcgggggtggcctcgaggactggtaggagtacattgacactgtggggacgtcccgagggcgcaggcgggtccccacctgctgcagagcatcggctgctgggttctggagccacccaagcggtggagcgaaagatctggaatagaggggcacacagtttagcggttagatagcagagtgggatccacgcaggaagaaaacatctggtgggcatgtggcggcagcgggcttctggaggcctccttctgagcgccttgccttcagctcccgaatttccagcctcagatgaccaggggaagcctggcgggccgctgtgccaggagcgtgccgccccgccccctggacgccagctgcagcacgaggttgccttcccacgcgctgggcctccttgccatccccttacccctcctacccggaacccagcaaagccctccgaagcgtaggtttgtggcctgggcgaggacgccacctctgtgtctaccctgtcccgcgtggtgctgacgcgcagacccagcgcgggaccagacagccctgcttcccacgggtcccgttcttggctatcgcaggaccgaacctcatcgaggcctccagaactcttgccctgttttcttgctcttcatgcttgctttaagaattgtcctctggttggagcgtctggctgtacagacagggagtgcgggaaaattaaagcgccggagcctgggttctgggagccaaacccgaccaaggcgtgtgactatacattatgactgggaatctgaagcaggagtccttgggctccttttaagtgggtacaacagggtgtgttctgtacgcgctcctgggggggggtggcgaagaggctcgggttcctcagtctgaactgcacgaagcccaaagacccggggcgtgcgccggcctgtgccccagtctttgagcccgccgccgccgttcagcctctattgccttggaccttggaggcaggcggattcgtttcaccctaggcctccctagggtcgcccccggagcgggccaggagctgggacgcagtctcagccccgcctcctgcagggctcaggtttcgacccgagattaggtgaactgattgggggttaaagagagcgacgccagctctcggtcatgctcagggaccctggcctcctggccaggccttctggccactgctcactcgtgcgcgctccggtttcatcttgctggcccgcgaagtcgttggcactcattaaatttgggcaccgcgtgtttgccagtaagcacgcagtttaaactcaacttccctaggacaagatttttggtgagcagatcagaaaataattctttctgggacttagtttctgaagcaaggcctacaggtctggaatgtttctcagtggtcgccgtcctggccggtgccacaccactattccagtgggcgtttctcctgggacaagtgttggtcctttgccactcccacctcactttcctgtgcctctggcttcctgacttctgctccagccactgcagcacatagtccctaggcaaaccagtccctagtacgcccctctttcgcttctgttcgtcgcggggctcctggaggttttggctccaagccccttccgggtcccaaacactgatgccccctgactggctaaactaagccacgcatccctggcgtgagccacaacccagaagggagcaggtgggcttgcagggttgacttgggataacggaccagttgtggactactgctctcaggagagtgatgatctagctttggtagggaaggggaggggctgaggcgtgggcagggcagagcaaagggaccagagccagagcctggggacaggttttaccactgagctgttgcagtggcggcggaggccgggattcgtgccacctgtccgagtgccacctggtgagcgtggcgcctgggtccaggcccctcctcccgcggcttccctctctcctccctggcccacactcttccttggcctgggaacctaccacaaccgccatcggtgctgaccctcgtttccacccaattttcccccttctctcagaactcagagtatccgagggtccaaacattcgtccagcggctgaccaccatgccgcgctcattcctggtcaagagcaagaaggcgcacagctatcaccagccgcgttctccggggccggactactccctgcgcctggagaccgtgcctgcgccgggcagagcaggtgcgaagcgcgcagaggccgggtagggcagctgccgaggacaccgactctgctccaagccacctcgtttcctaggaatcgggggaggctatcctaacgcccctcgggtgcttttttgtttttgtttttgtttcccggtgctcagatttgctgagcttgccagagatgcccctggcgctcgcagtcggctcttgaattcgggagggagggctcccggttgggtcagagtggacagaggaggacacgggcgccacggtggaaccacttcagttcggccaggtttaggtttatttctctcctgaatcttttccgcagagggcggcgctgtgagtgcaggcgagtcgaaaatggagccccgagagcgtttgtcccccgactctcagcttaccgaggctcccgacagggcctccgcgtcccccaacagctgcgaaggcagcgtttgtgacccctgctccgagttcgaggacttttggaggcccccttctccctccgtgtctccaggtaagccttgattcgaggtcttgtggcagagttctggagtcgcagcacggagggaagcccgcacaagggatgcagagggtcggcctagggatctggctcctaagggaacagggttcaggggaggcatccagcttttgtgctggacaccttgcccaaagtgtcctctgcctccttctaagtcccttagctccaggctggcccttaattcgtttgcctggaactaacaggcgaggtcaaacgaactggtccttctctggctggcatttcttttatgtccagaattcattgtttagaaattgtcagatcccagaatccaggacccagacctgaatacttcaaacaagagacctgggcagtctgagcgggacagaactgggcaccacactggagtgcaaggctgctgctgaaaatctcagctcgctagctctgtcttcaaaagtttcattttctccccttctgctaagagggcccaggcaggggcaccagcatgctccggctcatttccagggagcaattgactagagttgatgggggtggggtgggggtgggnnnnnnnnnnnnnnnnnnnnnnnnnnnnggtggggtgggggtggaggtggggggggatatactcgggtcacagcagaagtagaaaggagaccaatccaaattctactaagagcaggctatttccctttcacactattagctcattcacccccacaagcagagggttggttcttcctagctgtgtgaccaagctgctatgggacaggtccgcccagaatggagtgtgcatttacttgcattcattcaatatccaattttagcaaaattcacgtgtgtgaagggagaggagttcttctgaaggtagtgtaatttttaactgtaatttttcatcagaaatttatcagggatgggcatacttcgcgcccttgtctgctgccccttgcgtcatagctttgagaaatcttggggacattccagtttgtttagtctgatactcctagataacctggactcaacgtggatcggccttctccgttcttcctaatctattgcaaagagaaaggaattgagtagaggagtacttgaaaggagtcaggaccctagacctaagttctcctgtctgtctcaatctttctagcaggttctggggactgggggtgggtggggtccagccagagaaccatcaaaacgaatttacccacctcttcaacctgtatcattttaagtatcactttactgctctgtcactggtcctggaagccccgcgggcctacctgagtttcaccccgggtgtcgggggtacttggctttctaatcagctagggcgcctgacaatagtgatggtgcactgcgggctccgcccagcagcctcgaacttgactcaatggcctcctgtgccttcacagcgtcggagaagtcactgtgccgctctctggacgaagcccagccctacacgctgcctttcaagccctatgcatggagcggtcttgctgggtctgacctgcggcacctggtgcagagctatcggcagtgcagcgcgctggagcgcagcgcgggcctgagcctcttctgcgagcgcggctcggagccgggccgcccggcagcgcgctacggccccgagcaggctgcgggcggagccggtgcgggacagccagggagctgcggggtcgccgggggcgccaccagcgctgcgggcctggggctttacggcgacttcgcgcctgcggcggccgggctgtacgagcggccgagcacagcagcaggccggctgtaccaagatcatggccacgagctgcacgcggacaagagcgtgggcgtcaaggtggagtcggagctgctttgcacccgtctgctgctgggcggcggctcctacaaatgcatcaaatgcagcaaggtgaggctcgcgcgcgcctggcctcatcagccctgtgtccccagcccgtgaccctccagcatgcgcaccccgcgacccccctcagcggccttctccctggccccccactcgccctcaggtgttctccacaccgcacgggctggaggtgcacgtgcgccggtcccacagcggcacaagaccctttgcgtgcgagatgtgcggcaagaccttcgggcacgcggtgagcctggagcaacacaaggcagtgcactcccaggtaagatcggcgctggcggcctgacgctgcactggggacctttcagcttgtcctccgaatcggcaccagccattttcccactgcctcccggtgccccctctgcttgctcctatttgggggtgcagagaaacctgggtgacagaagtcctggagtgtgctgcaatcttagattgcagtgtcgcaccgctgtgagtctccagcagtggaattctgttggagatttgttgacatttgctgctaatgcactgactttactgtttatgttcccttcatccttcctgactggcaagggagggtctcagttcatgcgcagcgtccagtagcgaatgctggtcattcattcattcattcattcattgctttataacttgcctaaatctaaggctttaggcacctgagaatcctgtagcacagcaggtcctgtatggtggattaaagagagggagataagcaaaatactacacaagtgtctgtgacagcagcccatctggtccaaaccccacagtgactggggaggaggggcaatctaagtggctgaggtcctgctgaggagggtgtcaatgggtgtcaaaaatgcagggcggagctacgcttttgtcctggggtgtggagggttgtggctgtaaagtgttttagtagttaatcagtaggtgttgaatgatggggtggagggagagaggagagggtttctggctctgggagatcagtagatgttggagagagagagagagagagagagagagagagagagagagagagcacaagcgccaaggaggctgctgaaggagcggcacatttcttcctcctctcttcctctctgctctgcaggaacgcagctttgactgtaagatctgtggcaagagcttcaagaggtcatccacgctgtccacacatctgctcattcactcggacacccggccctatccctgtcagtactgtggcaaaagattccaccagaagtcagatatgaagaaacacaccttcatccacacaggtgagctaaacctgggcttgtaggagatgcttgaaggacatgactcccctctgatagtctacctccaatgagtggtagatgagttctcccccagagtgaatctggtttgtccttgagtctgaaggagtatcttcctctatgtcaacagctgtgcggcatcaagccctcccagagggtcaatgtaaatatttactagagatatgggtattcatatgtgtcaactaaacttcatttttataagagcttcctttgtttgagcaggaaaagaaaggcaaatgttaccaagtttcctgctgagtctgtgttgacaactccagagacagtaactgtttctttagcctcattttaaaaatgagatgaggaaatcaaggctcagaacgtatccaggattacagggctcaagttcaggtttgttggtctgagctcccaaattcatagtcgtgacttgttccttgtgtagtagaggtttacagccgtgggaaggtggttaatgaggaaactcctattcgtttggtgttctttttgaaatgccaaaattttgttccctaacagtgacaattccttaactatacaatgctttaagaacacccaagtgtttcagattgctcatttcccttggtcctttcctcctgctccacacagtaaattgggatcctcttactcagacagcaagtcagtttcagtaaatttcaattctctctagcttccagcctggacgcctgccttccttaacacttcaggaacaaatgtgcaggcttactgtcaggagcttgtcaactaaagtgattcccttgccccaaaagcatttcctgtaaccgtcaacatgacagttatatgagaccacaacttctgactttaggaacatttctttaaatcaaatcacagctggatacagtggcacataggaggcagagacagatgagatggaggctagcctcggctacatagagagtcctaggccagctaggacaatacagcaagatcctgtatttaaaaaaacacagtgccttccaggatcccacaattaatgtttgtaaatatttgtgagcagtgtagacatttgtatcagaaaactcaggaaaaaaagcctcactttaatcatgccccctgtctgaaatgtccatgtaattcactctttataagttgtttgagacacttatcaaaatgcaaatagaatcttgactgaatgacacatttaagtctttactaaacatttatttaattaaacaattattaacgcattttattaaatcttggctagaattaatttcacagacatatttgactctagagggacagggtaatttttgtgaagtgagtctttatcaagaaatcttaagcacaaggagagatggaagttccttagaaacaagcaaacagatacttggttgttgttgatttgtttgatcccataaggccgagtaccaaccggagagccatgaggggattagttgggaatgtgtgccatttactcacattttaaccagagcacaagaccaggaaagacaaaacctgttggttttcttcctgttgcctgctttaaaaatttttttagtttattgttctgttgtgaagtgttggcatattaagaatcctgtagtttaaaacctcaaaggaagaaagaaagaagtaaaagttagaatagacaaccttaacaaattatttgtggctcgaatgtggatttaaaaaaaaatagacattggacaaacctgtgttcttcaagagcaagaaggaagacaacttcagtggccacacaaaacaacacccacttggaaactcagatttgaaaacttcctctgacgaaagcagtcatagggtctgtaggacagcccctcccacctcctgctgaacatctgctctgggggccctgtgcttctaaaagtcagcaggctagtcctcgggggtgaattcagctggggagggcacgtggcctttactcagtttccgtttagcaggaaaccgtttgagacctttggctgggagcctccactcaaaaagtctcccttccacctggtatacccgtggcttactggtaccaagttgcaggccaggagttggttcgtgttgcaacctatcactccccagcgtgaaagtcttagccagctgttagcaagagcatgtgggtcgcaacgggtctctcccagctttatcataggctcatacttcctgcccttggtcttccatccttgcaggtgagaagccccacaaatgccaggtgtgcggcaaagccttcagtcagagctccaacctcatcactcatagcagaaagcacacaggcttcaagccctttggctgtgacctgtgtgggaagggcttccagaggaaggtggatctcaggaggcaccgagagactcagcatggactcaaatgagtaccctggcagcccgcaacaccagctgtgtaacactaccgtgagggatgtcttccctgcctccctccagccccttctcaggccctgagtccagtgtgcaaagctcatcatggttagtccccttcaccttccttcccggagctgctggaggagatgaactcccgtttctaaggtcaacccagagtgggaaccgcagcagcagcagcagtcgtctgtgctttgggcttccctacagctgaagatggggatcaaatgagatcttgcacctcccagttcttcccttttttgctgtctcacaggccagaatgaactctgggcagctgctacaagaggaggcatcacctcttaagctttgagcgccactgatgcatttattgagaacgaatgaacattaattttctcttctggggagactgctgactcctttatcctccaccagactctggtttagggaaggaacctcgttcctttgaaatcatcagatgcaccatcaagcctgccacgagaagaaggggacttggtgatgagagggagtcagaggtcctgtggtgccatcagaggaggtgaagctgtggagcagctccggggaacagggtcttcacttactcagcgagtgattattggccgcaggttatcagagtaaggaactgtgctaggtatgggagagccagagattaaagtcataggccctaacccccaaaagctatcagttggacttcaacatagctagagcctgtgttctgtgcttccaagggagttctgaagaaggccacacaaacattgggacttctttttgacacttacggagtttttcaagtgtaaacaaataggaactggaggattatttctaaagttcatgagtaaatccagcttttattgttaggtgggactttattagatgcctgcgctgggagatgtggggtgaaggctatggcctcagctcctgccccttatcatcttaggaacaacttatttttcctgtgagggttgtagacgttcctaaatcttcttgagtgcattatgtattagcataatcatatttattagaatgttgttttaacttaataaagtattaagattattacagcttgtctttcatcaggccaggaatttcgtgggaaggccgttggtgtgtttgcttattttttcttttccctgtgggatacaccaggacaggagaactgcagaggaaaaccagagtaaatcacagtttctccagtttccatattttcctccttcttttattcctgagaactttttaaatgatttaattttttgttagttttaattatgtgtccatgtgtccctatttgtgtgtgtggatatgtgcacatgagaggctagcgagggcgttggatctcctaaggctggagtagttttgggccattacaagctaccagacatgtgtgctaataaccaaacgcaggtcctctgaaagagcaggaagcaactctaagctgctgagctagctctccagccccccatctatctatctatctatctatctatctatctatctatctatctatctatctatctatacctatgatcttcctttccttttaaaaacagggtttcactatatctatatagtgaactcatagagatttatctacctcctaagtgctgggattaaaggtgtatgcctttaatacctggctaatgaaaacttaggaggtatgtaaaactcaactcctatagccttatagagtcctggatggatccacagggatatcaattcttacctttgagaatttcatcttttgtgtgtgtgtgtgtgtgtgtgtgtgtgtgtgtgtgtgtgtgtgtgtttcatttacacagtttactattcagctattaagaacgttgacatcatgannnnnnnnnnnnnnnnnnnnaacgttgacatcatgattttctaggcaaatgcgtgggactagcaaaatatcatcctgagtgaagtaactcagacccaaaagaacaagcatagtatgtactcagtaataagttgatatcagcccccaaattacagaataactatgatacagtccattttttgtgtctatttttttattacgtattttcctcaattacatttccaatgctatcccaaaagtcccccacaccctccccccacactcccctacccacccattcccattttttggccctggtgttcccctgtattggggcatataagtttgcctgtccaatgggcctctctttccagtgatggccgactaggccatcttttgatacatatgcagctagagtcaagagctccggggtactggttagttcataatgttgcacctacagggttgcagatctcatcttaacaaaaacaaacacacaaacaaaaaccaaaccaaaccaaataaaaccacacaaagctaaacaaaatcaaaccaggacctagacttctagatgaaagcatagacctttaattcagagatctgaatgctttaaaaatatttatgtatgtatatatgtatttacttgtgtgttggtatgtgtaaacatgtatgtaataagtgtgcagatgcctgagatggccaggaaagggagtgggagtccttgaagctggagttataggcagatgtgagctgtctgacataggagctgagctcaactcacgagctctgtgagtagcaggtgcttctgcgccgcctcttcagcccagatttgagtctcagtgtaggctctgtcactgatgcattctgcgtcttggcaaatgttattacttcctagtttccttaaccatacagcatagctgtggtccttcaccccaacctaattctgactactcagactccttggaagctggagagaaggggagaaagagggaggggaggggaagagagagatcgattggctggccactgtgtggaagggaaattacaatcctaaaatgtgagtgaaatgtgaaatggggcttggagcttgtcttggggtcaccctgtgattatcacatgtcacattctgctatgacttggataccccaagttccatattccagggcaggaactcagccccgaggcaggagctgatgcagaggccatggagaacactgcctacagacttgctctccatggcttgttcaacctgctttcttatagcacccaggaccacaacccacaatgggctgggccctccctgtcaatcactagttaagaaaatgcaccacagcctgatgttatggagatgttttctcaactgatgttccctcctctgagacaactccaacttgtgtcaagttgacataaaactagccagcatagggttattctgttctggtcccaaaagactgaaaccaggataaagtcctagccttctctactacctgtgcgctgaaggcttctagccagagcttcagcccacgtggcccaggggaccagacaacactatttctagtgatcaatttctcacatgtcaactgaatacccagcctgtgtttgggaacacagaagtgagggcaagtcccacggagctgcattaggcactaggtggtacgaagccacctgcttcctccacagccagctgcatccaggaatcacacaaagctttctcattgtaggatggggaggttgaacctctcaaatataagtccttggcttatattcttgttggttttccatgactaactctttccatgtcagttaattcaaagtttactccagtagaggtttgaaggtagcatctcagaaactgtgggtgataaagtagcccaagcttaggggaatcacttcacaaaatcctaggaggcaaagccctatggaatgaagacaagaaggcatctcgctcacaagtcagtgtgtgcaccgctctcttagttccaacctgattgaaaagtaaaattataatgaaggaggagtcaagctgattgaaacccgtgggttctgtcttctccccatcttgcctgcctgatgacattggaatatttgctccactttcatgggttttgattaagttattaggagttgttctcccccgccctctctcttcctctctcttctgtttgttttgtttgtttgctttgagatcttactatgtagctcagtctgggcttgaactcacaattcttactctttagctactcaagtagttgggataacaggtatgtcccactatgttaaatctagaaattataattttggcgttcattttttttaaatgtgaaaaacatttgtctctgtatccctcagtttagaatcaaaacaaattactgtgccagttgccctgtgaaatttgaagattgaaaatatctctcttaatgttattacttggctccattaaaaatggattgtgaatattccatgttgcattattcacgaggtgggctctatgccttttgtctgccagagtaacagtagaaagggtaacgggagacacccagcgcacctttgtttcttccactaaatttttaataacacctccagctagccagttggtgaagctcagctcttgcacaaaagtggaaaagcgcagctaaccctgttagctgagtctttcaggagctaatttgagtttgtgttcatctacaccagacatgattagattacctatcaagtgtgctgagctatcaggattcaagcccagtaaaaggtgaattccatctgattgatttgagacacaagtggaacaactgaggtctcataagcaccaccttcattaaaggggcagcagagcatcaccccgtgcctgcccccgcccctgaaaactgcgcgtgcatagtgatttgacccatgtcattctgctgggagcctttttgtttaacctggtcatctaacagaaagaagtaagctaagagcgaggaagccaaaaggtcttcatgcactttctttgcatgtcaagagttctgtttggttcaatctgcacttttgagttattgccaaagtcaaaactttctatggagttcattatatatttatttaaatgttatttatcattaagtcagattaaaacataaaaacttcagagacatttcacccagcacctttctaactttaaagtccgtgggttaatttttaatttgtttgtcaatcctttatccataggcttatatacttatacatttttaaaaaaattttgtggtcagagtacttataatttgtatcaaagtacttcattcatttacttgcagtatagacatatgcttaaaactgaaatatgtctcacaatgagaattttggaccttgttttttctttattttgagacaggttaggctctgagttaggaagattgtctctgcctccagagggctagatttacaggtgagttctagcaatccttgcttggacaatttttgtggttaaggttttttgttttttgttttttgatgtcttagtacttatttataaaatttcatcatttttgaagacttcttaggaaaaatgaaaacttttgtattgcagggctttttcactctaagcaaaacatttaaaccacacgggaagttacagagaagaaataatacttcaggtacacccaccattctgttgtatttacttcatgagctattttattcatttaaagttttttgttatatctttatttctatatctgaggggcatattatgactggtacattcagtttgtccttaaaccctttagattctggacaccaggcttggttggcaagccccataactcactttattttgaaatagaacaagtttctatccccaagacagcaagggagaattcttgccccacatcttccaagcctaaaaaatgtttggaaattgggtgtaaatgctgttgtaatttgtatttcatggttatctcttcacaagtttatgggcttgatgggtctccctctctgtgaaatgtttgctcatgtacttttttttctgccagctttttatcagcttgttctttctgtgtgtactaatcactcacttgctagaacacaggctataggatgaaaggagtctgtcagcctacatgccgtgcacgtctcccactgtccttcctcttttttaccctttgtttgttttttgatattttcaagatagagcttctttgtgtagtcctggctatcctggagctctatctgtagaccaggctggcctaaatttcagagatctgcctgtctctgcctccggagtgctgggattaaaggtgcgggccaccacctggtgtcctttgccttttcactttgatgagaaggtcagtttggtttgggtttttgtgttattgtagtcagatgtactggcgtgttcctgcgctggttagtattttgtcaacttgacacaagcttgggtcgtctgggaagaggggacctcaattgagaatatgcctgtaccagattgggctgtaggcacgtctgtgggtgcattttcttgactggcgatgaatgtgggtggtgccacctgggcaggtggttctggattgtaggaactcaggctgcacaaatcatcggtagaaatccgggaagcagattttcttcctggtctttgccttgagttcctgatttgcttgagggaagccttggcttcccttaaggatgtgctctgatcctgacttgtaagccaaattaaccctgtccttcccaagctgcttttggtccagatttttttttttttagcaacagaaagtgaatcannnnnnnnnnnnnnnnnnnnnnnnnnnnnnnnnnnnnnnnnnnnnnnnnnnnnnnnnnnnnnnnnnnnnnnnnnnnnnnnnnnnnnnnnnnnnnnnnnnnnnnnnnnnnnnnnnnnnnnnnnnnnnnnnnnnnnnnnnnnnnnnnnnnnnnnnnnnnnnnnnnnnnnnnnnnnnnnnnnnnnnnnnnnnnnnnnnnnnnnnnnnnnnnnnnnnnnnnnnnnnnnnnnnnnnnnnnnnnnnnnnnnnnnnnnnnnnnnnnnnnnnnnnnnnnnnnnnnnnnnnnnnnnnnnnnnnnnnnnnnnnnnnnnnnnnnnnnnnnnnnnnnnnnnnnnnnncccctcccctcctctcctctcttctcttctcttctcttctcttctcttctcttctcttctcttctcttctcttctcttctcttcttttcttttcttttcttttcttttttccctcgagacagggtttctctgtgtagccttggctgtcctggaactcactctgtagactaggctggcctcgaactcagaaatctgcctggctctgcctcctgagtgctgggattaaaagacttgtgccacaccacctggccgttgttgcttttcttaacttaagaatctctggggctggagagatggctcagtgcttaagagtacttgcttctcttgcaggggatctgggttcagttcccttcccttctgattgtggtagcttctatttccttccttccttgtttttcacctttccttttgtacttccaggatcacatttatctacctgcccagcccaagtttctgttctacatggttctctctatggatctgccaccggtcctactgtctacttctccttaagccacagttccataaataattagaataaaagttagtttctaatgactaatagaggaggcttccctctgacctgcttcattctcttcagaatatctactcgtggcctttattcttgcacatgattttggcgtgtgttactgtcatgactctgagtctagcaacttccatctttgggggttcagttatatcccttggcaaaggtttatcccacctgagcttgttgactccccctcccccgcatggaactgtgggaagggtcataactgagtatcctgttatctgtggtttgcgactctgtcttaattgctcctgggccctgggaatataggaggagctagagtgtatgggtaccaaagacgaggggaaatgagctcagctagggaaaagcatcacccctgctgggggaagactttccagtgtggaggattgcggaggagcatcggtaacccctcttattgtgctctgtaaattcactagacttgttgatttcccaaagtgacctgtggtagaatctggcctcagtttgttagtttgttgttgggactttagggagaagagtaagtgttgtttatggctacccgggaaagaatttattaacagagacattgtttactttgaatagagtaggacttattttgatactaaatataacatagcaattatttatttggttttaaaaaagtctttaaagtttctttgtcatattctccctacataaatatatacctctatatatttatttataaacatgtttgtaggcatgctgatcttaaaaactctgttaaaacttttacatttgctatatataattttaaatagcctgtataagataataatactaagataggaaaatgattatagctttttatccccctccttttaagttattcttcctgtctttgtggtagcaatggccaatactgtgttgaatgggagtagtgaatgcttttaattttttaaatttagcgtgatgtttttggtagggtgctggtaaccagcttttaaggaatcaagctcagggatggagagatggctcagttgggaaagtgcttgttttgtaagcataaggagttgaatttggatcccaaaaaaagcatgggaaaagctggtggatctctgccagttctagtctagccagagtgagctggtgaaagcctgcttcaaaaaaaaaaaaattctacttgtattagggtaagatttctatttccctcccttctttgttagatgcgactagaacctggggccgttcatctgcagcatccactgctgagctacacctgggccctgtagtgaatgctttcctcctctggttatatttttgcagataagatcttactgtgtagcccatctgcctttgtctctcaagtgctgaaagttcaggtgtacaattacccagatacatgagtttttctaatagttattaagtatttattcttattgtatgcttttcaaatttcttggaaagttttccagctcttttctttaatttgtttatttggcaaatatttacatttaaaagatgtgttaaattatccctacttcattatgaccacccaaatgctgggacttaggggtgggctactatggcccactaagtgttagatttttactttgttagattgcctatatgtttgctgttctctgatttctaataagcatttatcaataaaatttacatgtgtatgaaagacatctcatcatgggatgagaaggagaaagagagaaagattgagactgaattattctgccaggttccaaacattgacatactgtgttagtatgtccgtccattttctggtattttggggaggatcctaacttgcaaggctctttaaagcctgatttgtaactgtggggaagaagtgaaatcaggaagccagatttacttcttaaagctttacacacttcattgagaaatttctgattttgttaaattaagaagcctagtttcaattctgtttttttttttttgacattttttttttcacatgaatcagacattccctggttgtcctttctgagaagtccattgagctggtctaaggtctgtagagacaagtgtagtcatgaggaccagccgggtcagagcagaacacccacgtgacttgtgggtagtcgggagccattctttctttaacatttagtagactcctgtatatttcacctcttgactttaccttccctgagatttcacagaaactcaacttcctctttccctgcactgaaaccactattcatggatgataagaatcccaccctcccctcgctgagggagaacggccacagcatagtgtttctgcactgcgcgtttgtggccacagcatagtgcttctgtactgcacgtttgtgacttgcttttgcctggtttttggttatgccatgcagtatataaaagaatgcataaaaattaaaataaaggtagaactagataatgttcaaaactcctttatttgtaaatcctcctctttaaaaaaaaatctaaacatgacaactatcaaagcttgcttgagatgtaactagccaagtcctttcactccagaagatgtggaaaaagagatttacattattcctccattgtgcttgatcctctttctctccatgtggttcatagaacagctgtagtcagtagatggttatacatttttgtgaaaggattttgtcctgtgcatgcatttgcacactccttactgaattttcaaaagtagggttaaaagttagcaaagtcggacagcactgaacatgtactcagtattggaagattcatagttcagtctgtcgagtgatttctcctgagaagctctgagcaagcatctgttcacccagatggacgccaatgacagtccacagaaaagaagtctaccaattctagtagcctagcgaaccaatgagcccgttgcatgagcatgggtgacttgggcagctgcatcactgaaaagcccaacccagcatgggtggactatgctttaaagctgtatccctggaatttcctgcacagttggtgggcgggcggctccatgaaagagccctcattcctcccccaaatcacttactgcttataggacctctgggggggggggctggggggggggatcannnnnnnnnnnnnnnnnnnnactgtcttgtgagttcacagaacctttctccctttgtcttctctgtttggggatgtttcacccagaaggaagtggccgcccagtgttttttcaagcccccgttcattttcaggtaggccaagcaccattcaggggaggttttggctgacagacctgtaggtatttcttttcttttctttctttctttcttttttttttttttttggtttttcgagacagggtttctctgtgtagccctggctgtcctggaactcactttgtagaccaggctggcctcgaactcagaaatccacctgcctctgcctcccaagtgctgggattaaaggcgtgcaccaccacgcctcggatggtacttattttcatattgggtagatggaaggtaagtcagcagtggactgggagatatgtaggagccccaaaattagggccaaacatctaactagtccaggaaacccaccaatgcgctctgcgcaccatagcaatgccctaatagtttcttggaggactgtcttctgctagtcattgttggt

SEQ ID NO: 52 - DNA, 2858 bp, Mus musculus
gctccaagccccttccgggtcccaaacactgatgccccctgactggctaaactaagccacgcatccctggcgtgagccacaacccagaagggagcaggtgggcttgcagggttgacttgggataacggaccagttgtggactactgctctcaggagagtgatgatctagctttggtagggaaggggaggggctgaggcgtgggcagggcagagcaaagggaccagagccagagcctggggacaggttttaccactgagctgttgcagtggcggcggaggccgggattcgtgccacctgtccgagtgccacctggtgagcgtggcgcctgggtccaggcccctcctcccgcggcttccctctctcctccctggcccacactcttccttggcctgggaacctaccacaaccgccatcggtgctgaccctcgtttccacccaattttcccccttctctcagaactcagagtatccgagggtccaaacattcgtccagcggctgaccaccatgccgcgctcattcctggtcaagagcaagaaggcgcacagctatcaccagccgcgttctccggggccggactactccctgcgcctggagaccgtgcctgcgccgggcagagcagagggcggcgctgtgagtgcaggcgagtcgaaaatggagccccgagagcgtttgtcccccgactctcagcttaccgaggctcccgacagggcctccgcgtcccccaacagctgcgaaggcagcgtttgtgacccctgctccgagttcgaggacttttggaggcccccttctccctccgtgtctccagcgtcggagaagtcactgtgccgctctctggacgaagcccagccctacacgctgcctttcaagccctatgcatggagcggtcttgctgggtctgacctgcggcacctggtgcagagctatcggcagtgcagcgcgctggagcgcagcgcgggcctgagcctcttctgcgagcgcggctcggagccgggccgcccggcagcgcgctacggccccgagcaggctgcgggcggagccggtgcgggacagccagggagctgcggggtcgccgggggcgccaccagcgctgcgggcctggggctttacggcgacttcgcgcctgcggcggccgggctgtacgagcggccgagcacagcagcaggccggctgtaccaagatcatggccacgagctgcacgcggacaagagcgtgggcgtcaaggtggagtcggagctgctttgcacccgtctgctgctgggcggcggctcctacaaatgcatcaaatgcagcaaggtgttctccacaccgcacgggctggaggtgcacgtgcgccggtcccacagcggcacaagaccctttgcgtgcgagatgtgcggcaagaccttcgggcacgcggtgagcctggagcaacacaaggcagtgcactcccaggaacgcagctttgactgtaagatctgtggcaagagcttcaagaggtcatccacgctgtccacacatctgctcattcactcggacacccggccctatccctgtcagtactgtggcaaaagattccaccagaagtcagatatgaagaaacacaccttcatccacacaggtgagaagccccacaaatgccaggtgtgcggcaaagccttcagtcagagctccaacctcatcactcatagcagaaagcacacaggcttcaagccctttggctgtgacctgtgtgggaagggcttccagaggaaggtggatctcaggaggcaccgagagactcagcatggactcaaatgagtaccctggcagcccgcaacaccagctgtgtaacactaccgtgagggatgtcttccctgcctccctccagccccttctcaggccctgagtccagtgtgcaaagctcatcatggttagtccccttcaccttccttcccggagctgctggaggagatgaactcccgtttctaaggtcaacccagagtgggaaccgcagcagcagcagcagtcgtctgtgctttgggcttccctacagctgaagatggggatcaaatgagatcttgcacctcccagttcttcccttttttgctgtctcacaggccagaatgaactctgggcagctgctacaagaggaggcatcacctcttaagctttgagcgccactgatgcatttattgagaacgaatgaacattaattttctcttctggggagactgctgactcctttatcctccaccagactctggtttagggaaggaacctcgttcctttgaaatcatcagatgcaccatcaagcctgccacgagaagaaggggacttggtgatgagagggagtcagaggtcctgtggtgccatcagaggaggtgaagctgtggagcagctccggggaacagggtcttcacttactcagcgagtgattattggccgcaggttatcagagtaaggaactgtgctaggtatgggagagccagagattaaagtcataggccctaacccccaaaagctatcagttggacttcaacatagctagagcctgtgttctgtgcttccaagggagttctgaagaaggccacacaaacattgggacttctttttgacacttacggagtttttcaagtgtaaacaaataggaactggaggattatttctaaagttcatgagtaaatccagcttttattgttaggtgggactttattagatgcctgcgctgggagatgtggggtgaaggctatggcctcagctcctgccccttatcatcttaggaacaacttatttttcctgtgagggttgtagacgttcctaaatcttcttgagtgcattatgtattagcataatcatatttattagaatgttgttttaacttaataaagtattaagatt

SEQ ID NO: 53 - protein, 476 aa, Mus musculus
AWRLGPGPSSRGFPLSSLAHTLPWPGNLPQPPSVLTLVSTQFSPFSQNSEYPRVQTFVQRLTTMPRSFLVKSKKAHSYHQPRSPGPDYSLRLETVPAPGRAEGGAVSAGESKMEPRERLSPDSQLTEAPDRASDNSCEGSVCDPCSEFEDFWRPPSPSVSPASEKSLCRSLDEAQPYTLPFKPYAWSGLAGSDLRHLVQSYRQCSALERSAGLSLFCERGSEPGRPAARYGPEQAAGGAGAGQPGSCGVAGGATSAAGLGGDFAPAAAGERPSTAAGRLYQDHGHELHADKSVGVKVESELLCTRLLLGGGSYKCIKCSKVFSTPHGLEVHVRRSHSGWFACEMCGKTFGHAVSLEQHKAVHSQERSFDCKICGKSFKRSSTLSTHLLIHSDWYPCQYCGKRFHQKSDMKKHTFIHTGEKPHKCQVCGKAFSQSSNLITHSRKHTGFKPFGCDLCGKGFQRKVDLRRHRETQHGLK

SEQ ID NO: 54 - DNA, 31050 bp, Homo sapiens
  misc_feature (1)...(31050): n = A,T,C or G
attttggtcctgttctatggatgtgaccttgtagggtctcatttgtgtgctatgcagactcaaaacaatttcctggggtaaagcttacacctgactttggttttcccttgtgggtgagaaagcctttgatacaaccagctgttcttaggtacctcagctttcacaacaggtcaaacctacgtttgaattgtctattaaggcatatggatctgaattttaaacaacacagaatagaattccaggatttcgctgagagtataatctcatcctgtcatcaaatatttattaaaaactcagtaaggagaagcaattttcagagaggattatttgaagcatataaggattatttcagacagtctagtctcaaacacatccatggattaaaccagatcagtagacagctggtaccttgctagacagtgtcatagtttcccaaagtatagtttttatcaaattgcacttttgtgtgatgtcaacaatgtatattgagtgttatgggaaataacatttgttgcatttattttaagattgtgtaagaacactattaatttctatcacaataactactttttaggatcgcagtgggaaatatgtctgttcttcctggtaccaagaacagttaatagtcatagttatctcaattttgtgattaaggagagaagtggggaaaggagggagggaagagagggtaagaggaagggagggagggaggaaaggagggaggaaggcaaggaaggaaggaaggaaggaaggaaagaaggaaaacatttccacctgccctccaacttcctcctcaaagaatcccagcaaannnnnnnnnnnnnnnnnnnnnnnnnnnnnnnnnnnnnnnnnnnnnnnnnnnnnnnnnnncaatgagtagtttgggttagagaagcattgtggaatatgccaaatgctttctacaatccaaactgctaaatgcttctcaaaccagaggcaaaaatatctttgtgcaaaaagtagatctcgttattctgcagccggtagaatattttgatgctgcaaaatcctaaccccaagcctcatatcaggtgggtttcagaactatagtggcaactgtgcaaagtgctgactggtcaaaagaaaagtcttgtatcccaggccagacagccatctcagaggcctgggataggagggaaacattctttatttatttgctcctttattcaccttccttgctacattcacttctgagtgagttgaaggagagcagagaccccatatccaatctatgtacctcacatctggcatggcgtatgacaaagattgttcagtaaatatttgttgacttgaactgtacaactgagtccacaaactctgtcctcctttaggacatgtgccagcactgggactttccattcctcaggcctcagtgactgcttttaaaccaacctccacactggtcacccctgggtcagcatcctgagcagagtttatgcctggtgtttccttgtctccaccaccccattatttcttccactatcgaacaaagtgactgtgaggtacatgagcaaatctctgatttgtacagaagctctgttcattctccagctgatgaggggtggggggtatgtgtacgtgtgtgtgtgtaggtggcgtgtatgttcatgtgggttttttgtttgtttgttttttgtgttttttgttttgttttgtttttttcagatggagtctcgctctgtcatccaggctggagtgcagtggcacgatcttagctcactgcaacctccacctcccagtttcaagcgattctcctgcctcagcctgccaagtagctgggactacaggtgtgcaccaccacacctggctactttttgtatttttagtagatacagggtttcaccatgttggccaggctggtctcaaactcctgacctcaggtgatccacccaccttggcctcccaaagtgctgggattataggcttgagccactgcgcctggcccttcatgtgttttaattaaagctcaaatgaaaactcatgacagtccctactgataaattgctccttgccagacagtaagaacagttgagaatattttaggaagaggcaatgatcccctagcacttctctaccagcctcagctcagatgaactgcttggctttatggggacacagaccatgacagttggaagtgatccttggaaagcctcctgtgggagataaggtccaggagctcaggaagggagcctgagtctctcaggtctaattgggatatcagaaatccatataaaaatggccggtcatggtggctcacgcctgtaatgccagcactttgggaggccgaggtggatggatcacctgaggtcaggagttcgagaccagcctggctaacatggtgaaaccccctctctactaaaaatacaaaaattagctggacgtggtggcaggcgcctgtaatcctagctactcaggaggctaaggcatgacaatcgctggaacccaggaggcggaggttgcagtgagccaagatcgcaccactgcactccagcctaggtgacagagcgagactctgtctcaaaaaataaaaaataaaaaaaaaaagaaatccacataaaaatgcttcctggcaagtctcaggggctgcctgcagtgcacaaagctactgcccctacaatgggaggccttgaggcctacctcctgcagcagtccagggtcaggagtcaggctggcctgcgttggaatcaggactctgtccttctctggctatgtgatctggggaaggcaagcctctctgagtctattcccacagcctgttcattgggatggttagagataatgtacataaaaagggccgccaatagtgcctgttgtaatagtgacaataactaacacttagtaaatgcctactctatgctttacatgtattaactcattgaatctgttccagaatctatgaagtaggtgttgttattgtaaccatgtttgcagatgaagaaactgaagtacagagaggttaaggaacttgtttaaggatagaagaaggcagagccagaatttccagacattagaaatctggcttagagtccatgctcttaattgctacactcttctgcctcttagctactgtggtatttataatttttcttggcaggggtgtaattattacaatcattcaggaaaataatttctcaatatgtgtccatagacttgaaaatgttcctagcctttagctgggcatggatgctcacacctgtaatcccagcagtttgggagtccaaggcaggaggatcaccttgaggccaggagttcaagaccagcttgggcaacatagtgggcctacctctacaaaacaaacatacaaacacataaaaaacaaaacacaacaaaaaggaggttcctaacctttgatccaggaggggaatcacttctggttatgaatcctaaagaaagaatcctacatatagaaaaacccaggtacaattaaaaaaaaaatcacagcatcatttatagtagggaaaaagggaaataatccaactgtccagtaacataataaataagatcacagcacatcatctaaatggacaattatacaatatcatcatagtagactctttttttaagactggggggaaaacactctgaaatattactagaggttgaactaaggtagtgagatatggagctgtatttttactttttattttgtctactttacaaatgttctattgaattaacataactatgctgctttcagcaacttaaatactattattttctgacctttggatgagcagcatgcctgccaagtccacactgttgggagtgatgggttgggccttgcagcaggagaggagggaatgtgtctctcctccaccatcccatccttactacctctcaagtctgtgacaggcacgtgacttttggctccaggcttttctaccctatgctggatgtgaaacaagtaatgtgatttggtggaaagaaacaatatttggaatcaacagatttggttggaataagaaagctgctagttatcagaacctgggcttcttaaaccactggtgtctcccccttttttttttcccttcctttcccacgtatggaccactggtgtccttatccataaaacagaaatgaccagaatgcctgccttggagaactcccagcatttctttctcttctatgaagcccaggatagcagctgaggtggaacatccagtgggctgcatctacctatcatcagttcatgctgtccttctgtctgtctctttgggcgagcctgaggttgttcatgtgggatgatcctccaagccccgcctcatgcagacagcagcggccagagattttcagaagcctcaactcccaccttacctccagatatggggtcatatatttcctttaagggagttgtgttttgtgagtaatttttaaaatttacaatatataggctgtactattttaaagtgaagtgtttcatctggggtagggtgaactaatcaccaaacatactggaggaaatggtgaaaaactcaaaagaaagataatttttgcattttctctcgtttgattttccattcacaaagcaaactatactccttttttttcctataaaagttcacactggctgtgtttctatgaggagtcatatcacatagctcacagtaagatgacacttcgttcaatctattcttaggaacaatgtaaaaatacgtatgtggtgagattaacaattttcttatttgaactctgaacaccaaagctgacagtctcctccctcttcagatgtttgaaatcctttatgtaaaagcctaatttaaactttatagtaatagataatatttttaaatgtaatgagatttaaatatatcagtcccaaaatgtttattaaaagcaaatgtttttcttcatgtttgaaaagtaaaaaatattaatacaaagttggttcttataccttaagtcttctattaacttatctccatgtttctcctttacttaatttcccaatttttgcatgagctggtacaaaaaacattacccacttcccacaaatgatggtaccattaaatcgtattctgacttatggtgtcagtggaattctattttgatagcctgcttcttataagattagaaggggataattatattacctgtcattcaagttaaggcatcacacagttatcagtttgcatttattttctttgaattaatacaattaaaatatatgtaattcttatttcagtttgactacacctatcatgacacctaatccaaagacaaaaattaaatagtttgttagtatacatgaggataaaaccatggcaatatgacagggtgtggttctaacaagtacttcctgtacataaaataaagaccagttctatatctggtctttaatccaagtcaaacttttccttagtttatttttgtagtcttttaactgttaagtggtatgaattcttttggcttatgcattacataagcgccatccataaaacttgttctggtatgtatcaaggaccgtacaaataatcattgttggatctagaaatttcacccctaaaaatatatcctaaggaaataattccaaatgtagggaaagctatattcaaaaatcttttcattgtattacttaaaatagtaaaaactcgaaacaagctaaatagtaagatgagagtgattgagtaaattatagtaaactagctgatagaacttttttatagcaattgaaaatgaaagattgtatataaaaagcaaggaagatgattgtcatgatttttatttaaataatttttactataaaaagtttatattccatttaagaaaacaggaaaataaagagaatagaaaaaagaaaaataattataatattcgggaagaaaagcagactactcagttgtatctgtaatacgattataatttttgttaaataatagagcaagaatacttgaaagttgttttacagagttttattcttttcttatcagatatatgtagcataatttgtaatatagtcttatttatattattatttataatatacaaataatatagcataatttcttatacgtttatatttaaaactcagaaaccctcatttggagcattctcccattcttgctgcccaaatgaacaggtaaagagtgcaaattaaaagattgttccagctgggcattgtggctcatgcctgtaatcccagcactttgggaggctgaggcaagtggatcacgaggtcaagagttcaataccagcctagccaacatggtaaaaccccgtctctactaaaaatacaaaaattagctgggcgtggtggtgcatgcctgtaatcccagctactcggcaggctgaggcaggagaatcgcttgaacccggtaggtggaggttgcagtgagcagagatcacgccactgcactccaacctgagcaaaagagcaatacttcatctcaaaaaaaaaaaaaaaaaaaaggttgctccacagtcttgcgtggtaggtaccagtattccgactttacaggtgagaaacaggctgagagttgagctaacttatccaaggtctcaaagctggtactagcagaacagagattgacaatcacatcttactagcttttgaatgcctgaactcttttttcccttcctggtatcatcatggtgagaatcaaatgaggcaaacatagaaatgtattctggaaatgggggtattgcccctccctggggtttcaggatcacccacttttcccatgccgtcccacaaaggacagagatcataattgtaaagctttgtgaaaaaataaacaagatactggtaatatcctgttacaattttctttttgaaaatgtctcagccaggcacagtggttcacgcctgtaatcccagcattttgggaggctgaggcaggaggatcatttgaggccaggagtttgagaccagcctaggcaacataacgagactccatctccactttttttttttaatgtctcaaatcttctgttgtagggaaattctgatctatgagaggctgcttgaaataaatgggctactggccaaggcttggaaatgtttgtggtatgagaaggtcagttgttatttggcatcgacagatacattattattgctatttagaaacaattagtttctaaatatttgaaacaattagtttcaaattattgaaaaggcagtaaatgtaaaattattcctttggaaagaccctatttatagaaaattgtgcctcaggtatacattttgcttaccattagatctatttcaattccaaaggaatatatggagggagagggagtatttgtagcttctaaaaatgttcatggaggggtggcttattctctttgcccttagtttaatagaagcaagaggtagtttggagtagcaggaagtcagagatgggttcattgtatcgttatttctagtcctagctcttcactgtccttggcaaggttcttaacctctctgggttcccctcttcttacctttctcctattcttccccaagtgtgggagtcacacttcaacactatacacccgggagtgttgtgttgttaaaaagtattgttaaatactttttaaacgtgttgaatacttgttaaatactttttaaatgtgtatttatttatttgagttagtactacatacacatggttcaacatgtaaaagacataaagggaaattcagtgccatctccctcccacctgctcctttctgcgtgtccctgttccagttctcagttttctttttcaaactcagaaatcccaagaatctgtgaagggcaaatgaaaagcaaaatgactagactaaatctgaatgaaagggatttattctaaggtgatactgctcactgctcaaggtgcttatctgcccccttcatgggctccctcaagttttctgagacttcaaacagcaacactcaactaaactataaaatagtcacagcaccttttcgagaaattttgactttgaacttgctaatatgcaaaggaaatagtccaaccatttctctagaacttggttgataagaaattttattttgtcccatttataattttattctaaaaatttgtttttttctgctatcgagtaggagagaagggaataagggaaagatttgtttttgcactactgtgagatttttataccttaggccaggacaaagcacacaagaaataaaatattaacaaaatgtccttaattttcctttctgaccaaaattgcttgcctctgcatttatatataaagaagggatgtgttgagcaaatgaaggaggacagctaggcagacaagatttgcccagcgcctggcatacaataggggcacaggtcattgcttaacaaaacgtataatttattaatacatgctcgaagcactgctatactaaccaaatattccctgcaaaattttaaatttacagtgcaaaataagaataatttaaaaactgtttctagaaaaagagctttaagggcttcccccccataacaatttaagattaacctagaacatggtagttattttgcaagaactggggagcaccactctcttctccttgtgcatgtctgacattggaggcctattgtgcacgaagttgtgatcaaaatccaagtcaattcattttgaaaagtaacatgactacaacatccatccactccaatgagcaaagggtgtaggctttgagtatacacagcaggccacacactatgggtcatggcatacagtctagcgttggaggttgctgcatttgttcatgtatctatgagttaggttttaagttttttccccctgttctattaatataattaattagttaattaaccccactcattcatttactcagtccacagccttttgttaagagcccgcctaggacataaagatgaagatccagtgcctaccctcatgaaacatagaatccgagcgaagaaggcttactttgcaatagtcatccaagtggtgcttttatggcgctttactgctcccgccaacacccagtgcctgggtatgacctcaggcggtggcagagcccgcgtgcgaggtcccgctctccctggcttgccccggcagggcggagtcagcctagcagccgccggcgctgcccccgcgcggcctttaattttgcagctccgaccaccggaaattagtcgaaggctgagcggacccggtcgagagccggcgagctccgcgcagggagggtgcgcccaccggtcccgccgggcgcccgcgggacgcgccgccagggccctctccgccgggggctcggcgctcgcccacctcttccaaatttaaccattacctaaatccgaagggaaatgagcaaacctctcggattgggtgtcaaggtattttcagcctcgttgggcgtatttatccccaagtgtttccacaacaagctatttcggggccgcggggcaggtttcgctctgnnnnnnnnnnnnnnnnnnnnnnnnnnnnnnnnnnnnnnnnnnnnnnnnnnnnnnnnnnnnnnnnnnnnnnnnnnnnnnnnnnnnnnnnnnnnnnnnnnnnnnnnnnnnnnnnnnnnnnnnnnnnnnnnnnnnnnnnnnnnnnnnnnnnnnnnnnnnnnnnnnnnnnnnnnnnncgccccccacccctctctcgccagtcaatctgtgtcctcaatctgtggcttctctcgctgcggaagtctccctggagccaagaatagttcattttctttcaagtcatttctagtgcctaagtgtccggacctccaatttcccccatcccctgccgacccacagggagagaactgggaggactactaaggggcgcgcgggacgggctggaaaggccaggccccccaccgcctggccacttgcgcaaaggagcgcgcccggccgcccgacgggggttgggagcaggtctgggagggctatgcgagcgactcagtaacgctcaggaagtgaagcttgtggttttgggggctgagctcggaaggagaattttttttttttttaagtcagagagatagagcggtctctcccgaaagcaagattccgtttgaaaactctcctagcgcggtgcccgcgccgtgactccgcaggtaggtccgccgagcctgttctgcgcctcctgccctggtgggggcggccgcggggactcgcagagcactggcactgcgggggcgatcagagggcgcgggcggtttcccacctgctgcggaccgccgtgcgggagcccagagagctccggcagctgggttagggcgcgacccgcgcagtgtgactggaaatctggagctgggggcgcgcagcaggcggtctggtggttcggcaggggagccaaatccaccagggaaggaaacatctggtggggaggcggcggcagctgcgctcgggaggacgcccccttagcgccctcggctccctccttcctgggcccggacggtgaggagaggcctgagcgcgcggaggggccgccccacctcccgcgccagctgcagcgcggggttgccttcccacgcgctcggcccaggccccggggcccctatctcctccaaactctgtcgctccccacaggaaccagcaaagcgggccggggtgcgagagaggcgtgggcttacagcccgggtggggaggcggcctccgcgtccgcctggtctctggtggcgccagcccagacccagctccggcgctgacagttaccccgcccccatctgtcccgctcccagccaacgtgggtccaagctgcagcgggaccctcgggacaacgccactccgtttttcttttcttccgagtttcgtggctgtttaaagaattgggtttggggtttgtggcgtctaattgtacggacgagaagtgcaggaagcgacaaagctctagccctaggagccaccccggagggaggcggatggcactctcacccctaggggcattctggcgcttgggtagcgggaaacttcgcgggagccccgcgacacgtcccaggcgtcttttctcccaggtctattcccattcctccggagaaggggacacaatggggctggggatctggagcagggggcctgcaccctacagggaccaaggcctgtaggactcgtttgagctgagagcgccaacggacagacgtagactgtgtggcctgcatcttgcctaggaagccgaggggctcctagtccggcagtggaaacagcgcgaagccggaggactgcaggtcctgccccggcccagagttcccagcaccctcgtttctgaaccagccgaggccacggagaactgctgtactgcagctcacgtgtgaacccggtcaccatcgccttcaccccgggaggaaggcagattcgtttactccagaccacctcgactgtggggtaccgcccccggagccggctggagcctagcggcaggcgcagccacgccctcccgctgcgctcagatttcgacctggtattaggtgaactgattgggggttaatgagagcgacgccccgggcagctagttccctcccgggcccgggcccgacccccgctctctgctaatgcagcctgcgcgctctggcgtcctgtcttttttgtctgctaaattgtcggtgcactaccgactcgggacacctagcatttcccagtcaacgttcgtggatcgggctccacctccctaggacaagattttttggtgagcagaacggaaagtgcttttttcccgggacctgattcccgaggttaggtctccatggtctgggatggctcgccgcagcctcgaccggtgcccgccgcagccgggagtccaagggcaaagtttctcctacgtggggcactagtgaggggcgagtgggatcacccagatgcgagtttctcctggggcgggggttggtcgtctgttgttcccctcactttcctgtccctttgctctcccacctcctttctctggcctctgctgtccccaatccctctgctgctgtcctcccgccgccccacagttttatcttgtgttctgttcccccctccccccggtcctttcactccagttggtagctggctcttggaggtcttggctccttgccccttccgggtcctcgaccactgggcatccccggcccctaaaccgatccgcgtgtccccgccctccctcgccagccgtaaagcacagccaggcaggcgatgagtagctgagttggggtaacccacccgatgggaactacagctctccagggagtttgattgccggagcgagcttcgctaggaaaggggaggagctggggggcgtgggcagggaggaggaaaggggcctgagacagggccccgggacaggttttaccgctgagctgtgtcagtggcggcggcggcaacgacggcgggttcgcgccacctgtccaagtgccacctggtaagcgcggcgcagcagggtcaagcccctcctcccgtgggccctctgcgcgcctccctggcccgcgctctccctccgcctgggtgcccagtccgccgcaccggagagtactgacccacgtctccacctggttttctttccctctcaggtctcctccgggctggggctgagcaagccctcggagtgaccgtgggtgacagcggctccagggactcttggggcgcagtggggaaagtgccggaccaccatgccgcgctcatttctcgtcaaaagcaagaaggctcacagctaccaccagccgcgctccccaggaccagactattccctccgtttagagaatgtaccggcgcctagccgagcaggtgcgaggcgcgcgcgggccaggcggggctgctcccccggatgcctactgcacctcggcacaccattagtccggagctgggaggggctgccccaacgtcccttttgctgctgtttttgtttcctactgtcctggttcctccgggtttgtctnnnnnnnnnnnnnnnnnnnnnnnnnnnnnnnnnnnnnnnnnnnnnnnnnnnnnnnnnnnnnnnnnnnnnnnnnnnnnnnnnnnnnnnnnnnnnnnnnnnnnnnnnnnnnnnnnnnnnnnnnnnnnnnnnnnnnnnnnnnnnnnnnnnnnnnnnnnnnnnnnnnnnnnnnnnnnnnnnnnnnnnnnnnnnnnnnnnnnnnnnnnnnnnnnnnnnnnnnnnnnnnnnnnnnnnnnnnnnnnnnnnnnnnnnnnnnnnnnnnnnnnnnnnnnnnnnnnnnnnnnnnnnnnnnnnnnnnnnnnnnnnnnnnnnnnnnnnnnnnnnnnnnnnnnnnnnnnnnnnnnnnnnnnnnnnnnnnnnnnnnnnnnnnnnnnnnnnnnnnnnnnnnnnnnnnnnnnnnnnnnnnnnnnnnnnnnnnnnnnnnnnnnnnnnnnnnnnnnnnnnnnnnnnnnnnnnnnnnnnnnnnnnnnnnnnnnnnnnnnnnnnnnnnnnnnnnnnnnnnnnnnnnnnnnnnnnnnnnnnnnnnnnnnnnnnnnnnnnnnnnnnnnnnnnnnnnnnnnnnnnnnnnnnnnnnnnnnnnnnnnnnnnnnnnnnnnnnnnnnnnnnnnnnnnnnnnnnnnnnnnnnnnnnnnnnnnnnnnnnnnnnnnnnnnnnnnnnnnnnnnnnnnnnnnnnnnnnnnnnnnnnnnnnnnnnnnnnnnnnnnnnnnnnnnnnnnnnnnnnnnnnnnnnnnnnnnnnnnnnnnnnnnnnnnnnnnnnnnnnnnnnnnnnnnnnnnnnnnnnnnnnnnnnnnnnnnnnnnnnnnnnnnnnnnnnnnnnnnnnnnnnnnnnnnnnnnnnnnnnnnnnnnnnnnnnnnnnnnnnnnnnnnnnnnnnnnnnnnnnnnnnnnnnnnnnnnnnnnnnnnnnnnnnnnnnnnnnnnnnnnnnnnnnnnnnnnnnnnnnnnnnnnnnnnnnnnnnnnnnnnnnnnnnnnnnnnnnnnnnnnnnnnnnnnnnnnnnnnnnnnnnnnnnnnnnnnnnnnnnnnnnnnnnnnnnnnnnnnnnnnnnnnnnnnnnnnnnnnnnnnnnnnnnnnnnnnnnnnnnnnnnnnnnnnnnnnnnnnnnnnnnnnnnnnnnnnnnnnnnnnnnnnnnnnnnnnnnnnnnnnnnnnnnnnnnnnnnnnnnnnnnnnnnnnnnnnnnnnnnnnnnnnnnnnnnnnnnnnnnnnnnnnnnnnnnnnnnnnnnnnnnnnnnnnnnnnnnnnnnnnnnnnnnnnnnnnnnnnnnnnnnnnnnnnnnnnnnnnnnnnnnnnnnnnnnnnnnnnnnnnnnnnnnnnnnnnnnnnnnnnnnnnnnnnnnnnnnnnnnnnnnnnnnnnnnnnnnnnnnnnnnnnnnnnnnnnnnnnnnnnnnnnnnnnnnnnnnnnnnnnnnnnnnnnnnnnnnnnnnnnnnnnnnnnnnnnnnnnnnnnnnnnnnnnnnnnnnnnnnnnnnnnnnnnnnnnnnnnnnnnnnnnnnnnnnnnnnnnnnnnnnnnnnnnnnnnnnnnnnnnnnnnnnnnnnnnnnnnnnnnnnnnnnnnnnnnnnnnnnnnnnnnnnnnnnnnnnnnnnnnnnnnnnnnnnnnnnnnnnnnnnnnnnnnnnnnnnnnnnnnnnnnnnnnnnnnnnnnnnnnnnnnnnnnnnnnnnnnnnnnnnnnnnnnnnnnnnnnnnnnnnnnnnnnnnnnnnnnnnnnnnnnnnnnnnnnnnnnnnnnnnnnnnnnnnnnnnnnnnnnnnnnnnnnnnnnnnnnnnnnnnnnnnnnnnnnnnnnnnnnnnnnnnnnnnnnnnnnnnnnnnnnnnnnnnnnnnnnnnnnnnnnnnnnnnnnnnnnnnnnnnnnnnnnnnnnnnnnnnnnnnnnnnnnnnnnnnnnnnnnnnnnnnnnnnnnnnnnnnnnnnnnnnnnnnnnnnnnnnnnnnnnnnnnnnnnnnnnnnnnnnnnnnnnnnnnnnnnnnnnnnnnnnnnnnnnnnnnnnnnnnnnnnnnnnnnnnnnnnnnnnnnnnnnnnnnnnnnnnnnnnnnnnnnnnnnnnnnnnnnnnnnnnnnnnnnnnnnnnnnnnnnnnnnnnnnnnnnnnnnnnnnnnnnnnnnnnnnnnnnnnnnnnnnnnnnnnnnnnnnnnnnnnnnnnnnnnnnnnnnnnnnnnnnnnnnnnnnnnnnnnnnnnnnnnnnnnnnnnnnnnnnnnnnnnnnnnnnnnnnnnnnnnnnnnnnnnnnnnnnnnnnnnnnnnnnnnnnnnnnnnnnnnnnnnnnnnnnnnnnnnnnnnnnnnnnnnnnnnnnnnnnnnnnnnnnnnnnnnnnnnnnnnnnnnnnnnnnnnnnnnnnnnnnnnnnnnnnnnnnnnnnnnnnnnnnnnnnnnnnnnnnnnnnnnnnnnnnnnnnnnnnnnnnnnnnnnnnnnnnnnnnnnnnnnnnnnnnnnnnnnnnnnnnnnnnnnnnnnnnnnnnnnnnnnnnnnnnnnnnnnnnnnnnnnnnnnnnnnnnnnnnnnnnnnnnnnnnnnnnnnnnnnnnnnnnnnnnnnnnnnnnnnnnnnnnnnnnnnnnnnnnnnnnnnnnnnnnnnnnnnnnnnnnnnnnnnnnnnnnnnnnnnnnnnnnnnnnnnnnnnnnnnnnnnnnnnnnnnnnnnnnnnnnnnnnnnnnnnnnnnnnnnnnnnnnnnnnnnnnnnnnnnnnnnnnnnnnnnnnnnnnnnnnnnnnnnnnnnnnnnnnnnnnnnnnnnnnnnnnnnnnnnnnnnnnnnnnnnnnnnnnnnnnnnnnnnnnnnnnnnnnnnnnnnnnnnnnnnnnnnnnnnnnnnnnnnnnnnnnnnnnnnnnnnnnnnnnnnnnnnnnnnnnnnnnnnnnnnnnnnnnnnnnnnnnnnnnnnnnnnnnnnnnnnnnnnnnnnnnnnnnnnnnnnnnnnnnnnnnnnnnnnnnnnnnnnnnnnnnnnnnnnnnnnnnnnnnnnnnnnnnnnnnnnnnnnnnnnnnnnnnnnnnnnnnnnnnnnnnnnnnnnnnnnnnnnnnnnnnnnnnnnnnnnnnnnnnnnnnnnnnnnnnnnnnnnnnnnnnnnnnnnnnnnnnnnnnnnnnnnnnnnnnnnnnnnnnnnnnnnnnnnnnnnnnnnnnnnnnnnnnnnnnnnnnnnnnnnnnnnnnnnnnnnnnnnnnnnnnnnnnnnnnnnnnnnnnnnnnnnnnnnnnnnnnnnnnnnnnnnnnnnnnnnnnnnnnnnnnnnnnnnnnnnnnnnnnnnnnnnnnnnnnnnnnnnnnnnnnnnnnnnnnnnnnnnnnnnnnnnnnnnnnnnnnnnnnnnnnnnnnnnnnnnnnnnnnnnnnnnnnnnnnnnnnnnnnnnnnnnnnnnnnnnnnnnnnnnnnnnnnnnnnnnnnnnnnnnnnnnnnnnnnnnnnnnnnnnnnnnnnnnnnnnnnnnnnnnnnnnnnnnnnnnnnnnnnnnnnnnnnnnnnnnnnnnnnnnnnnnnnnnnnnnnnnnnnnnnnnnnnnnnnnnnnnnnnnnnnnnnnnnnnnnnnnnnnnnnnnnnnnnnnnnnnnnnnnnnnnnnnnnnnnnnnnnnnnnnnnnnnnnnnnnnnnnnnnnnnnnnnnnnnnnnnnnnnnnnnnnnnnnnnnnnnnnnnnnnnnnnnnnnnnnnnnnnnnnnnnnnnnnnnnnnnnnnnnnnnnnnnnnnnnnnnnnnnnnnnnnnnnnnnnnnnnnnnnnnnnnnnnnnnnnnnnnnnnnnnnnnnnnnnnnnnnnnnnnnnnnnnnnnnnnnnnnnnnnnnnnnnnnnnnnnnnnnnnnnnnnnnnnnnnnnnnnnnnnnnnnnnnnnnnnnnnnnnnnnnnnnnnnnnnnnnnnnnnnnnnnnnnnnnnnnnnnnnnnnnnnnnnnnnnnnnnnnnnnnnnnnnnnnnnnnnnnnnnnnnnnnnnnnnnnnnnnnnnnnnnnnnnnnnnnnnnnnnnnnnnnnnnnnnnnnnnnnnnnnnnnnnnnnnnnnnnnnnnnnnnnnnnnnnnnnnnnnnnnnnnnnnnnnnnnnnnnnnnnnnnnnnnnnnnnnnnnnnnnnnnnnnnnnnnnnnnnnnnnnnnnnnnnnnnnnnnnnnnnnnnnnnnnnnnnnnnnnnnnnnnnnnnnnnnnnnnnnnnnnnnnnnnnnnnnnnnnnnnnnnnnnnnnnnnnnnnnnnnnnnnnnnnnnnnnnnnnnnnnnnnnnnnnnnnnnnnnnnnnnnnnnnnnnnnnnnnnnnnnnnnnnnnnnnnnnnnnnnnnnnnnnnnnnnnnnnnnnnnnnnnnnnnnnnnnnnnnnnnnnnnnnnnnnnnnnnnnnnnnnnnnnnnnnnnnnnnnnnnnnnnnnnnnnnnnnnnnnnnnnnnnnnnnnnnnnnnnnnnnnnnnnnnnnnnnnnnnnnnnnnnnnnnnnnnnnnnnnnnnnnnnnnnnnnnnnnnnnnnnnnnnnnnnnnnnnnnnnnnnnnnnnnnnnnnnnnnnnnnnnnnnnnnnnnnnnnnnnnnnnnnnnnnnnnnnnnnnnnnnnnnnnnnnnnnnnnnnnnnnnnnnnnnnnnnnnnnnnnnnnnnnnnnnnnnnnnnnnnnnnnnnnnnnnnnnnnnnnnnnnnnnnnnnnnnnnnnnnnnnnnnnnnnnnnnnnnnnnnnnnnnnnnnnnnnnnnnnnnnnnnnnnnnnnnnnnnnnnnnnnnnnnnnnnnnnnnnnnnnnnnnnnnnnnnnnnnnnnnnnnnnnnnnnnnnnnnnnnnnnnnnnnnnnnnnnnnnnnnnnnnnnnnnnnnnnnnnnnnnnnnnnnnnnnnnnnnnnnnnnnnnnnnnnnnnnnnnnnnnnnnnnnnnnnnnnnnnnnnnnnnnnnnnnnnnnnnnnnnnnnnnnnnnnnnnnnnnnnnnnnnnnnnnnnnnnnnnnnnnnnnnnnnnnnnnnnnnnnnnnnnnnnnnnnnnnnnnnnnnnnnnnnnnnnnnnnnnnnnnnnnnnnnnnnnnnnnnnnnnnnnnnnnnnnnnnnnnnnnnnnnnnnnnnnnnnnnnnnnnnnnnnnnnnnnnnnnnnnnnnnnnnnnnnnnnnnnnnnnnnnnnnnnnnnnnnnnnnnnnnnnnnnnnnnnnnnnnnnnnnnnnnnnnnnnnnnnnnnnnnnnnnnnnnnnnnnnnnnnnnnnnnnnnnnnnnnnnnnnnnnnnnnnnnnnnnnnnnnnnnnnnnnnnnnnnnnnnnnnnnnnnnnnnnnnnnnnnnnnnnnnnnnnnnnnnnnnnnnnnnnnnnnnnnnnnnnnnnnnnnnnnnnnnnnnnnnnnnnnnnnnnnnnnnnnnnnnnnnnnnnnnnnnnnnnnnnnnnnnnnnnnnnnnnnnnnnnnnnnnnnnnnnnnnnnnnnnnnnnnnnnnnnnnnnnnnnnnnnnnnnnnnnnnnaagtaagactgaatgaataatgtagccatgtaatgctctggcttttaatcctggactgtttgtctaacactttatgtgcgggtgggagttttaatgccaagaacactctaatagtcaaaaggacatttacatgagacccagaatttctgaaaattttattgcagaatatgagtactgatttagaacaaatcacagtgtattctaaacacccacccttgatgtttataaatatacttgggtaatgtatatatttccattgaaaacccagaaaagtattctactttaatcattccctcttacctgaaatttccatgtaattcactccttataagtaaggtattcaggacacttatcaaaatgcaactaggatcttgactgaataaaacattaagcccttatcaaacatttacgttatacctagaatttgttttctcagatttgtttgaccctaaagggatagaatacattttgatgggtggtttcttatcaaggaaatctgaagcatgaaaacagaaaagagtttttagcaaggaggacagagggttcctcaaaaacaaacttcatctattttatactttttccaaggctgagccctgactataatgccatgctgggctattggaaattcatgccatttacccaacaacacatgagatggggaacaagacaaaaccttcttgtgttctcttatttattaatttgtggtgaagaattgctggtatataaagaatcatgtgattaacctcataaaattaaggaaaaatcaagacagtaaagtatcagctgccttaatcctttgtggcccaaatgtggatttttaaaataagatattgaaaaacgtatcctgcacatgtaccccggaacttagaaagaaagagagagagagagagaaataaagaaagaaagaaagtccatgttaagatgttttttcagatataatctgctgtccttcaagaacaagaaagaagacgggctcactgatccatacaaactaacacccacttggaaattcagatttgaaaacttcctctgaattagaacggagtcacacggttttaggacagcttccccctccccttcctgttgaacatctgctctgagtgttcatggcttataaagtcaggggagtcctcccggggtagattcagctggggagggcacgtggcctttgctctgtttccgtttagcaggaaaccgtttgaggcctttggctgggaaccccccttcagaaagtctccctttcacctggtgcccccatggtgcttccagggactcgcattgcaggctgggagtcagttcaggttgcaacacgtcaccctccaagttgcttgaaggccttagactgtggtgcaaccagctgctgccaagagcatgtgggtcacagtgggtcccctctagctttatcatagactcatactttctcccctccccctcccatccccacaggtgagaagcctcacaagtgccaggtgtgcggcaaggcattcagccagagctccaacctcatcacccacagccgcaaacacacaggcttcaagcccttcggctgcgacctctgtgggaagggtttccagaggaaggtggacctccgaaggcaccgggagacgcagcatgggctcaaatgagcaccctggctggctgcaagcagcagctacacaacactacagagggcagcctccctgcttgccaccactctgctccctgcttgcctccactcccttctgactttccagaccccaggtccagtctgcagatcctaccaggttgctcctccttcgccttacctcctggagctgccagaagaaatgaggtaccttttcaaagtgcagccgagagtgagaaccaagtgactctctaggcttcggacacaaataggctcctctacacctgaagacaaaggcaaagtcaaatggggaccagaataaatcttagaccccacagtccttcccatttccagccctaatctacagacaggaatgcccttcaggtttcttccctcccccctcttgacctaccccagatatttgtgtggaagaggaggaatcaccatttacaaggtggacaaatgctaatatttttatctagaaagaagagtgagtgttaacttttatttttttccttctggggggtctgttgactcctttcttttgggtgctgcctataaatcttggaggaatcatttctcctcctcaaaaactgattcagaaactgacttggggaaggaatttaatactttgaagtcatgagatgcaccatcgaggctacccccaagaagaagcagaagagaagttggtaatgagaggggattagaggtcctcccttcagtagggctgtgaaaacctcatcactggaggtaaaagcacaagcaatgcctgtggacaagatgtcattcattcactcagcaaatgttcatggatcaccggctaccaaggtaccaggcaccatgctaggtattggggaagagagactgaagtcacaacccctgactgctcctcaaaagctaacggttgcacctccaagtggctgggtctgttcttactcttggagggaattctgagaagacagcacagaattgtaaaccttcccttttgacccttttggattttatcaggtgtaaacaaaaagctgaacagttacttcaaagatatgtgtgtatattcagttttttattgttaagctgatattttaaagatttctgagctagcaggcatgtgggaaggaaggctctgtcttcaactctttgaccctccatgtgtaccatagaggggggaaaggtggtattttcactttgatgaggttggtaaatgtttttagatcttctggtaagcattatgtttgttaatacatatttattagagtgatgttttaagttaataaagtattaagagtattacagattgcctttcctttaggcagggaatttggggaagacctttgttttagtctgtagggggaaagctggcactgaaggaaactgcaatggagtataaaagtgaagcacacaagctaatatccagaagagtaaaatccaattgctcgggtttccatatactttctcctttgctgctacacctcagagatacttctttcatcttctttcataagagaaaaactaggaggtgtacaaaactaagctactaccttgtagagcccctgatggttccacaggcacgtaagtaagctctttcctctgaaaatgtcaacatatttttttaggggcctgaaggctcccagatgaataaagaaatcacaggtcttaggtctaggttttagttttagtcacagctctgtcaccaacacatcatgtgacttgtgtaaatcttttgacttccccgatactggtttccttgatcaagtaatacggagacagctctgtcattcctgtccaaccctgaccgctttgattctgtggagactggaaaggaaaaaaagtgtgagattggttagctgcctcccctaatgcaagtcacaaatctaaaggcccatgaggatctgggttatttctggttctgtcccacctgtgggagttttttgcataagtcaatcctttaagagaatgaaaccagaataaaatcctggccaaaatccctactactagtgctttaacacctcccagccagacattcagggtatgcatgccccatggtgagaaccagcagattgcccatttccaactcaaattgatttcacacatataattgagcacccagtatgtgctgggcattcttctagggggtggagatatagcagtgaggacaatgtcttacgaagctttatttattcattgttgaatcctcagttcccagaatagtgcctggcacacagtaggagattaataaatatttactgagatgttaagtgaataaacagaaaataagctcctgcttcatcctagggcctggctctgctctctacagcacaaagggaagagagattgcttgacagcctgggaaacaaatagaatccacacgactttctctccaggttggcaggaaaggggggcttgaatgctgcttttctctggtttctccaaatctcagtccttggctgtcctcacctgatttccagcaccatgtctttccatgtcagtttactctcattcagaatttaaattcgtttactctgtaatggagtttaagatagtttttcagaactgatggatgatgaacagttgcagcgtccaggaaccacttcctagtgtcctgggagacaatcctcccagtgaatgaaaatgacaaaaacatccttcccacagaagtcaccctgtgtactggttggttatttccaacctggtttgaaaagtaaagaagttgcactgaggggtaagtagaactgattgaaatctaggtgcctgtgctgtcctgctcttcccttatgacgtttagaacatttggtccatttttgttatccctgtttatgctctaagtgaggaattgtaattttgatgttaactgtatgccttttttttttttttttggtaaaaaatgtatcttgatatccccagttcagaatcaaaacaaattactgtgcctgttaccgtgtgaaatttgaagattgcaaatatctctcttaatgttattacttgactccattaaaaatagattgtgaatattccatgtcacattattcatgaggcaggctctatgccttttgtctgctggagtaacagtagaaagggtaacaagagacaccagagcacacctttgtttctttcactaaatttttaataacacctccagctagccagttggtgaagctcagctcttgcataaaagtggaaaagcacagctatctctgagaagaccaactctttcagcagctaatttgagtttgcgttcatctacaccagacgtgattaaattacctatcaagtgtgctgagctatcaggattcaggccacgtaaaaggtgaatttcatctgattgatttgagacacggatggaacaattgagttttaaaagccccgccttaattaaagggatagaagagtatcactccccggcgacttcttgactgccattgcccttgaaaactgggtggtgatagtgatttgacccaagtcactttgttgtgtgcctgtttgttcaacctgatcatttcacagaaagaaatgaactcagaggaaaacctgaaaggacttcactactttttactgggcatttctacagaaatgccattattatttctacagaaaaaactttttaggaagtatataatacgtttattttaacccccttttcccattcattaagtcagattttaaaaattaaaaagttaaagaaattgcaccctaaatccttctagcttaaaagcttatgttctttttgtatgcgttcctttctagtttgttcctttctagtctttaggcacatgtgcgtatatttatattttataatttttgtctagatagctcttttattatatggacacatacttaaaacagatatttcacaatgagaatttggacaattttatgaccaaattttattgaaatcttagtattttattgggaatcttatcaatcattgagaaaaagtcttttctgaagtttaatgttatcactttttgaataaaacattttaggcatactggaaattgcagagaataataaacatcagtgtacccaccattctgccatatttacttcagattttatttttgaaataacatgttacaggtatagttgaatttcttctgggatatattcctctctagccccatttcctttcttttctcctcagaggcatccattataccaaaatcagtatatataattgccacgaatatttgtatgcctttaatttatacataattccataaataatatataatcatataaatatataattaatataaaaatataattgtatttatatataaatatataattatgtaaatatataatttagcatattaacttcatgtaaatggatcatagtttatacttctgcacttttctggtttttttgcttaacacattgtttttgagatttatccatgttgatatgtgcagtttagttcctttattttaaccactgcatatggaattccatgggatgaatgcttggtaatttattctcctgttgggagagtttgggtcatttccagtttttcctattacaaatgattctgaagcaaacaaccttttatgtatctcttttgtgagagattctttaggatgtattcctgggaatgaaaatgctggatattatcaaactgctcttcaaaatggttgttccaattgacagtctccccagcaatgtagaattcctgttactccaaatcttaccaacacttggtattgtcaaactttaaacatgtctgccaatcagatggatgtgaatgtcattgtaatttgcatttcctgattcctagtgaggttgagtatctttttataagttgatgggcctgacagatttcctttcctatgaaatgcctcttcatgtactttgtccatttttctgttggttgtttgctttttatcaatttgttctttaaatatattctaaacgctcactgttatgttagttaaatgtgttgcatacttatcccagtctatggtttgccttttcactttgaagagaggattgtttgcttgttttgtttttgtgtgtaatcaaatgtattagtcttttcctcaatggtttatgcttcttacatatcatttacactctttccctagctggtggtcattagattccctatattttcttctaaaagtgtttaaatttctgtttgtaacattaggttttcttttttttttttttttttaggtggagtctcactctgtcacccaggctggagtgcagtggcgcaatcttggctcactgcaaactctgcctcccgggttcaagcgattctcctgcctcagcctcccaagtagctgagactacaggcatgtgccaccacacctggctaattttttatttttagtagagacagggtttcaacatgttggccaggctggtctcgaactcctgatctcaggtgatccacccacctcggcctcacaaagtgctgggattacaggcgtgaaacattagctttttaatccacttgtgtgtgtatagtataaagtaggacctaattttaaaaattttcttcaccattagtaatggataaccaattatcccaacattatgtattgctattttcatccttttccctctgattgtaatgccacctctgtcatatgtcaagtttctatttctgtatggttctatttccaggcttgctgatctgttccactggtcattttgtctatctctatgccaaagccatagtgtcttaaataatttaagttacaataaactcttaatagctagtagggaaggctgccttgtgacctgtttcatcctcttcaggagtatcctggctacctttggcccttcgttcttgcatgtgaaaaactctattggaatttaggtttgtattacatttattatttaatttggggagaattgaaattattttgctattgattcttcctatacataaatatggtatattgattacttatttaatcttcttttatggctttcaataacactttgtcattgtctgcataatttaattactttttaaacttattttcttagttctttttttgaaaattgaattttgtcattgctgctgatgtatgggaacaaaattaatttttctatatgttgatcttgtatcctgcaactttgctgaaccctcttttttggtttttgcagattattttagattttcagagtaagatagccataagatattcaagtgattatagctttatttcattctttccatcttattattgcctcactgcactggccagggctatactgaataggggctgaataatagtcatctttgtcttattcccttattccagggaaatatttttagtttttcacaacttcatgtgatgtttttggtaggtttttggtagataacttgttaaaaatgagattaggaatttctgtttctatttggtaagaatttccacttgtgtatgtgtgtttttaatcaatgggtatttaattatttttgtgtgatttttctgcatctattgagagaataaatatatttttaatcttttatcctttgtcaacatgcaaattatatttataattttctctaatgttttaaattatccttgtattatttggggaaaaaacccccacctagagggaataaattccaacttagtcatttaaacaacattgctgatttggtttgctgacctttacttaggatttttgcattatacttactagtgaaattggcttataatttttatttcttatgctgcccaaggtttaacatgtttcaaaatgaacagggtaacatttcttcttcttctgttttctggatcaatttgtgaaggactggaattatatgttctctgaatgtttgatagaactcacctgggatttttttgatgaaggctagcaaagaggagggtatatttaagttttagttactataggtctattcaggtttttaattttttcttaaatatgctgtatcatggctgggcacggtggctcatgcctgtaatcccagcactttgggaggccgagacggctggatcacgaggtcaggagttcgagaccatcctggctaacatggtgaaaccctgtctctactaaaaatacaaaaaaattagccgggcgtggtggcgggcatctgtggtcccagctacttgggaggctgaggcgggagaatggcatgaaccagggaggtggagcttgcagtgagccgagatcgccccactgcactccagcctgggtgacagagcaagactccatctcaaaaaaaaaatgctgtatcatatatatatatcagcatatttataagtatccaaattaattgccacagacatttcatagagttctctgatttttaaaaaatgtctactccacctataattatgttcaatttttctttctgatattgttcatttgtacctttatcttttttctttaatattgccaaaggtccctattttattagtttttgcagcatattttcattgtcattcatttctatatcttatctaacaatatttcttatttgacagatgtattatttagaagtacatttaaaatttctaaacatctctggcttagagttgcaaaataaaattctaaacatgttttttcagtaatttttgtaagtgatttataatttaattatattttgatcagagaacctgacttgcataatattaattctctaatatttgttgagatttattttgtggccttctccatggtcaatttttatagataatgtgtgcttgaaaagaatgtatatattctaattgccaagtgcaagttccactatgattaagcttgtgattatattgttcgaattttctatatcctaaataattttggtctgcttaatcaaccaatcactgagagagataggttttactttctcatggtgattattaagttataaatttttcctttaagttcttttttttttttccatgtgagcttgagaaaaatctcctttgaattctgttaactctttttcttttacctattttgagggttgttattaggtgcataaaattttgaactatttcgtattcctggtgaattattccttttttaatcatcattctattgtactcattgcctttagttttttgtttggttggttggttgttttttttttaagtttttttttttccttagagacagggttgcctaggctggagtgcagtggtgctatctcggctcactgcagccctgacctccctggctcaggtgattcttctaccttagcctcctgagtggctgggaccacaggcacataccaccacacccttctaatttttgtagtttttgtagagatggggttgcaccatatttcccacactggtcttgagctgctggcctcaagcaatccatctaccttgggccttcaaaatgctgcgattacaagtgtgagccactatggctggcctatttttacatggtatttttaatgtccttttatttttaatctttttatgttcttatgctttaggaatatatctttgtaaatagcattaattcaatattatttacctttttaaagtcagacataagtaaaataaaatttccaattgaaaatataatttctgatactgtttcactatatgtatgtgtggtgtacatgtacctgatcttttcatctctaagcaacttaatctaataggaatctgttgctgttttctcatttccaatgagcttttactgataaaaaagaattacacacacacacaggagagaaaagtactcactctgcccaaaacaatatgatgcttactgctttactctgctagtccattttttggtattcaaggaaggattctatcttgcaaggttttttaaagcttgcatttgttttaactgtaaaggagacccaaaagcaggaagttaggtttgtttcttgatgctagttttacaaacttcattgagaagttttttaatttttggtaaagtaggaagcctagtttcaattctgtcttttaacatgaattagacaatttcctaggttgccctttctgagaagaactgattggcacgcctttataagatttgctgcaatagcagttcttcagtttttcttagagtaaggaaaatctgagtggatgcctcttgtgactttttgggagagccagaaaccatcctttcattaacctttagtagaattgtctgtgtttcacctcttggatataccttcccagagacatcacacaaactcaacttcctctttccctgtactaaaaaccactgttcatgggactctaataaacaagagtaacaggttcttaactgggctgagggagtcccaccacagtgtaatatttttgcatgtcatctttgcatggttattgtttacatgatatatttaggtactatataaaataacataaaataaaaagtttaaaataaaggtagaaccagatgaccttcaaaactctttcaatccaggagctgggcattgtggctcatgcctgtaattccagtgactcgggagactgaagtgggagaattcttgaggcaaagagttcgtgaccggcctggacaacataatgagacctggtccctgatatttttttttttttaattccctgggcaataaagtgagaccctgtctccaaacaaacagacaaacaaacaaaaaaaccagtgggcagtgaactggaagactctttgcaatccaaatgctagtgtcaaaggtttagctgatttgatttcagggcacccacaacacttattctttgtacatcactaaggaccccctggggtctatatggaggtttattttccactggtcactgttggtccaagactggcaggttccaggtgtgagaaatggatctgaactttcctagggaaccttctattagcttggagaagcagaactgtttagttaaaaactgcattgaatttggaggtcaggagatccttaaatatggtatattgattacttatctgcatatagttccagttcaagaccaggagaagacaaagacagatgtcccagatcaagcagtcagacaggcaaagttccctgttagcctttttgttctgttcagatctacagttgattggatgaggcccacctacattagggaaggcagtctactttactcagtctactgatttaaatgttaatctcatccagaaacaccctcagagacataccaagcaagaatgtttaaccaactttctgggcacctgaggcccagtcaaactgacacaaaaactaaccatcatggtctccaaattgccagtatatttatcagagtaaagagcactagtgctgtaacgaataactccaaaattgcagtagcttacataataaataaataattaacatatcacagtgaatttgagtgtgttcaggctgctttcttcactggtgattgagagctcccaattccttctatcttgcaatgctgccatcttccagggatttcttgttctcttctgcattgtctgcatttagctggctgatgaatgaagacagaaggtgtgtagaggatcatatgggacctttgtaaagccagactgggcaatgtatagattgcttctgttcactttcctttgatcagatctcaacacaaaatcccaaccttgctgcaaagaatgctgggaaatgtaattttcctttctgttaaggaagaaaaaatggtgagcctctagtgagtcttttttttttttttttttaaagagacaggatcttgttttgtcacccaggctagactggaattacaccattatggctcactgcagcctcaacaccctgggctcaagcagtccccctgcttcagcctcccaagtaactaagactacagatgtgcaccatcatcccccgctaatttttttattttttgtagagacagggtctcctcttacccaggctggcctggagctcctggcctcaagcaatcctcccaccttggcctctcaaagtgctgggattacaggtgtgagccaccatgcctggtccctagctagcttttaaacttggggttatcctgtctctgagtttgttttcttctttgtaaagtgaggaggatgtgtcaaatgctctcgaagggactttccagctctgaccatctaagtcctatgattctatcaaaaccttggctgggccctggaaacacccagcttggaggtggtctctcccagcccaagagggaagaacaagaatcagagttcccccaaggattttctaaccgacacctgcagtgcctgggaaattcattcacttcctcatgttcccaagaatcaggatgacagccacacccctacagagtatagccttaccctaggtcatagtgccggcaccccttcctgggtgtgtgtgtgcgaacactaatgtggccatgacat

SEQ ID NO: 55 - DNA, 1680 bp, Homo sapiens
gcccgcgccgtgactccgcaggtctcctccgggctggggctgagcaagccctcggagtgaccgtgggtgacagcggctccagggactcttggggcgcagtggggaaagtgccggaccaccatgccgcgctcatttctcgtcaaaagcaagaaggctcacagctaccaccagccgcgctccccaggaccagactattccctccgtttagagaatgtaccggcgcctagccgagcagggtgagaagcctcacaagtgccaggtgtgcggcaaggcattcagccagagctccaacctcatcacccacagccgcaaacacacaggcttcaagcccttcggctgcgacctctgtgggaagggtttccagaggaaggtggacctccgaaggcaccgggagacgcagcatgggctcaaatgagcaccctggctggctgcaagcagcagctacacaacactacagagggcagcctccctgcttgccaccactctgctccctgcttgcctccactcccttctgactttccagaccccaggtccagtctgcagatcctaccaggttgctcctccttcgccttacctcctggagctgccagaagaaatgaggtaccttttcaaagtgcagccgagagtgagaaccaagtgactctctaggcttcggacacaaataggctcctctacacctgaagacaaaggcaaagtcaaatggggaccagaataaatcttagaccccacagtccttcccatttccagccctaatctacagacaggaatgcccttcaggtttcttccctcccccctcttgacctaccccagatatttgtgtggaagaggaggaatcaccatttacaaggtggacaaatgctaatatttttatctagaaagaagagtgagtgttaacttttatttttttccttctggggggtctgttgactcctttcttttgggtgctgcctataaatcttggaggaatcatttctcctcctcaaaaactgattcagaaactgacttggggaaggaatttaatactttgaagtcatgagatgcaccatcgaggctacccccaagaagaagcagaagagaagttggtaatgagaggggattagaggtcctcccttcagtagggctgtgaaaacctcatcactggaggtaaaagcacaagcaatgcctgtggacaagatgtcattcattcactcagcaaatgttcatggatcaccggctaccaaggtaccaggcaccatgctaggtattggggaagagagactgaagtcacaacccctgactgctcctcaaaagctaacggttgcacctccaagtggctgggtctgttcttactcttggagggaattctgagaagacagcacagaattgtaaaccttcccttttgacccttttggattttatcaggtgtaaacaaaaagctgaacagttacttcaaagatatgtgtgtatattcagttttttattgttaagctgatattttaaagatttctgagctagcaggcatgtgggaaggaaggctctgtcttcaactctttgaccctccatgtgtaccatagaggggggaaaggtggtattttcactttgatgaggttggtaaatgtttttagatcttctggtaagcattatgtttgttaatacatatttattagagtgatgttttaagttaataaagtattaagagta

SEQ ID NO: 56 - protein, 39 aa, Homo sapiens
MPRSFLVKSKKAHSYHQPRSPGPDYSLRLENVPAPSRAG

SEQ ID NO: 57 - DNA, 63411 bp, Mus musculus
  misc_feature (1)...(63411): n = A,T,C or G
aattcagcttgatcagtgaaaataggacatcccagcaaggagaatctatcctctttccagacctccggacagaaggtctgcccatagatggctgacgaggaggcataaggaggaggcgcagaagctaattcacctcctcctctgcctcgactctgttgtcctgtcctttctgtccacctgataacactgtgtctcctttctttttcctttttctttttaagcccttttcctcttctgacatactttcttgttgctctgtaaggattttctgacctgtcttgactgcctctacacacagtttcaaacagtaacagagtccatatatcagaacaaacaagaccaaaactatcagacctacccacaaagggtcaatgggagaaaaaagcataactacacagcgaggatctattgatcactacactgaggttatcatagttccttaacttgtccccaaaccgggaaccttaacttgtcccaaagccaggaacctttcattaccttgtgcctgcttcctggcaactttatattcccctctattttatccgaggtccttcccaaactcctgggttactttgtgcctacttcctggcaactttatgctcacctctattttatccgaggtccttcccaaactcctggggtcgcaagtttcactcaccgtgaacttaccctgccggcaaccactgactgctgaaagttctgaactcggtgggggagtcggttccccgtacgggccaccaattgttgcgtctgctctcgaccagcaagaacgacgcgaccaccagtccttctaacagcagtttattcagtcctgattcttcttgtttatatctcccccgaaccctgggcctctcactccttttatactctctctcatccacgcaccgcaggccacgccccctcgccagtcacgaggcttcagctaatcagggcagcaggggcaaatctccaccaaattggattcacctgtatcctggtacacctgcgcagcactcaagatgtttgtgtcttatatgaggaagtcaggtgcaagtcatatgacttagctgcagtccctggcgcctttgggactgccgccacaaccgctctccacatttccccttttttagtttggtggcatcgtagatagaacctcaagcctcattcacacctgcattcagtccctgagtgcctgaaagtcacaggatagacaaggtgggcccagaaagagaaacttgatccaggcagctagcctcgggtatctcaagggtctcaggatacaccatagagcaggaaagggtcatggggagggaaggcaggccacaatgccactctcctacggagacttctgatgagagaaccccactggacctagtgtgggtgggattcagcctgcctcacccaccacccaaggggcatcctctcctcagattcccatttactgtgtttcaggttcccaggatgatgccagcaaggaggatgaacctgtagccaccaagatggcggaagcggctgctctctgatcgcttccccttccagcaacgggctcctctcacagttcacatttagaatttttgcacatttgcaactttttactgttacgaatattgtgtttttacgtagttcagatttagatattttggcacgtttgcaactttttaccattatactctgtttctaacgttcactatttaagattgtaaataggtttctcctacattggtacatattgtatagtaaaagaaaattgactctcccgccagtctggagtaagaccttttcctgtaacgtaagcacttctagaagaaacccctaaagaggagttgattttcgacatacttacccacagccactccctcaacccgggccctgtgtcataaccgcccagtgggcacttgtcacctgtctcatgtcgctgttgctctagacactttggtgacaggagtcagtttgtccctccttctggaaggcgtcacggcagcagtatgacccaaggttgtccgtgatcactcagatgtcagcccttcacacctccgagccagcatgctggtatagagtccacactccctgtgccctccctgaggctcgtcagtgcgctgctccgtttccatcgggaaggctctacttccgctctctcccctgttctgttaccatcgtggaagcccggcttattcctttgccctggagtccagggtctcccaagaatacactgtgatccggcagctccagtcagcacccagtgtgtcctagaaacatagattgtcagcaatgactgccacccttaggaaacatgtggaaaaataaaataattattagtgaagttacgttgaaatgtttttactatcagctcttttgtagaaaatcttagtaaacaatttaaagttcagaaaggcacattatttttggttttgtttttttgatttttcgagacagggtttctctgtgtagccctggctgtcctggaactcactctgtagaccaggctggcctcaaactcagaaatccacctgcctctgcctcccaagtgctgggattaaaggcgtgcgccaccaccgcccggctagaaaggcacactcttattggttaagctagggaccctttatggtcagcgaacaagaacaatgacagcacgggctgaggcaactctcactgaggctggactgggggtgactgatttcttatacacatttttgcacccagctttctgatgggatttattaactgcagatgattggatatgcattctgaggatataaaataaatatgactgatttttatgtaaaagtttaaatctgtgattctttttaagattcttccaagattacttttaaagataaataataattactcctgtctttgtaacggccaatgcctgcctgccaagaggagacactggctgaggaagggaagtaccttgcttgctgacacttggttagtctgtaacaagttgcttagttacgaatgtacataaacaatgaacgtgggttcttagaaataatttgttttctttacctgtgctacataatgttatttcttataaaggtgttggggaacacacccctcccatgctgaggttctcagatccccaatttacttcccaaataaaagtgtgaaactaagagtgtgttcggagggagaacatgcatgtagcatgcgctgtctctgtacctttaaactgtatttgagagtgtaagagagttactgtcaatgcgtcaatgcataggattttatttctaacttaaataacgttttccaattaagtcctgctgattacccataaaatgttctggcagtttaagcagaccactgagaacagcaagccacagagattcaaggcaatacctgcgagaatttcctctaggttgttttctcagtacacaggcagagattccagttagcatacttcctagatgtccaatgtgaccatactgggaagaggaaccaaaaacaaccattaatcctctaaccccagagcatcttcaggactgcggcgtggggtttccagttaaaacagttacacagtcctgacctaggcacgtcaagaccattgaccaaccgacccatcattgtcctggctgcagcctgtcctgccagaaaagtcccagtactcagacagcaaggagctggcttctcgggagcgagggcaagttcctactctggctcccgtcaggcctttccactccctagtgttagatttctggagaaattacaactcttcggcatttattgtttcataaatgtctctcttcagaatagctcagcagttcagggtgctaactgctcttacaggggatctggagtcggttccccagcgtgcacgccaggaggcttcacagctgccttaaccccagctgaatgggacacaaagcccccttcagacttctgtaggcaaaatatcagtgtgtacaaattctctctctctctctctctctctctctcacacacacacacacacacacacacacacacacacacttttttgtttgtttttgttttttcgagacggtttctctgtatagccctggctgtcctggaactcactcggtagaccaggctggcctcgaactcagaaatccacctgcttctgcctcccaagtgctgggatcacaggtgtgtacacatttttgtacacatgctgggattaaaggcgtgcgccaccaccaggcagctgaaactcatttcttatagcccccaggcccacttgcccaggggtcacagggcccacagtgagcttccacaggaagtcactaactgagacagcacagtatctctacagacttgcctacaggccactcctaggaggcttttttttttttttaattaagaatctctcttcccagaaatgtctaggtttgagaagctgacaaaagccaactagccacaatatcttccctcagagagacttgtgtaaacgtggctctgactgctctgttcacaacaggacagaaatggaagcagcccagatgtccaccagcagatgaatggatagcaaaatgcacagtacatgtgcacaatagaattttattcagtggtttgaaagaaagagccgggcatggtggtgcatgtctttaatcccagcacttgggaggcagaggcaggcagatttctgagttcaaggccagcctggtctacaaagtgagttctaggacagccagggctacacagagaaaccctgtctcaaaaaaaaaaaagaaagaaagaaagaaagaaagatagaaagggaaaaaggaaaaaaactttcaactgctacatccagcccagtagtgccaagcgcaacaggccctgaaaacctggccgctgtcctgaggtgaaaagttcacagaaactttgtctcctggaatcatggcatcctgtataaagaatgctccaatgtccttgcttttgttggtaaacggatctgtgtgctttcccttaatattgctttattacaagtgctcctaaggattgatattttgacatatagctaagttagattctaggcagtccttgatccaaccttgggcatgaagagctaagtcactgccctacccagaaatttaccattatctaggaagaaggaagtttgtgacctaaagaggaaccagagtagatacttagaactataggtatgagttacacccatacacaaacaaatatttacaatggcctagggggaacgtggactatacaatagactagagtaggaactatgtcaagggcacaaagcccttgcccctggcttctaagattaaatggaccttaggttgagctgtttttgatcccagttgttaactttgagttttaccccagttggttcctgccagttcttctgtgtttgcattcctctgttttgtgaaagaatccagtaacctcttcgtacctttgcggtgtgtcacccaacttccctattttcttctgtataaaaagtttgatgcttggtttgacaaattacattcaaatccacactcccttctgttgagtctatctgccaattcccgctgactccttgcccacctgcaccagagactcgttctctggtgcagagaaccagagggtctgcggcatgcaaggaactggatagaactggaattcattttcttcagcacagtaaccaagactcaagagagcaagtagggtgtcctcgtgttcacgtgtgaatcccagcttctgattatcacatgtgtgcatgtgtacgggagtgtgtagggactgggaagcaagccaggtgcctgtggtgtggaaaaaggtgaaagttgaatggggaacactatgaaaggaacaatatcgtggagactggggccaggtggaggaggaggagaaaggaggggaggggaggagggtgataagaggaaggagaagggaggggggaggaagggaaagaggggagaaagggagaggaggggcaggaggatcaaataaaactaagtatatatatgaacagaccatgaggaaatacatgactgtgtattgatttaaaatttaattaaataaatgggtctagagagctagcttagcagttgtaagaactagctgctcttgcaaaagaccaggtttccatttccagcacccacatgacagctcacaaccatgttacttccaggagatctaatggcctcttctggcctctaccagcactgcacacacaatggggcacgcacgcacacacacacatatctttaaataattaaggaaaaagagaacaaaaagccaagtcaatcctgggaagcgttggcttagtccagccccagctgatcctcagcactcagcagtcagccattgtgactgactccgggagcagacatgtctagctcctgcatctcctccaggtctctctcctgtggcccagattttgctactttgaaggtttttctttaccccaccctttatccccctggttttgaaagatcctgacagaatgtaaaaggtcacagaagccctgaaattggcaagatagatgtcactgttagcagaactagcttcactgatttagaaaaatagaggtgcacaatgctctggccactccttgaacctgtgtgtctgccaatgttttgaccgttccttgaacccatgtgtgtgctcagtgatgaagctcattgccaggtgttggtgatattggttgctgagaaagagtcagaaaatctccccagcaaccacagnnnnnnnnnnnnnnnnnnnnctgttgacatctgcagagaaagacctaagatgctgtggctaaaagaaatcagatggcaaatctaaccgcccaggcatcctaaagagcaatgatcctgacagtctgaagactatcaagttatagacaaattaagactggtaaaagaaaccctgtataaaatagtaaaaactgaaaaaagaaaaactagtcctctcatgagaagacagacctgacatctactgaaaaatagactttactgaaaaaatatgtgtatgaataccttctggtttttgtgaacgttctcaagatagataaaagcttttccttgtaaaaaactgagactactcagatagtcatcaagaagattattaaaaattttccaaggttcggagtgccaaaagcaatactgtcagataatggtcctgcctttgttgcccaggtaagtcagggtgtggccaagtatttagaggtcaaatgaaaattccattgtgtgtacagacctcagagctcaggaaagataaaaaagaataaataaaactctaaagagaccttgacaaaattaatcctagagactggcacagacttacttggtgccccttccccttgccctatttaaaactgagaatactccctcttgattcagttttactctttttgagatcctttatggggctcctgtgcccatcactgtcttaaatgatgtgtttaaacctatgttgttataataatgatctgtatactaagttaaaaggcttacaggtggtgcagaaagaagtctggtcacaactggctacagtgaacgagctgggtaccccaaggacatcttaccagttccagccaaagatctgatctacgtaccttattctgtttctgttcccatgttaaagatagagtaaatgcagtattctccacatagagatatagacttctgaaattctaagattagaattacttacaagaagaagtggggaatgaagaatagaaaattactggcctcttgtgaaaacatgaattttttacctcggagcccaccccctcccatctagagattgtaacactcctaaacttttcaccccaaaactcctcaccctaaagttcgaaccctcccaactaaaaactgttccaagaacatttttgagataaaggcctcctggaacaacctcaaaatgaaccaggtactccttagttacgtaggttccttgataggacatgactccttagttacgtagattcctttggcagaactccctagtgatgtaaacttgtactttccctgcccagttctccccctttgagttttactatataagcctgtaaaaaatttttgctgaccgtcgagactcctctaccctgtgcaaaggtgtatgaatttcgaccccagagctctggtctctgtgctttcatgttgctgctttatttcgaccccagagctctggtctgtgtgctttcatgtcgctgctttattaaatcttgccttctacattttatgtatggtctcagtgtcttcttgggtacgcggctgtcccgggacttgagtgtctgagtgagggtctcccctcgagggtctttcagcaccagacatgaacatggtgcacagacatgcaggcaggcaacctgctcacatttttttttttttttttggcttttcaagacagggtttctctgtgtagccccggctgtcctggaactcactttgtagaccaggctggcctcgaactcagaaatcctcctgcctctgcctcccaagtgctgggattaaaggcgtgcgccaccacgcccggccctcacatttttaaaagagaaataaacctttaaaaaaaattgtaatggaaatcagaaaagggagatgtactcagtgtggcgaccttgttaaggaccaagagatcaagcagacctagacccctccccccaaaggccatctctggggtcctgaggtgagattaaagtctgaataacagacagcatccccttcaagctgtggtcccggttcaccatcgaccccctccttgcctgggcttcgtcttatcctgaaggcactctgacaagatgttagacttgtgtgaaatctgtttttaggagacaagatttccctctggctgcccccctttcctctcccagcatgagatttttggggaaattaccatttctttgggacccatcatttcaattatagtagtctgatgggttaagagacacaaagtatatgtttagactatcttcagtttccaccagactacttacaacgtcatctgacacctgaggcatggcacccgggacccacaagcacaggactccttcctcaatgtttctggggctctgtttcaactcagtgaccccttgttgacatggtctccttgaccccaatggccatccacctttacacaggtggacaggagagttaacacgttacttggttattttgtaagcaagcttactagtaaatccttactagcatctgtgtcaagcaagcacctcaaacctcaatccaagcttccttcttctgagaagagagaatctcaactgagaaaatacttccataaaactggcctttagccgggcagtggtggcgcacacctttgatcccagcacttgggaggcagaggcaggcagatttctaagttcgaggccagcctggtctacagagtgagttccaggacagccagggctacatagagaaaccctgtctcgggaaaaacaaaacaaaacaaaacaaaacaaaaactggcctttaggcaagcctgtgaggcatttgctaaattagtgattgatgggggagggtcccgcccccttcccccccccccccccccgtccattctgggtcatgccaaccctgggggggcagtcctggggtgtatgaaaaagcagactgagcaagccataaggagcaaaccaataagcagcacacactcatccaccgcctctgttcttgacttgagttcctgccctgacttccctgcatggtaggcaatctcgaagatgcaacaaaaaaaacctttcctccgctgggcggtggtggcgcacgcctttgatcccagcacttgagaggcagaggcaggtggatttctgagttccaggccagcctgatctagagagtgagttccaggacagccagggttacacagagaaaccctgtctcaaaaaacaaaaacaaaaccaaaccaaaccaaacaaacaaacaaaattcttccccaggacatggtatttatagcagagataggaaccctaaccaagacaggatatatagatgtgtttcctgggtagtgtgatatgaaagttactatttgtggtgactgtggcaaaagttgccttttaggcatgaaaaaaaaaaaaaagcttagtcaggaacctaatcctacacccaaggctgcacctgataaccagaacacgtcactcactgaagataactagacagaaaacttcgtgagactacctcacgctgtccattgaccaggagcaatcctttgtgcctcacatctttgggactgcggtaggcatcagagaaatgtcacctcgatgggccctgcagctggagagtctgaccctggatatggccttcagctaagacacctgcacagatgatgagcagcctcggggagactagctgaggtcggtagttaggaatgtggagtgtggatgttgtgaccctcagcataagcaggaataacctagcctaaccctatcgctcgagacgccactagtaacggagacactatgcgtgattaagaatgaaataaatgcatttgccactgccagatcaccaggcagatgagattatgtggccaaatcgctgccactgaaactgctgaatcttactctgttgtggtaaacaacatcctgtgctcacaacagagccggtggggagactgcatccttaactcctgttcccttctgccttgaagaaggtaaactggatctccctgcagtttcactttcaattcttgtcaaagcttggtttctgtttccagtttctccaaggagggaggggcagagcgcttttcttctttccatgcaactctccatcccattgtctcctccagagaacgctgcaggaagcttctcccatcagagctgagcagaagctcagaggatttatctagaggacaggctggcccagctgaaatggacccgttccccgacctgtatgcgacccctggggacagtctagaccacttcctggaacacagccttcagccccagagggactggaaagaggaagggcaggatgcctgggagagaatcgagaggttctttcgggaacagtgcttccgtgatgagctgctcctggaccaagaagtcagggtgattaaggtggtgaaggtaagcacacagggttctgagtttaaagctcacctctgccctgtggggcttgtgaacttgagaggtgggccatttcaccccctctgagtctgtgtcctcttcttaagatgggtttagtagaagcagtaaatgggataaagcatagaaaatttctgtgcatttaaaattagccttgcaatgctgaaggacagaggtggtaatgataatttgggattctggttcctgaatggaccatagtcaccggtttccataaaatgtgtgcctttgcttcctgtctaagaaataatacttggccaggcgtgtgtggtcctgcatgcttttaatcccatcactcaagaggtagaggcaggcagatttctgagttcgaggccagcctgatatagagtgagttccagggcagccagggctgcatagagaaaccctgtctggagaaagggaagggaagggaaaaagggaaaggaggaaaagggaaagggggaaaggataggaaagaaaaaaaaaaagactactactttacttctgagtgaaggaaacctattgttctctaagttagtagtattggtcatgttagaaattacctagcaagactacttggtaaaccattgggattctaagggctgcctgtgtaagtaattctacggctagctgtttctcccagaaaaacacaaacttacagcccaccccctccaatcaagaccatttggatcagagctctgggtgttgtttattctgctaaaatgaatgacaacttaagtggtttttttttttttgttttttttgtttttgtttttcgagacagggtttctctgtatagtcttggctgtcctggaactcactttgtagaccaggctggcctcgaactcagaaatccgcctgtctctgcctcccaagtgctgggattaaaggcatgcgccaccaccacccggcatgacaacttaagttaacttgagtaagtcaactttacctgggaactctgagccatggtagcagaggttaagacgggagagaaagagcttttgatgaagaaaaatctcaacaaaccttcaaaaccagagatcagggagggttcttagccaaaaagctttgaagacagaaatggaaactcccacagctgctgcaaaaggatacatcgtatcccatttgtgttctggttcctgcaaatttctgcctgacctaggtcgattgcttgtagcagcctcttggcttctgggacttgaaagaaacaaacaacaaaaaaaggaagtccagagctgggtgtggtagcgttcacctgtaaccccagcagtcgggaggttgaggcaggaggattaccagtttaagactgttaaacctgttcttatagcaagttccaggccagccgtgactgcatcagtgaggcactgtcgaggggtcaagaggaggagctgaggtttagactctctcatcttctttggttttacctttttttttttttaaactagcagaaaaaggattttgtttcattatagcatttttcaagtagcaatttgttttgggctagggatgtagttctgaggttggtatgttttgtgcctagaatggtggctacctgtaacttaactccagaggcgctcccttccacctctcttctggcttctgaggatagacaccaggcacacctatggtgtatgtgtacatgccgacaaagcagccatacacataaagtgttgcccttgttgagatttcagaacatttgggtctctcagttttggatcagggatgctcagcccataacgcccacagcacaggtctctcttaaaggactgtacagagaacttaccatgaatgggtctggcttaactctcaacttcaaagcatcaaatctcaggagaggtaaatctgccattgtcaccttccacagggaggctcctcgggaaaggggacaacgctgaaccacagatctgaccaagacatgattctgttcttaagctgcttttccagtttcgaagagcaggcgagaaaccgggaggtcgtcatcagcttcattaagaagaggctgattcattgtagcagaagcctggcctacaacatcattgtccttacccacagagagggcaaaagggcccctcgctccctcaccctaaaggttcagtcccggaagactgatgacattatttggatggatatcctcccagcttacgatgctttgggtaaatccagtggaagtttcagtttaaagaaagaattctggggtcttcctctagcaagattcctctggaagattgctttgtagatagataggtgggactgaaatcatactgtgaagatggatagacttccataataaataaatatccttgcatgggttcccatgtcccagtgttacatggggaggaaggatttatcataaagaatgaattcctacccaccctctggaaaacaccaggttaggcaaacattccaaggtctttagggtccaacagaactgtattagaccctttaaaacaaggctctcaagctgggtggtgatggagcaagcctttattcccagcacttggaaagcagaggcaggtggatctttgtgagtttgagaccagcctggtctacagagcaagttccaggacagtcagggctacacagagaaaccctgtctcaaaaagtaagtaagtaaatgaaataaataagcaaacaaataaataacaagactctcgtattttacaacttgtattcctcttgggcccacaccttagcatgctcaaaatcgagcatactaacttactacatgggataatgttgagtcatcagaactgatatttgctcacatttgagataccagacggcgattgcctgtgcttgcctttaagtttacctccttaatggagccgatctgaggatttcatgagcctgaaggtctacctgaccatcccggcctctattaatttagctttgaggtgggggagggggcgaggtaaggaaggcatagaaaacaatgactgtgatcccagctctcaggaagccaaggcaggcagaccacaagcctaatgacagcccaggatccatcacagagagaccctgtcaacgaagaagaggggctgatgagatggctcagcggttaagagcactgactgctcttccaaaggtcctaagttcaattcctagcaaccacatggtggctcacaaccatctgtaatgagatctgacgccctcttctggtgtgtctgaagacaactacagtgtactcacacannnnnnnnnnnnnnnnnnnntcttttctatgatttaagcctgggaccctaatcgcctttcttcaaggatatgcaccaactgtacctggttatctaggagagtgctagccttggcaccactgaagctgagcgttctgaggggcaatgtagaggcaagccccagacacaagccttgcagcgcttgctgtgggagaagcctagggaaagggggtgggggggacttctgcaggagagtgcagaagcaagccgcctgtgcacctcagggccatgtatttaggtatcaaagcccagtttctatctataaacacccaggcctcagttcattcatcggtaagatgggcagacaatctgccctgttctatagtcacctcagagacagagtctaagaatttacctctagcctggatctagagtaatattttctcatttggtggatcatcgtcactgttttagtcagggtctctattcctgcacaaatatcatgaccaagaagcaagttggggaggaaagggtttattcggcttacacttccatactgctgtttatcaccaaggaagtcaggactggaactcaagcaggtcaggaagcaggagctgatgcagacgccatggagggatgttttttactggcttgcttcccctggctttctcagcctgctctcttatggaaccaagactaccagcccagagatggtcccacccacaaggggcctttcccccttgatcactaattgagaaaatgccttacagttggacctcatggaggcatttcctcaactgaagctcctttctctgtgataaccccagctgtgtcaagttgacacaaaactagccagtacaatcgcttactatttaaatagtaagtgtaatatgttttttaaaaattaagtgagtcttctacaactcactgcagacagtaagtccactgcacagccttgccccataggccaccaccatcttggatctgaatgcaaatccaatgtttggattcaagaattggactgagaggtttcccgaggaagctgtttccctaacttgctaaacccacagaaatcctgtcccttggacatggcccatttcttattttcttcgggaaaagttgtgatttgtcctcaaaagtggccccacagcaaatgaaacaaggtagacagatagagtctgaaagggacctgccatctggccatcaagtgccaatagctgagaatgccccccccgccccccccaaaaaaaaaaaacaaaaaacaaaaaacaaagggctcttgggaagcaaggaaaaatgaaataaaaaaaaaaaaaactacttatgtactcttgtctcagttagggtttctactgnnnnnnnnnnnnnnnnnnnnacctatttccagagactcaaaaccagcaccggcaatctacgagactctgataagaagtaagggctaccctggtgacttctcaccaagcttcacagagttacagagacattttgtgaaaactcgcccagttaaactgaagaaccttcctccggttggtgaagttctggtacctgcaggtaagagctgggaggaggcggagcagagggtacgcacgcatctgtagcccaagcttctcttagaaattggggctggaggtgtggcttgttggcaaggtacttgcttgggatgcgtaaggtcctgggttcaatcctccgcaacagcaagagagatcgagtggggatacaagaagtgggtgagaggcaggataaacagtgagtgacctgcagggccctggaccatctaagaacccagcatccctgtcggtgagagcgtctgcatcttgtgacacctgcttgcagtgaaaccttcccccaagtgcgattaagtgctcactcagatgaggacaggctgccttcaacaagcctcagatgtgtggcattttgataacaataataaagccaccattgtgtcagactaattgggtcccatgatctaggctatacatgccaagggaccccgttttgccttccttcctgtttctttactttttttaattggttattttatttacatttcaaatgttatccccctttcccagtttcccctctggaaaccccctatcccaccccctccctccttctgctgtttctaatggcatgtatccccgccctcaccctggaggtgagaaaactgagctgagatttgaacacgagtccctgactctagaatctgtgctcgtaagcagtcccaggaaatgttcttcagtttagcatttctttcttgctatctgactaattgcaaagaactcattaaaaaaaaaaaaagtcgaaaaatgcttaaggaagaaggagagatttgcacacggtccccagataaacctgcgacagtactttggcttttctttcatgttttaccgtcatctgtattcccgcagcccatacctggatgttagataactggagttaccatgccaactcaccgcagttttggtccaccctttaaacacacacacgagctgttgtccttgagtcgatggtgagagctccgtccattcatgttgtccacacactttactttgtgtcttccagtgaactgtaagacctcccaggctacaggtatttacctcccttcccatcagggctacaaacattttcatccagccaccagccacgtactggctttaaccaggccagctctgaaaacagtaggctggagagaaggctcaacagttaagagcacccacccttgcaccagacccactttgggcagctcatagccactgtcactccagctccaagggatccagcaccctcttctggcctctacttgcattgcatgcacatagacacagacacataatttaagaacagtgatttctttctttttttctttttttgcaaattatgtgtatagtgtgtatgtatatgtatgtatctgtgtgtatctgtgtctgtgtgtaggtctcaggatggttgtctttctcaatctcctccatatatactaggacaaagtctttcagttgaccttagaccctagacttgtctgcatggctgtctaactagctagctttctctggagagcccctgattctgcctccaaagtactagaattataggcaggcatgatacccatatcattatgagacttctaaggctctttttcccacctccctggctcatatttctgtacatgaatatttctgtcattctctaatagattttacttatctggaccccccctctctcccatagaaaaatatatgtggttatttaaatattgcaatggacccataataaaaacttcaaatagcataaaaatgtataaaaatgaaggtaaacatctttgtgtgtatgcatgtgtgcatatcagtgtgaaaatagtgcatatcagtgtgaaaatagtgcatatcagtgtgaaaagctgcatccacactcataaggggaactccgattggactcagtgtgtgtgtacatgttcacatgtgtgtgcatgtgcatgcgtttatgcaggcgtgtgcttgtgtgtgtgcatgtgtgtgaggggtaaatttgcagccacctaatttttcttatatgtttaatatatacttaattccatttttaacttcttgtatatgacgtgactttggcaacacctttatttcctttcaaataactaacaagttgtccatcacatcttgaactatgcatcctttctcgctgaactaaaatattacatttgctaaaactattaaagccacaaatctaatgagaactaattctaaacagtctacgctgttatacttggcttcctttgtaagtcctgagggattgaacccaggaccttatgcaagctcgataagtaccaggctgttaagccacatccccaactcgtgactcttgtttattcttatgccagaaactgcttcttccaagtagaaggtgaggattcacttccaaagttggcctgtgacatccacatgtgcacaccctcctctctctctctctctctttctctctctctctctctctctctctctctctcacacacacacacacacacacacacacacacatcactgggagccatgtatggttgacatacctgtattcccaacacctggagggctgaggctgaaaaactgcaagtttcagcctagcctgggctacacaacaagattccatctaaaaaataaaactcatcaggattttaactagcatctactactgctgtttcgcccagtggacacggtgtcaaactgtcatctagattctcacattcaactcacaggttagtgtgtacctctgttcttggcagagaagcactccttccccctgcccccctccccagtgcacaggatgtcacagacagcagagtactgggcaaacattgtgggaaaggaggtaagaggagcctaagaaccagcaatgggaaggatggctacaaaatagcatcttatgggcatgtcggtctcactgccaaggtgcccacagcagcatctggctgcaggagacctgtgcaagattaagctagttagtgttctagcatccatagggaaagcagagagctactggccatcagtggctgctgggagagggattttcctcagagatgtggttcccgacctgtgcctactctggaggatggccctacacccatgcacacaaggagagctccaactgaactccaagggacataaagagaaggaaaagaggactggagaaagatgggggcatgaggaggaagggtggagggacgtggctatgatcaaaatacactctatactagtatagaatttcaaatataccgcattgcctcctccattctaactggaaactgtagattgattgatactcggacggtccgcaaggaaacccccgtgccatcagcccatgtagacctaccatgtcctggctgtgtcacataaagtaacaagggaacctgaaaattcctagagcatcaatcacatgaaattcttattcactctctccctctccctctctctctctctacccccccccccccagtgcctgagacgtaaatatggaagaggtgcagtgttgccctcaaaatatgctctggagctgctgaccatctacgcctgggagatgggtacagagagcagtgatagcttcaatctggatgaagggttcgtagccgtgatggagctcctcgtaaactaccgcgacatctgcatctactggaccaagtactacaatttccaaaacgaggtcgtcaggaactttctgaagaaacagctgaagggagaccggtgagtctatcaaccacgtgacttacggctctgaggcctagaaaccctgactggagtggcttggggaaaataaagggtttcacgtactcgaaaacattcaggggtcaccaagtcaccaagtatggcctccacatcaccaaggtcttgtaagaccccaactcaatgtgtttcttagacccctagaaacgaaacccagcatggagttctttgttctttcgccttcagcctgagagaacgatgaccactgggtgacccacccaggcgcctgacccatagtgtaagggaacaagaatgtttgccaaagatagcctgtaacctttccgtgggagatgagctgtaattcactatccccattcttacgatgtttactcagcttccccattctttgtggtcttatcctcccctcactttgtggtttattctttaaaaaccctcgactgcaactgctgggggtcgatctcctctgcccctgtgtgggttatgagctcggcctcagcatgctgattcccgaataaacctcatgcgatattgcatcaagaacagtttctctcgagttattgggatgttggctcatcccgggacttgagcgaggttctccccgaaacgggggtctttcagtctctgtctgtgagtggttcaacccttccctacccagggtcttccagtcaagttccgatttatcgcttcaaggttgcaatggttctagctttctcctctagacacctagttgccagtataagattgcttatgtctagtaaactctcagagattcattttctggagcttgctgaggttatatctccaatatctccaatcctccccctctcccaccccctttccgttcaccctcttgctacagctccacttgctccggcccgcttgctccagggccctctatctccaatcctaatggaagggctttgcttgcaggggttgcttctactgggccatctgaagaatgctctctgttggccccaccttcagttttaaatgagggagttaattatggagtatactgcaagcagaaataaaggaaaagtaacacgcatcaagagagagactttgcccttagcaaaataatgtcatcaaatccagcagagacaattgagtagcctcagcaggagagagtcagcttccaccccacctactcatggcgctcacaacatcctgcagaggtcaactggggaagctgaggcagtcagctggagttcccactttttctccaaggatgtagctcccctaccctccgagtctgtacttccagctttctgttcccactgtagcatggggtaacaaaattgcccctccccgctctttggggaggggagagggggaaatgacaaggatggtaaccatggtgacaacactggcagacacaagacagccttgcaagaaaagtttgagatccacgtttggctctgaaacagtggaggctgcagaggcccgcctccagagacagctttttagtgatcttaaacatcccgtgacaatttgcccttataatgcgttttatggttccacagagacgagggcccagaggccagtatcctgactgtaaccgagatctgccattttctcccccccaggcccatcatcctagacccagctgaccccaccaacaacctgggaagaagaaagggatgggaacaggtggctgcagaagctgctttctgcctgctgcaggtctgttgcacgactgtaggccccagcgagcgctggaatgtacaggtactatgcatactatctcctggtgagaactcacgctaacactcatttagatcacgctcttcccaaggcatcccagcaagggctgttatgccttgattcctcaggaaaccggaagagctnnnnnnnnnnnnnnnnnnnncccacccccacccccccagcttagcacttatatacagagcagttagaacatctttgaatgcttagggtgaaggggaggtaattcagacacgataccatttggtggggcgggactgccaggctgggagggggattaaagattgtcttttgtggggctatcaggaactagttttatggcgggcaataactgtgtgtgacctctgattacttcttttctatgatttaagcatgggacccgaatctcctttcttcaaggataggcaccaactgtacctggttatctaggagagtgctagccttggcaccactgaagctgagcttctgaggggcaatgtagaggcaagccccagacacaagccttgcagcgcttgctgtgggagaagcctagggaaaggggtggggggacttctgcaggagagtgcagaagcaagcagcctgtgcacctcagggccgtgtatttaggtatcaaagcccagtttctatctataaacacccaggcctcagttcattcatcggtaagatgggcagacaatctgccctggtctatagtcacctcagagacagagtctaataatttacctctagcttggatctagagtaatattttctcatttggtggatcatcgtcactgttttagtcagggtctctattcctgcacaaatatcatgaccaagaagcaagttggggaggaaagggtttattgggcttacacttccatgctgctgttcatcaccaaggaagtcaggactggaactcaagcaggtcaggaagcaggagctgatgcagaggtcatggagggatgttctttactggcttgcttcccctggctttctcagcctgctctcttatggaaccaagactaccagcccagaaatggtcccacccacaaggggcctttcccccttgattactaattgagaaaatgccttacagttggacctcatggaggcatctccccaactgaagctcctttctctgtgataaccccagctgtgtcaagttgacacaaaactagccagtacaatcgcttactatttaaatagtaagtgtaatatgttttttaaaaattaagtgagtcttctacagctcactgcagacagtaagtccactgtacagccttgccccataggccaccaccatcttggatctgaatgcaaatccaatgtttggattcaagaattggactgagaggtttcccgaggaagctgtttccctaacttgctaaacccacagaaatcctgtcccttggcccatttcttattttcttcgggaaaagttgtgatttgtcctcaaaagtggccccacagcaaatgaaacaaggtagacagatagagtctgaaagggacctgccatctggccatcaagtgccaatagctgagaatgccccccccccccaaaaaaaaaaaaacaaaaacaaaaaacaaaaaacaaaggaccctttgggaagcaaggaaaaatgaaaaaaaaaaaaaaaactacttatgtctcttgtctcagttagggtttctactgctgtgaacagacaccatgactacagagcagctcttaaaaaggaaaacactggggctggcttacagggtctgagaatcattccattatcgtcaggcgggaagcatggcagtgtgcaggcagacatggtgctggagaaggggctgagagtccttgatccgcaggcagcaggcagagacctggctggagcttctgagacctcaaagcccacctccataaagatacatttcttccagcaaggccacactcactcccggaagccacacccactctagcaaggccacacctcctgctagagccattccctacggtgcggggatggggagcgatttttattcaaaccaccagtctctctccatctcagaccccagtttctcagaaattccattttccagagaccagctctcagcctcttacctccctctgtgaatagcgcctccgctgagcgtgtgtggtccctctgcgtgttctcacttcacttaagttattgttcagtgggttattctgttactaaattatcttaacagacaattccctagtcgcaaaaacagatccagaagggaccacggtggagtacaagtcagagcacttctgagcatcacctgggggtgaggttgattatagcagctcaaaggaccagtgccaggattgtgctcaacaaatatgaggaaaaaaaaaaaacatttctgttacttttctgtgtggtagaaaactatttaaaccccgggccatagactatttatgttccttgttattctttactttattatattttttaaaagatttatttagccgggcggtggtggggcacgcctttaatcccagcacttgggaggcagaggcaggcggatttctgagttcaaggacagcctggtctacagagtgagttccaggacagccagggctatacagagaaaccctgtctcgaaaaacaaaacaaaacaaaacaaaacaaaaaagatttatttattatatgtaagtaaactatagatgccttcagacataccagaagagggcgtcagatcttcctatggctggttgtgagccaccatgtggttgctgggatttgaactcaggaccttcagaagagcagtcagtgttcttaagcactgagccatcttaccagatcagatattttctttatttacatttcaaatgtaattaaaccttccctggtttaccctctgaaaacctgctatcccatcctccctcctctgctgctatgagggtgttcccttcacccacccacccactcctgcctcccggccccggccccggcattcccctatttttttggttttcgttttcgttttggttttggttttggtttatttaattttttttttaattttttgttttttttttttaagacagggtttctttgcatagtcctggaactcactctgtagaccaggctggcctcaatcccaaaacctgtacctgccagccccccccccccccacacacacacacactgatatactaggatcctcctgtaagtcctgtaagtgctcggctgagggacgtctcatttaacctaccaggagaccattccagatccaagccatcttttcagcaaatatgtcagaattctgtgacgtgacatattttaatgtctagaacctaaccctgaagcagaatttttaggacacatccagacttttggcataacagtgatcgcccttgaacaaccctcctaaagccagacacaactattaaatgacatcactgtaatccccaggctcccataaggacaacgctgttgtgtacccgtgatgggtgacgattctgagtaattccacaggggaagagtatcatttagaatccatttgttgggctggagagatggctcagcagttaagagcactgactgttcttccaaatgtcccgagttcaattcccagcaacatgatggctcacaaccatctgtaatgggatctgatgccctcttctggtgcatctgaagacagcaatattatatatctatataatatatatctgtacacagatatagtgtacatagataaataaatctttaggctggagagagcagggctgaccagagcgagcaaccttcattctcagcaaccacatgatggctcacaaccatcagtacagccacagtggactcatatacataaaatttataaaatgttcgaggaacatggcgtgagttagtggtactctgagcctagggtagccaagcagctcacctgttgtctcacgccattgttcgttatgtctcccaggttgtcttggtagatgataaactatatcaggagctagaagaaagcagctttgtagacaatagacagttctttccatacacttgccctttctcttctctcccttgcagcgagcgagggatgttcaggtgagagtgaaacaaacgggaacagtggattggacactctggacaaacccctacagccccatcagaaagatgaaggcagagatcaggagggaaaagaactttggaggggaactgcgcatctccttccaggagcccggaggggagagacagctgctcagcagcaggaagaccctagcagattatgggatattctctaaggtgaacattcaagtgctggagacctttcctcctgagatcctggtctttgtgaagtatcctggtggccagagcaagcctttcaccatcgaccctgatgataccatcttagatctgaaagagaagatagaagatgctggaggcccttgtgcggaggatcaggtactactgttggatgatgaggagttggaagatgatgagagccttaaagagcttgagatcaaagactgcgacaccatcatactcattagggtaatcgactagtctggctgcttgagtccgtgcctagagtcttacgcctccctacctcatccctagactctgatgggttctttctatagcttaaatatcaacattcccttctcttgcttaaaaccctctcctatagccgggcagtggtggtgcatgcctttatctcagcacttagagaatttctgagttcaaggccagcctggtctatagagtgagttacagaacagccagagctatacggagaaaccctgtctcagataaacaaacaaacaaacaaacaaaccctctcctgtgttttccaataatacagaatgaagttcaagtttcttttcctaacagtcaattaagctgaaccctgcttagtccccgacccccaactctaaacactcaactcatactgaatgcagagtgacaccttgagtcacactgagagctgagtcacacctgtgtctcttttcctcaaacatcctttccctcagcctctgttttcatcattctgtgagtcaccgaatctcaaagagcagaccccagactgtcagattccccacctctccagaaacctcttagaatggaaaactaacccaagccagacatttcaccgagactcagcggtcctggacttaacaagcctttcacatcattctgcatgctcctgtttgaaaacaactactatctggcccatgcagcaggccaaatcatcttgtgttcccgccctctcccttcatccatgttagactcccgtggacgtaaatctatctcccttgtctaatcagactcgattgtttttaatgatttaggccttgtgctctagaatggtaccaatccagtatcaatgtatgacaagtgcttgttaaataaagaagcgaaccagagaatggctttggatcctccgatattgtcttgatcaggtctgaggccattttagagtccacctactttcaggtgcccctaacccacatattattctctggagatgcccccaagtcagctctaccaacctcatgctggcgcgtagtcatggcctcctgtctaaacctacttggtgaaaggtgataaggatagatcctatccaatggctacagttagccaatcacagatttcagtcttggaacgtggggccccggtacagtaaacttctggtatagtcaggattgaaagaagctaaatagctgtatttgtcagggctctctacagtcgcaggacttaaggaatgactctcaatattgagggaatctattgtgacgacttagagtttgtagtccaactaacccaacaacggtcagctctgaataggaaggtcaagaatctagtagttgctcagtcccacgaggctgggtgtttcagctggtcttctgttgcagtaggttccaacagatgtgctggctagtaagtgcaagcaggtgaagaagaccgaatcttcctttgtccaatgtccttatggggacctctagcagaaggtgtggcccagattaaaggtgtgtatcacgatgcttggatctggaacttgctttggtccaggctaaacttgaactcagagatctccttacctcagtctcctgggattaaaggccttgcctgggcctaagcttttcatggccactatgcctcaagacctccatgccaagatccaggtcagaaacttgtgtcttccagcctcaagacctggatcacaggtgagccctccaattctggattgtagttcatcccagatatagtcaagctgacacccaggaatagccattacaacaggcaagagtagatccaccccagcccctcattaaatacagaaatcagtttacgtatcggccccttcatacatgcagaatcccatgcatttctgtgaatgatataccaaaaaaatctcacagacgatgccatctggctattttcacagatgccttggagttggacggacttgtagaaataacaacccttccacttttacagctaggaaaaaaaaaaaaaaaagcttaaaacacattagctggggaggggcgggggctggagagatggctcagtggttaagagcactgactgttcttccagaggtcctttgttcaattcctagcaatgacatggtgactcacaaccatctgtaatgggatctgatgccctcttctggtgtgcctgaagacacctcaacagtgtgctcacatacatagaataaataaatacatcttttaaaaaaagaatatattagccaggcagtggtagtgaacacctttaatcccagcttgggaggcagaatcaggcagatctctctgaggtcagcctggtctacagagtgagttccaggacagccagagctacacagagaaaccctgtcttgaatataggaaactatgttcagagggagagaaggaaggaagggccttggtcaatgtccaggctctcctgtgactcctggaaggaatctttttctcttcgtctctggccttcccacagtgggcacgtgccaggaagtctgacctcatcctgatggaaatcttgctgataccaatgatcttagccgattccctgggaagatcacctgacccaatacctaggccaagccaatcaaactatgaatgctaaggactggtgactaggccaagccaatcaaaccatgaatgctaaagactggtgactagtatttcctgagcctttcctgtgtcctaggagcagcacagaccacatgccgtttatgtgactccaataacaggcttcaattggtgactgttgccctatttgttaggaaccaggcacgctctcttctccagcctaccttcagtatcagcagccacatcaccagccaccaaannnnnnnnnnnnnnnnnnnncttccccctgagggaccagacacacacgggtatagtatagaatagaatttatctagggaatggggaggggagttaagagggtagtagaggcagagaaaggcagagagagggagagtagataagtggaggccagccatgaccacatggagagaggggggaagggaatgaagagagacaagggggcaagaggcaagtgtgtaagagagagaggaggggccaagcctaccaggctgttgccaggaactgtgggggtggagtttagacagaataccaacacctgttgtacatctgtttagagatggcagccattaccgcctcctcatgatgctgtgctacaggatgtcagctctcccttccccgtcccagtgctgcctgccacagtcaccaccatcgtgtgaacgtgagctctcctctcagaacgaaggcttgaagaggtgactcagagactgagagcctacactgctctcgcagggagcccatgtttgagtcctagcacccacacttggcagttcccagctgcctgcgactccaactccagggaacccaacagtaaccttttctagcttctgagaatgcatacacacacacacacacacacacacacacacaatacacacagcacaaacgtacaaacacacacataaacatatacatacatagcacacacatatatatacacacaaacacacataaacagacacacacggcatacacaaacacataaacatacatgtacacacatacatatatagaaacacacacgaacacatatatacacatacacggtacacacctacatacaagcacagcacatatatacccatacatggcacacaaaacatacacacagggcacacacacatacatacaagcacagcacatacatacacacacatacacacagatgcgcacacacaaaaaaaacctatatacatcacagacaattaaaaataaaaatcaggccaggcagtggtggcacacgccttgaatcccagcacttgggaggcagaggcaggcagatttctgagttcgaggccagcctggtctacagagtgagttccaggacagccagggctactcagagaagccctgtctcaaaaaacaaaaaaagaacaaaaacaaacaaacaaaaattcagtgactctaacagcaagcagttgtcactaattgcttttctttctgctctgagttccccttccatgtcctagacctggcatggatggaacgttaaagagctgtgtccttgccgacctggctgatctccctacatgtacttctgtgctggagccaaaggacaaaagcagagaaaagatgagacagcagtttctgtttctcgccatcgcttttctacctctctctccttcctagtaacgcaactttaaggtagacacattgtgaaaggctaaaaactacacttccctgtctcccttgccctgagtgtgaccatgtgattaagttctggcagtggagatcatttgcatcttatgcataaatttgcattgtctttatatttgtttgttgtgcccataattcctagaagaggaatctctcctgttttgtttgttgaatttggttctttttttagcagggagggagagtgtgttttgtgtgtgtgtgtgtgtatgtatgatgtgcgtgtgtgcgtgtgtgtgtgtgtgtgtgtgtgtgtgtgtgtgtgtgtgtgtgtgatgtgtgtttgtgtatggtatatgtgtatgtatgatgggtatgtgtatgagggtatgcatatgtgtgtatgtgtgagggtatgtatatgtgtgtgtgtgatgtgtatatgatgtatgtttgtgtgtatgatgtgtgtgtgtttgtgtatggtgtgtgtatatgatgtgtatgtgtgcgagggtatgcatatatgtatggtatgtgtgtgtgagtgtgtgtgtgtgtgtgtgcatatgtgtttgtgcacctctggaactccatgacttgaagcgccagcccttacctttccactttgtttggaagacaggattcctcaccaccacacaggccaggctgactgggctgtgggcctctggagagtgtcccatctccacgtccctctgtgggtgtgtcacactctgggattacagagcttgtgctactacactcctcttgaatgtgttctagggacctgaactcagggcaccgggcaacacttccatccactgaaccatcctcagagtcccgcctcctgcttcacccacaaaaccttctgcaaacttctctggcattagagtggagatcggagctcgaatgagcctggtgccatgaagggaagccagggactttgatctagattaaagaaggaaatgctacagtttcaagaaggaagcagcttgaacaatgagccctccatttcctctgtaccctgggcttacttccctttctccccagccagggccccaccccctcaggacacctccagtttgctgatcacctgtgcccactgtccatttgttcctttaagactctctagcggtggggctggagagatggctcagtggttaagagcactgagttcaaatcccagcaaccacatggtggctcacaaccatctgtaatgggatctgatgccctcttttgctgtgtctgaaggcagctacagtgtactcacatacatcaaataaataaaatcgtaaaaaaaaaaaaaaaaagaatttctatcagccaaagttccctaaaggatcagaacaacaaacagaccacacagatattaaaggaggatttattagattggcttagggtgtggtccaggtagttcagccatggctgcctcacactggagaggccaagaatctgagtttcctcagacttccacaagtccaccaagttccgagcatgctccacttcttcactctcaggatcgctggagcgtcggagagaagagccatcattcagggtccactccaatgccagccttgggccacaaagctggctctctcagctgcctctgtctgtcagctgctggtcatcagcctatgctagaatcccaaagaagttagctctagggctggagagatggctcagcggttaagaacattgactgctcttctgaaggtcctgagttcaagtcccagcaaccacatggtggcttacaaccatcaatacagctacagtttactcatatacataaaataaataaataaatcttcttttaaaaacaaaaaaggaagaagaagaagttggttctaatatcagtgaaaagtgccacaccgacagacttcctagagcaagggcaagcgggcagaatgcagatttcttctctctgggctgatgccagaacaagccacttatgttttgggtgggtcatcgttcctactcaaatgacttgattttaaagaaaactctttacaagaatgcccaatggcttgccttttagtcgactctagagctagccacgttgacaaccaagcttatccatcttagggtcctcagggctacaagagacagaaccctaaatggatatagtttgagcaaaaccaagttaagaccaggtgacggctcatatctgtaaccccagagctcagtagtctgaagcaggagaattaccgtgagtttcagaattgccagggctacatacataggtagtttgaggccagcctaggctagagagtaagacaacttatcttaaaaacaaaaacaaggcaggaggggggtatgggtggtatgggggtggtgctgagccaaggtggcactcacctttgatcccagcactctggaggcagaggcaggcagatctctggtttccaggccaggctggtcctgtgaatgagttccagggcagccagggctacacagagaaaccctagcttgaaaaaacaaagggctggagaaatggctcagcggttaagagcactaactgttcttccagaggtcctgagttcaattcccagcaaccacataaccatctgtaatgggatccaatgccctcttctggcatggctgaagacagcgacagtgtagtcatataaataaataattcttaagaaaaaccaaacataaagtagttaatcctgggctgttagccaggattctccagagaaacaggactaatggaaaggagatgggcaggaaagaggactgttttgagaactagctcatatgatcacatgatcataggattatgtaggctgcatgctaaagacccagggaaagtattagtatgatttagtcaggagaacccgaggtgtaagtactgagagctaaggactcaaaactgtggggcagagtggaaaatgactgcgtcagcaccaaaggagacaacattcaccagtaactctacccctttcttctacctgggcttctgacaagtcaattaattacactcactggcaagggacaatctttctcaaaaccatcctttcagacatgcgcagaaataacatttaggattgaggagatggctcaatgggtgaagcacttgctgggaaggcctgacagcgagttttggtccccacagtatgtgtaaaagctggacacactagtaagtgtcaccatcccagcgcttctgtgaggaggtggcagctccaagccagttagctccacatacacagaagtgcacacaaaagagacactgtcatggggtatccaccaaagaagactccttggacacaggtttaagccaataaagtccttattacttggccagagtccacactgggtattcaggaccccagtatagcccagagcctttttcagggtgagtcttaagcacaaaaactgtatcctgggttgatatactacaattagcaataacagctagccaaaagcagactacagaagccaggaagcaaggtttgtactacactcagagactttcccagaactctggacttggatggatcaggtctctgttttcattttgacaagtgatgctgtctctgtgctgagttttacccctgaatggcacttccatcatggaatcagttatgctaagggcctgttccagaatgttccacctaaaacatggtggaaggtgaggacatctgaagttgtcctctgatttccacatacccacactttcatgctcacagtcacacccacccacacacactcatacacactcacatatatacacactcacacatatacactcatacatactcatacactcacatattcctacactcatatatactcatacataaacacactcacacacatagacacatactctcatactcacactcacacacacaagcagacacacacactcacacatactcacacactcatacatactcactcacacacactcacacatacttacagacacactctcatactcacacatacactcatacatactcttacatacacacacttacatacacatatatacatacacacattcatatacacatacatacacacactcatactcactctctcacatatacatactcatagacactcatacacacacatctacactctcacacatactcatatactcacacatacacacactcacatacacacatacacactcacacgcatacacacactcacacatacacactctcacacacatacatatactctctctcacacacacacacactctttcacacacatacacacatatactctctctctttccctttctctctctctctctctctctctctctctctctctctctcacacacacacacacacacacacacacacacacacatgaaggaagctggaggatatgttggcaatctgggcatcctatagttcagatgagctgactcctaaaaccaactgtctggatcatgtatacagcagtccaaatgacaaactatctatgccacatggctttactaagtcaccttgagccactnnnnnnnnnnnnnnnnnnnnactgcgtcagcaccaaaggagacaacattcaccagtaactctactcctttcttctacctgggcttctgacaagtcaattaattacactctctggcaagggacaatctctctcaaaaccatcctttcagacattggcagaaataacatttaggattgaggagatggcttgatgggtgaagcacttgctgggaaggcctgacagcgagagttttggtccccacagtatgtgtaaaagctggacacactagcaagtgtcaccatcccagcgcttctgtgaggaggtggcagctccaagccagttagctccacatacacagaagtgcacacaaaagagacactgtcatggggtatccaccaaagaagactccttggacacaggtttaagctaataaagtccttattacttggccagagtccacactgggtattcaggaccccagtatagcccagagcctttttcagggtgagtcttaagcacaaaaactgtatcctgggttgatatactacaattagcaataacagctaacatactcatagacactcatacacacacatctacactctcacacatactcatatactcacacatacacacactcacatacacacatacacactcacatgcatacacacactcacacatacacactctctcacacacatacatatactctcacacacacacacacactctttcacacacatatactctctctctttacctttctctctctctctctctctcacacacacacacacacgtgaaggaagctggaggatatgtttgcaatctgggcatcctatagttcagatgagctgactcctaaaaccaactgtctggatcatggatacagcagtccaaatgacaaactatctatgccacatggctttactaagtcaccttgagccactcctttatttgttcagggctgactttactgaaaggttcatctgctctgacctagctcaccaaagccagaggaccagaacagcccaaggcctgaggccagcactaatgtggaggtgaggaagggccagcagggctgggttgcaatatgaggacacagaaacatggctgtcagtgtttctgagatctgcactctccacctcccaacctcccactgccaacttttgagagctcaagaacaaaccgtccttacctaagtcctcagttggtgctctacatcacggagactccaagccacgcccatcctcccatgcctgcctcccgccccaaacctagtcatcctcctctgataattggctccccctccttgcccacaaaaactcgtttaattaagctgtgttttgacactccagaaaggcaacgcattactgactccgtatccccttttaaaacattcaaacgacattcggagtattagtggtaaaatggtcgatgttgcttggcccttaggatgcttcgtggcggtgaacagaaagaataagtgaggcccgaccagttcttgtgtgaataaatcatgtcagcataaacatacggtaaatgtacacgtcttcgtctgtgccgacttccatttgtgaaattactgctactctttaaaatgatataatatagctgggcgtggtggcgcacgcctttaatcccagcactcgggaggcagaggcaggcggatttctgagttcgaggccagcctggtctacaaagtgagctccaggacagccagggctatacagagaaaccctgtctcgaaaaaacaaaacaaacaaacaaacaaaaaatgttataatatagtatggtctgacttaagaactcagtgctgaggacagatcagacgcaggatgtgggaggggcagctaacactaaggatgtccgaggaagctctgtagaagcctgctatttcataagctccatagagagacccagaaaacattttcaccggagttaccctacagaggggataacattctctctcggggcgctagtggccatcatctgtgtgacaaggaaaaccatgtgtggtctccccatgaagcttcccacctccacatgcaaggcacctccatttcttcctgcagactcactcctaggcttccaccggctctgctattcctcctttcactaatggacgaagccagaggggatcagctatccctgcttcctcctccttcagagacttgggaccacccagacactattgcacaatgccagcaagattttgctgaaaggaccctgttatagctgtctcgcatgacgctatgccagtgcctggcaaatatagtagtggacgctcacagtcatctataagatggaatactaggcccccaatggagaagctagagaaagcacccaaggagctgaaggggtctgcaatcctataggtggaacaataatatgaactaactagtccccccagagcacgtatctctaactgcatatgtagcagaagatggcctagtcagctatcactgggaaaagaggcccctggtactgtaaactttatatgccccagtacaggggaatgccagggccaagaagcgggagtgggtgagtaggggagcagggtggagggagggtatagggaacttttgggatagcatttgaaatgtatataaagaaaatatccaattaaaaaaaagaattaaaaaaaagaaaaaaattgggacccagcccctttccttatccgctctgtgcccatcgcccccctgcccacctcttccttccttttttctttttaactttagatttatctatttttataagagtttttttttaattgctattttcagacatacactagaagactgcatcggatcccattacagatgattgtgagccaccatgtggtagctgggaattgaactcaggacctcctccgacagagcagtcagtgctcttaaccgctgagccatctctccagcccctcttctctctttctatagacaggtctcattacgcagcctcagctgacctggaattcaccgtatcaaccagtctggtttcacacttacagagatccacctgcctctgcctccctagggctgggattaaaggcctgtgccaccacagcccgctcactgctgcatcctgcatggaccgccacacggtgtcagacccatctccctgcctgtagcattgctgccgtctatctttagtacagaaggtggcagagcgatcatgctaggttctaagttctctgcacgccacgcttctgattcaccctgggaaggaggctgaacgggctcacctgacatgtgacttagtgagccacttcctctttgtcaaacagcattatcacttggcttccagaacgttctcctttccttcaccctcctgctcttcctcgttctgctttgctgaactctttcagcaaccccagctctgaatctttaactacctcagagcccggctccacccacttctctacacagcccctgctaggtctcatgtctgtaacgatctctgttagaggcaccttcatttgggttgttttggctttgaaaacgttttattgagactgtgtgtgtggtgtttgcgtgcttaaatgcaaacacattcaagatgttttgtttcctgtttctatgagataagagtttctctgtgtagtcctggctgtcctggaactcactctgtagaccaggctggccacaatccaggtcctacagtgtgtatttctcatatttcacgtttttcactgtttctcgccatattccaggtcctaccgtgtgtttctctttttgcacgtttttcagtgtttctcgccatatttcatgtcctaccatatgagtttctcttttcctcgtttcacaccatattgccacgcctaatgacccaagtatgggtcctaaaatccacgtgcggtggaagcagacaacaggcccctgcaggttttactctgacccccacatttgtgccatgacatgcgtccccctcctaaaaaaaaacccaaaatacataaatataattttctcatataaatatatgtaaatataaagtaaataaaatataaataaaaatttaaatcttttaaatgaaatatactaacttttatataaatataataataattctttgaaataaaataaagaaaaagcatctgacaacctcaaagtgtccttctgattccagattcctcattccttaccacagccatgactaggctctttctctttccaaacctcagtttccctatgacgggtcggggcagttggcctaagtcatccagacaaggtgtctctggaaggtcagactcaagccaatttcagtttacaaacgtcacaaaagagaaactacaaatgttgagaatcgaaacttaacagcacaaaagttggccccatgccaaccctgttaaggcggtccagaccggccaaccccagcctctggtccctcggcacacctaccatgacaataaatctccaaggaggggacccccccatagagccatgctcccaagcttctctcttcacccccctttccgccattgggtgccagaggtcagctggaaaggagccgccttaaaaaaggaggaggtgagtaccggcagctggatgggtgcttggctatatagccctgcgcctgcctgaggtagctgacggtcagtgtgtagccattggcagtcgcccaggagctgtacggcttcccggcctccaagctggactcctttgtggctcagtggctgcagccaaccagagagtggaaagaagaggtcctggagaccgtgcagacagtggagcagttcctgaggcaggagaatttccgtgaagatcgtggcccggctcgggatgtgcgcgtgctcaaggtactcaaggtaagactggacttcaccattcccagccaggacagggcaaaccccagtgccagggagtcccctcgcctcgtgatccctagttcacgcttctgacatctcgagacagccccgcgagccttgagcagaatgaactactaaagaagataataaaagaccacctctggagaaaatggtagggaaagcctgcatattctatcattaaaacttatactctgagagatagataccattcttgtcccattttacagatgagcctaacaaaggctccacaatgtcagagctacagtgaccacatccaatgcaaggcctctagttggatcctgacatgtaatttgtaaataacaatttttgagagcctgacttgggggcccattcttgcaaccccagcatgtgggaggtagagaagcaagaggatggttggttcacagcctaggttacatatcacagaacaacacacacacacacatacacacacacacacacacacacacaccacagacagacagagacacagagagagtgtgagtttggggatgagtggtaaatgtttaatatgacctgcattttggtaagaaaactgccgtttgtcaagttaaatcgcacctactggggtggggaactctctttagggggacacatgctatgctgtattggggcaaagctccttgctgtccgctactcactttaaagtgattgagatgacacaaatgcgggatctgtggatgtggctcaaggctagagtgaaagcctagcatgtacaaaagaaagacagtcaccgatgtggcaagtttagatgtgctggctgcctggatggtatcttcttcctaattttttccacgttttaatattttgataactgaaagactcttaaaatggaggctgagagtagccattgggcttgttcagagatgtaactgctgacgtcagagctgggatttgaacccggctactcaaacggtgacccaagtttctcactaatatttttttttcctccttaaatccttcttccaactgccacccctaccccctagctgagctaaggatcacaggttcaacagaccctggaagggggtggggcaagggctgagtgtagctgctcaaacttattatcccagccctgcagaggcagagacaagagaaccactaggcctaccaaccagtctccttggcctatcagtctagccaaatctgcaagccctagggcacagtagaataccctgtgtcaaaaaaaccaaatgagcagcctaaagaacaatacccaaggttgccctctgatctccacacacaagtgtgcactagtgcaggatgcacacatgcgcacacacacagctttggagaagaactaacctcagccaattgttcatttaaatgttaaggagattgacacctgaagaggttgacacatcttaatgccatagcccaagtggttgcagcatctagactagaattaggactggattcccagcctgagattttaaacttgcgctattgggttgaattttgaagtcttgagcttcaggtcacatgatttagaagtgacagccatagttttgtcaccacacagagaggatttgagtctgggctcttcctctcaccagctgtgtgactctgatcatcctgtctcatgtctcaagtccttggtctgctcctctatgatggcagcatcccaaacatcgtgttccatttcccaacactgaggccatgcagcctaaaggttagctcagggtaaagtcttagaaacaagggtttcattatgatacttgcctggggctttttcctggctgctgggagtctctgggggcaaggctgtactctagatcactccctccctgatatacctaaggaaaaaaatatgtagaacaagtatctagatagaagaaagactcaccaaatagattaagttttggcagctgcagatgctaactgctaagcctcatttctcctccccttaacccactaaatgatagtcatgcctacaaagcaagaacagtaagagtgtatcttgcactggatgtatcctatactggatgtatcctgcagtggatgtatcctacactggatgtgtcctacacaggatgtatcctacactggatatatgttacactggctatactctcattgaatgtatcctacactggatgtatcctacactggatgtatcctaaactggctgtatcctcattggatgtatcctacactctacactctatgtatcctatacttcatccctccatccttgaagctccagagggctgagttatccacgtgactgaatccgagatgacaaccaaagcaaatcacgaagtctatcctaagctgtgctttcttcactggggaagggagagggcagtgtagacataacctgacctgcagagggatcgccctttgcccacatccacaatcaatctccggtcctttctctcaggataggaacaccaagtctgaatactagtggaatcagaattaaaatggagaatcaagaaggcagacacctgctgtctgggaacagagcatagtgtgtggacaccatcatagggtggagagaaagacccattggtggtgtctgctgagctgccatttaactccctggctggctgggagaccttgcaagtggattgtgctccactgcctctgtattcagtgttgtaccctggggagccaggtcacaggaccagtctccatggcgattaaaaaggagatgtgcattaaatggcctttggtagtgccagatacagggactgctcagcctgtgataacagtattttaatttctgcagtgactcactaaccaggaaaagtagccacccagagactgacccaaccccagtagtctcatgtggggtgagccagaggtgagccagagagatgtagggctttgtatgccaaggaggcagagccaggagagtaagcctggactctctcttcaaaatcatctgattcaagagccagcaggatggctcagcatgtaaaggagccaagactgacaccctgagtataatcccaggggcccacatgatgaaatgagggaaccaacttccaccagttatcccctggcccccacatgtgtgccatagggtatgtgggacacacacatacacccagaggaataaataaaatggaaaaaaattaaacaatccagtttcttctcttgtcattaagagatatagaaactggggggtctggagagatggctcagtgattaaaagtactgactgctcttccgggggggaggggagcgaggaaactaatgtgactaatatggaaggagctggggatcaactcgatgaaaagggaagagatacgcaccgctgactgctgacttctgggacacgccttgctgacttcaggacacggcccacacacacatcctgggcgtacagtgctgtgtctgatcttcctaataaccctatcactggtttggtttctcacttgccagactttggcctccttaatgatcacgtagccggtgagtcaggccagggctaggcttagagctctaatgccaaagaccttgtcacccatgatggaggctccctgagccatccacaatgcaattaaaccaaggaagcagagagaatggaggggagaaaggaaaaatggatagatggatggatggatgaatggatggatgggaccgactccctgtttcacagatggtgcagtgggtatttctacaggtcaggagtcctttaccagatacttaggccctgaaatgtttcaggtttagaaacagccccactccccagctcttcggcctatctacataaacataatgagataccttagggtaggacccagatctattcttgaagttcatgtgtcttcacatacccaaaggcaactttatacgctacttttagtcacatggggtcaggtgtgggattttccacttgtggtggcatatcagcaggtttcaaaaaaggctcttggattttgatcattttggagtgtttttattggggatactcagtcctgattctcttagagcagacatttccctgggttggagaagactgactctctaaaggtgtacagtgcagggaaatagcaagggctgctcggtgggccagtcctggaacccgtgcctgggaggctgaatcaggggggccatgagttcaaggacagcctgagctaaacagcaaggtccaggtcagctgcaggctgtgtattagaacagagaccctgtgtcaggaggcctgggggccagagtccagctgccagagatgctgagcacaagattcaccctccatgtgtctgcacccgtgacgtgggaagcaacacttttcagctagcctgtgtggaagggttctcaattaaagggctgtatcgtatgaagagccccaggttgctgggcctgtggctgagagccttggggtgacagggtcctgtctttcacaggtaggctgctttgggaatggcaccgtgctcaggagcactacagacgtggagctggtcgtgttcctgagctgtttccacagcttccaggaagaagccaagcaccatcaggctgtcctgagactgatacagaaaaggatgtactactgccaggagctgatggaccttgggctcagtaacctgagtgtgactaacagagtacccagtagtctcatcttcacgatccagaccagggagacctgggagaccatcactgtcaccgttgtgcccgcctacagagccctgggtaaggggaacagaagcacacgcctcgcctggcctcccctggagactgtgacctctttcctctggtggccgcatgctttcctctttcctacccgtgtcctgggctggggtgagctgccatgccgacttggggaaacagaaactcatcacagaggcccacaagacaaacagtagccagtgatcggaagaaagaatggagttcccccaggaagtaccaaataaggttccagaaaggattttctgtaggaagaatatttttgaaagatccaaggcccaaccaggggaaggagtcaaatcagaagcaaggtggcatctactgggtctgggtgacctttcccagaagcagagctcagagatccaaaccataatgatttttgtatgctaccccccaattgataaggctatgcagtgttatcccatggttgctagcaatagtatccagcctcaggaagaaagtccttcgtggagtggtgcaatcccagttctcccctatgaatattgaccaatacggttccatcatccagaaagagatctattgataaaacaaacactaaggaaagctggggaatattgggaacatcagggaggacccgagacatggaaaggccagtggttgttcttctgagcaagactcaccaggttgcgtgtgttggaagttgcctttaatcccagcactcaggacacagcatcaggtctctaagagtttgagaccaggccagtctatgtaacaagcagccaggtatacaccgtgagactctgtcaccaaagtaaaatttaaagtatgaagcttttaaagaatgtctgggggtgagggtggggatgcctttaatcccagaactcaggaagcagaagcaggcagatctctgtgagttcaaggccagcctgatctacaggtctacagactgagttccaggacagccagggctacagagaaatcctgtcttgagacacacacacacacacacacacacacacacacacacacacacacataggagagaaagaaaggaagaaaaaaggaaggaaggaaggaaggatagattaccagaaagacaactatacaaggtctcaggtgttgtgttttataaagcagagatatgtttgatggaggggtggcatggtgttcagggaagggggtgcctctgcaggcccatgctgaggcatcccttctccctctgtggtaccagtcacatgatacagtactcagggcatgggggggcggggagaggcggaggcagaggcagggagagagagaagaggaaaaaaggctggccatgagcatgtgggggtgaggtgaggagagaggggggagaggctaagggagcaagggcaggagagcaagagagagaagaggggcaagcagccccttttaaagtactattgccaggtagctgtgggacggggcctagacaaaatgccaacatctggtctctctggagatgaaccataatctaacgagtgaccaggccctcccaaaatgcctacttagtccacgctggattccagaatcttccttcacttggtctttgcttccactctcctcaggcccttcctgtcccagctccgaggtctacgcaaatctgatcaaggctaatgggtacccaggaaatttctctccatccttcagcgagctgcagcgaaacttcgtgaagcatcggccgacgaagctgaagagcctccttcggttggtcaaacactggtaccagcaggtgagggggctgccagggtgaggctgggggaaaggcatcaacgggagacagggtttcgggaggatgggcagatgctaggacatccgcaacccgcagatactgttcctgggctgatgtccactcctgtggtttgtgaacgttaggctcaacaagttcaagactaaggaggaggtggattccttaaaatccatgcatacaactctgcctctcagtggtgacagcttctgcgtccccgtcatcactgaatgaacgggtccttggtgactacttttcaagtgtcacatgtggtatctgaagcgaacccagtatatttcgatgcagtgggtgtgtagagttatctaaactgaaaaaaggaggcatcaaaaatagcccctttgcgggggctggtgagatggctcagcaggtaagagcacctgactgctcttctgaaggtcctgagttcaaatcccagcaaccacatggtggctcacaaccatccgtaatgacatctgatgctcccttctggtgtgtctgaagacagctacagtgtacttacatataataaataaataaatctttaaaaaaaaaatagcccctttgcatgcacgcacgcatgcatgctcaacgcacttacgatgggagggcggtcttcttgtaaaataacagatacactaagagtcagatgagttgtgatggggcacacacctgtaaccccagccctcaggaaactgaagcaaggggatcagccggccttcatagtgagccccaggctaacctaggctacacaaactcaaagacaaactcgagctcattcagcagttaagagcttgcagagaacccgagttcagttcccagtacccacatcaggcagcttgaaacaacctataactcccagctccagagaatcctgcgcctctggcttccgtgagcacccatacactcacatgctcatatgcatacatgcatgcacacatacatgattaaaaataaagtaaatccgggctggagagatggctcagtggttaagagcactgactgctcttccagaggtcctgagttcaattcccagcaaccacatggtgcctcacaaccatctgtaatgggatctgatacttcttctaatgtgtctgaagacagctacagtgtactcatatacataatataaataaatcttcaaaaaaataaagtaaaaaaaatgtaagggcacacacatacatgattaaaaataagtaaaaaaaaaaatgtaaggagtctggtagaactctacctctgtccccttggatggcactgtccacctttacctgtgaatattcatctccagttgtacttcataaattcgctaatgccggagtgaagaaatagagagatcgcccgtgcgtggattatattataatcaatcccctcttttataaatattagctgtcaggtgcaatactcatctgtaagccctcttcgggcccaccccctccactacacacacttgagcctgggcttcatatcaagccttgggaaaattaaaaagagctatgtcttagtttgggttacaattgccataatgaaacaccatgaccaaaaagcaagttggggaggaaagggttaattcagcttacacttccacatcatagttcatcactgaaggaagtcagggcaggaagtcaagcagggcaggaacctagaggcaggagctgatgcagaagccgtggaggggtgctgcatactggcttgctccccaaggcttgctcagcctgctttcttatagaacccaagcccgctagcctaggaatggctccacccacagtgggctggccccacccacgatgggggcggggccctccctcatcaatcattaagaaaattccctaccatcttgctcacagcctggtctaacagaggcattttcttaattgaggttccctactctcaaatgactttagcttgtaaaactacccagcacaagcttagtaccagtggttttagatttttaaataaacagcgggggctgggcaagtagttcagttagtaacaggcttgagacacaaacatgaccacctgagcccagagtcccaacatccacgtaaaaagctgagcacagtggcacacctcccattccagcacagggaaggcagagacaggagaaaccctggggctttctggtcagcttggtctagccagtgagagcgagagcaatccagttaaataagagggcggctcttaaaatgtgaacagcgattaaggaaaatagctcacaccgccctctagcctccacccccatgcatacatacatagtgttatacacttatacgcacgtacaaaaaataaaaatcaaaaaattaattagatctatccgataagatgtctcagcaacttaaaggtgcttgccagactagcttagcgacagtagttcagtctgatcccaggaacccttgtaaaggcttaagttgaactctgacctccacacacgcacctgaagaggagggaggagggaggagggaggagggaggggattcaaaaaaataaattctattcccctaaatttgaattcagacacaatttgatgtcttctgggcaaacctagacccttaatcctaaaacagggaaaccaaggcccaggaagggaaagtcactttgtcaaggtcacacagctcatgggttagagtttgaatgttctgcccctggacctgggtgtcattgtcacacgtaatcttggcatccctctctgtctcttccccactctcttcagtatgtgagagacaagtgcccccgggccaacctgccccctctctatgccctggagctgctcactgtctatgcctgggaagcgggcacccgggaggatgccaacttcaggctggatgaaggcctcgccacggtgatggagctgctccaggatcatgagctcctctgtatctactggaccaagcactacacgctgcagcacccggtcatcgaggcctgtgtcaggagacagctcaggggacaaaggtactgggtctgtgctccccgcagagtctcagagagagagagacagagacaaggagagacagacagggagagagagacaaacagacagagaggaggggaagagacagacagacagagacagggagagagacagagacagagagagacagacaggagagagagacaaacagagagagggggagaaagacagagagagacagacagagagagagaggcagacagacgggggaagtgtggaatcttaggactttattgaatatgcaccaagaactacctcagaccctgacactgaaatctcgagtggacagacatcaggtttcccgagggttgtaggggatacgactctcttccctgtttctcaatactacactttgccctaaaccactccagtgcttttccttaaaaagccagggcaaagcacaaaggccgagttcagagcacctgcggagcatacacagggactagggctgctgccagcttgggcacaggcagagatgggtaggagcctgtcatcattgtcatcactgtcatgcaagggacagttggggtgtgcccagcacccccgtgcaggatgctgaagcttggagaagcacacagcctggatagcataccggaaggcagtctctcgaaaggaccaaagggacagagcagaggaccaaaggaccaaaggggcaaaggaccaaaggggcagagcaggggatgttttatcgggaaactgcttgctctgtgatttgttttctgatgccctgcaaccatctacacacgcgcgcgctcgcacgtgtgcacacacacacacacatgtgtacacacacacacacacacacacacacacacgtgtacacacgcatgcgcatacacattaaatgtaatttttagatgtatttattttatttttttaatatttatttatttattatatgtgagtacactgtagctgtcttcagacactccagaagagggcgtcagattttgttacggatggttgtgagccaccatgtggttgctgggatttgaactctgcaccttttgaagagcagtcggcgctcttaaccactgagccatctcgccagccccgatgtatttattttatgtatatgagtacactgtagctgtcctcagacacaccagaagagggtgtcagatcccattgtagatggttgtgagccaccatgtggttgctgggaattgaactcaggacctctggaagaacagtcagtgctcttaaccactgatccatctctccagcccacttctctccagcccatattagatgtaatttttaaatcaacaaacctagaataaactaactggtatctacaatgtagactgctgaaggtcaaaaaaaaaaattgtgttgtcttagtcagggtttctattgctttgacaaaacaaaaagcaagccgggagaaaagggattttttgtttttgttttttgtttttcaccttacacttccacatcactgttcatcagtgtaggaagtcaggacaggaactcaagcagggcaggaacctggaggcaggagctgatgcagaggccatggaggggtactgcttactggcttgcttcctgtggcttcctcagcttgctttcctacagaacccagggctaccagcccagggatggctccacccacaatggctgggccctgcccccttgatcactaattgagaaaatgcttttacaactggatctcatggagatatttcctcacctgaggctcctctctgagggagaacttcttcttagaaactcccttctggatcttgggcagacctaaaatcttagcttccctcttgctcctgttctctggccatctcccttcttttctcccctcccccttcctctgttccccatttcttcctagttagttacaagtctctatcatccctgggagaaaaccgccatatccctcacacggccagtacacccaggggagtgggaggggcagcactgcctgttccctgatcaccttcatcagacagctgggggtgcatggagctcaagggatccagctcaccccggtagcctgctttcaccctctatcacaaagacaaagccccaaactcaaggaacacacagtgcagttcttactgacaggctccggggtccactgcagtcaatctcccaaggggcccacgcagactccacacaagccagtaatgaacagtctttcagtgtttgcagaccagagagactattagaggcagccagagctctgccctgttgagcagtagaatcagaacagctgagaaccttcactaccaactgtgagagtttgaggtcagcagagagattgttttaatttaatcctttaatttaatttaatcctacaagcctttaattccaacactctgaaggcagaggcagacagatctctgagttccaggccagccagacctacacaaagaaaccctggagagagggagggagggggaaggagagcgagagagagagagagagagagagagagagagagagagagagagagagagagagagcttaaggtctatgtctctgttccctgacctctacaacagggataaccatactaatccttatagaattgttgggagaatcaaagctcacacaggttatgttctggcccagggcttcaaaagcaatcagtggatgttggtggtgccactgttatcaaaggccactcagccaatttgccctcaacgcctgccatggccttgcggtgcctctcctgctaagtggacatctgagactgagactgttccaggacccagtttacagcctcgtcctacccacccctctgattctctgcacttcccggaatgttctcctcaaggagatgagaaatctcatcatctctgaggacacacagatgctcagttgctagagagaatggaggctgggaaccacctccctaggttatggctccctagggtatggctcccaagccagcaagaacctgggtattgtctctctgttgcaggcctatcatcctggacccagcagaccccaccaacaatgtggcagaaggctacagatgggacatagtggctcagcgggccaaccagtgtctgaaacaggactgttgctatgacaacagggacagccccgtccccagctggagggtgaaggtaatgaatggttcctcctaacctgacagtctgaacactacactgcctcacccaacaaagtggggaacagcttttcagaggcaagacgtctggacaccacttgtttccagccaaataaagccaagagataggcaggaaagtatagaccttggggcttgtttatgaaacaggaactatgtagtcctgactgtcctggagcttgcctatatagactaggctagccttgaactcacagagatccacctacctgtgcctcaggagtactggaattaaagatgtgtgttgccacacccagcctgtgactcagtgaagcaaggcctctttgtgtagcccatatactctcaaattcacaacccctctgttatacacaaaaatggctcatacatctcaaacccccactccacccctcctctccctgctggactggaggatattttttccttgaaacctttacaaccctagctttagagttcttccaaacccagctgtgtcctacattccttttgccatgcagtgaacactaagtgtggcagaggcaggtaccatcactttgtctaccaaaggggaggagagcctacctcaatgggctgaaaatgtattggggtggggggggggaggcgcccagcatagagcttacaaagtgctaggnnnnnnnnnnnnnnnnnnnnnnnnnnnnnnnnnnnnnnnnnnnnnnnnnnnnnnnnnnnnnnnnnnnnnnnnnnnnnnnnnnnnnnnnnnnnnnnnnnnnnnnnnnnnnnnnnnnnnnnnnnnnnnnnnnnnnnnnnnnnnnnnnnnnnnnnnnnnnnnnnnnnnnnnnnnnnnnnnnnnnnnnnnnnnnnnnnnnnnnnnnnnnnnnnnnnnnnnnnnnggaggggcggggaagccatttttgctattacaaagatgaatctgggaagggaatttgtgggtcacgagacagaaatgcgagcctaaccccgcctctgtcttttgcagagagcacccgatatccaggtgaccgtgcaggagtgggggcactcggatttaaccttctgggtgaacccttatgaacccataaagaaactgaaagagaaaatccaactgagccagggctacttgggcctgcagcgtctgtcctttcaggagcccggcggagaacgtcagctcatcagaagccattgcacgctcgcctactacggaatcttctgcgacacccacatctgcctgctggacaccatctcccctgagatccaggtctttgtgaaaaacccggatggcaggagccacgcctatgcgatccacccgcttgattacgtcctgaacctgaagcagcagatagaagacaggcagggccttcgatgccaggagcagcgcctggagttccagggccacatcctggaggactggtttgactttaaatcctatggcatccaagacagtgtcacagtcatcctgtccaagacgacggagggggcagctccatttgtgcccagctagcttcctctgtcggtggctctgcctgttttattgtctcatcctagactcagcctagttgcctctccttcccgtcctctgcccggatggtccacgtcttcagtaccttgccagcagggagtcagagggggtgtgagaagtcgtgtacagccagacactcttgtgtgacaatggaattctgcagtcccctgggaagtcatgccaggacctctgccttcctcgtggcctcactgtcaagactgtgtcagtgaatagctggcctcacagactattctcacatgttcagagaaagccaaaccatcttcctaaccaatcacagggaccctgcttgaggttgtcccacctccaaattcttcccagtgacctccatcagggcggctctgaagccttcccctgtgcccccaaccacttctgcctgccttcgactatccaaggcaaggtaggaggggatcaagttcctttcaaatggagaataaaaaagccattgtttcttcccagatgagtggtcctcatttgtcaccacagatgcctctcaactctgcgattgatgggtatagggaaactgagtcaaaaagagacaaagcctgagaaatggagtttgaagatgagacagtatttaaaagttctttctgggcatggtatcacgcctttaatcttgggaggcagaggcaggcagatttctgagttcgaggccagcctggtctacagagtgagttccaagacagccagggctacacagagaaaccctgtctcgaaaagacaaaaacaaacaaacaaacaaacaacaacaacaacaaaacaaaccttgtaggcaatttagcaataccattatatatacttcccaactcttttacatccggggcctacagtatctcttttctagagggtgaacagtctagctcaatccagatcttcatatacttcacaatacagaccatactgtaggggaatgaacagggctgaggcagatcagctggcagaacactggcctgttcctaagaagtccccagttcaatccccagtacttccaggtgtgtcaactcctgcctagaatcccagcacagagtcaggaagatcaggaattcagtcatctttggttgcatggcaggttggaggccagcctgagctacccgagaccctttctaaaactatcaatggattagatgaataagtcactgccttggtccttttacattcccgtagcaaaacaccacaaattcagtgtcttgtgaataacaagtgtttgtttctcactgagaagttgaagatcattggcatccggtgaggacctcttgctggtttgaaaatggtagcttctcacttggtcctcatgtggtagaaggagagaaaggcagatcttcgagagtattgatggcagggataaaggctctgttccctgccaatcatctccaaaagccaacagcatgggaggtaggaagtcagcaaagggattcaaacatttgtggaatattcaaacattcagtcacagctgtcatttttcttttcaaatcttactagctggatagaggcagcttaaacctttttaatcctagcactcaggaggcacaggcagccagatctttgagttcgagaccagcctggtctacagagataattccaggacagccagggatacacagagaaaccttgtcttgaaaaatcaaccagggctggaaagatggctcagtggttaagagcactgactgcttttctagaggtcctgagttcaaatcccagcaaccacatggtggctcacaaccatccgtagtgagatatgacgccctcttctgatgtctaaagacagctgcaatgtacttacatataataaataaaatctttaaaaaaaaaagaaaaatcaaccaaagaaaaattttaaagacttattttattagatacacgagagtgttgcctgcctgtatgtatgtgtagcacattcgtgcctggtgctctcagaggtcactactagatttcctaggataggagttatggatggttgtgagcagtgctcttaactgctgagctaagaaagacttttcccatgtatgactgctttctctcaagaaatgttttcatcaccacgggcacatacatatgtaaaataagcaagcacatcaaacaattaaaggaaagaaatcataaagaaataactttaaaacaagtatttaaagcaagcaagatggctcaagaggtgaaaatatttgctaccaagcctggcaaactgagtttgatccccaaacgtgcagatctggggctggagagttggctcagcggttaagagcactgtctgtgcttccagaggtcctgagttcaattcccagtaaccacatggtggctcacaaccatctgtaatgggatctgatgtcctcttctgaataaataaataaatctttaaaaaaaaaaatatatatatatatatattagccaggcagtggtggtgaacactttaatcccagcacttgagaggcagaggcaggcagatttctgagttcaaggacagcctggtctacagagtgagttccaggacaaccaggtctacacagagaaaccctgtctcaaaacaaacaaacaaaaaagatgtgcaggctgggcgtggtggcacacacctttaatcccagcactcgggaggcagaggcaggcggatttctgagttcgaggccagcctgatctacaaagtgagttccaggacagccagagctatacagagaaaccctgtctcgaaaaaccaaaaaaaaaaaaaaacaaaaaaacaaaaaaacaaaaaaaaaaaccaaaaaaaaaaaccccaaaaaaaacaaacaaaaacaacaacaaaaacaacacacacacaaaaaaaatgaagtgtagatctgaccctctcaagctgtcctgatccccacatatgcactctctcttccacacacaaatgaatataatacaattgtttaaaaattatttggtgtgtgtatgactttaccattattaaacgctaaagcaagctggtgtcatcctggtgtgagggaaacagaaacaagaggaacaactcaagttcaaggccaacttggtctatgtagcaagttccgggctgaccagggatatgtgcccgggtctcagaagggcatgtgggagcctggcctggtggctcttgcctatgaggcagaggcaggcagatctctgagttcgaggccagcctggtctacagagtgagttcccggacagctagggctacacagagaaagcctgtttcaaaacaaaagggtgggggcaggtggggggctgggattatctctcactcaataaaatgtttattgtaaggatcgtggcaaggatcagaggcaaacctgcacacacatgttcactcatgtgcatatgcatctacatacacataaacatctataagtgagcacacttgagaaaagacaaaaacgattttgcatgttaacgagataggggtatttgcttacttttacataaatcttgtctaaatatttgataccatgggacacagaacttcgtcagtgttttcagagtgtcaatgtgctggttctgaagtcagcaatgccaacagtgctccctctcgccagtattgtacacaacaacagacacatgggtggggctgcttcggaagttgttggaaacgctgtcttaaacccaggtcaaaagtcaatcacttttgtaatgaaactcaaacaactcaaacggcaacttttaagctcgggtgttctaatagaaaacaatcaaaaggtgtattaatctgatatgtattaaggagtgacattaaaaaaaagtcttcgttttctgcaattaaacagttgtgtttcataagagcagaaaactttgtgtagggctggagagatggttcagaggttaagagaactgactgcttttccagaggtcctgagttcaattccaggaaccacatggtggctcacaaccatctgtattgggatctggcgccctcttctggtgtgtctgaagacagctacagtattcattcatatacataaaataaatcttaaaaaaaatgttgcctggtagtggtggtgtacacctttaatcccagcacttgggtggcagaggcagtcggatttctgagttcaaggccagcctggtctacaaagtgagttccaggacagccagggatatacagagaaactctgtctcgggaaaaaaacaaaaacaaaaaacaaaaaaaaaaaaacaaaacacacacacacacacacaaaagctctcaagtgctagtctacaggtgttttacggactatgcactaactgctaaatcctccgctgttccaagagtcattccgatctgatttgtttgttctgtttgtttgtcagaccctcaaaagcctacagtttaacaatcttcctaagatcaaaacctgaagtaaaaaaggtggctagttgccttcccgatttcattaaatcgcacatgaattcatttttccttaaaaaattaaaaataaaaacaaaactaatcctgcttctgtcatcttcttgtttgactttagggtattatcgttccctgtgcaaacaagagaaaaaaagagaaaaggtggggaggggatcacaaggagagacggggaggagaggaaaggggaggggatgagaggagaaaaaagaaaaggaaaaagaaaaacaacaacaacaaaaagattggagaaggtggtggtctcctggatccttccggagctcatttttctgtaccgttcgccgccaatggtggtctgggaactacaattcccatgatgctctgacaggtgggtcatgtgagagggaagctttttaccccccacaaccccttgcggcatcccaggatggtggcgcccagcggtgcaatgagcgattcggagaacagcagcagtagcagcagcgatgcggaggaattggcacgctgtcgcgaggcggctacgcccgcctgggggctggagcagcgcccgggggcagcggagagacccgaagccggtagggggctttctggggctcaggctcctccccgggggcctgaaacggatgcgtggtggggtgcgagccatggcgtcctgacgttttagaggagctttcttgggggagcttctgagatcttttggggatcacactgacaccgagggcagagggtgattgctttattcccgtggaggccgcagaggcacctaaatgcctcctgactgctttcctcaatgcgtcctgtgtcctccctctggaaaggtaaccaacccatcacctgtctgagatgaccgtgatgcccctccttcttgtagtctcagaatcccgactttctcggccctcacttgatgtctcattcagactgagctcacccgggagtatacctaaacgagagattgcctagcagacggaatgtatccggcatctgccagtataatgactcttaatcatggttagagaatccaacaggccttataatttagagagtaggcagaaatatatatatatattgcatctgtacttgaactcctcgtgggaatttaataccttctcctctcctgcatgtgagctacaagccacagtcacgtgataatacctgtttgtcccagtagacgtcaccatattgttacatctcgttacagccttttacagatacatccaaacattttcttcacagtacactgttggaaaagaatcatttacactcttacccaccataaagcccctgagatgtctagttccatttccagatcagtgagttgcctcagcaattgctacacaaacctgccaacctcactggattcccagaacccatggtaaaagagaggattaactcccaaaagttgtcatgtgacttagacatacaacagtaaacattttcaagtctcagaaggggaccgatgtaaaaacaaagtatataacttatagttttattttattttattttagacatagagtctcccatgtagctctgactgccctagaactcgctacataaaccagactggtcttaaactcatagagatctgcctgcctttgccttctgagtgctgggattaaaggtgtgtgttgccaagcctggtttaaaaagtggcctttagattattctattacattttatgttgtgtgtctgtagactcacacaggtgtcatgggagcttagaagtcatgtgggtcctggggatcaaactgaagtggttaggcttggtggcaagtatctggagagccatcttgtcttccttggaggagaattgactcactttatagatgtgaaaaacaaaaccttgggggtgggttaaatggctcactctgggtgtggagtttgacaattgtctttattttggggggcggagtttggggggggggtgatcgctattgctctgtagtcataatgggagctactcatgactttcagaagccaggtatccacctcacacacccacagccagagcatggagcacttgagagcacactgacagaacagtgtatcgggcaggtgcactgaatgcgtcacagcctaaacacaatcgtgatcgtggagttgatgcaccaagccctgcagcacactgggtgccatcaacagtcctttccgttcccttgtcacaagccccctttgtcccacgatccacatcagaaccatctctcagcatccctcctagacaacatctagcccgtcacatcctcagaggccttggtgatgcacgcggacctcccgtctacccttggcctcctctgtctcattctgtctagtgtggcaaaactaaaccagtttctgtcactggcggccttgaccccgccattgcccttctttctcccatcctaagtccctctcctggggggcctgggtaatcttcccccaacaaagtctctcctctccgggccacaccggcagctggctggctttcagcaccacaggttcctgtctgcacaggcttgcttccctgtgcttggagaccctcccagatctccacttgactcagctccgtctctctcaggtatctctctgcccagcggtcaccatacaaagccttcccacctttggaggaacagcaaggtcttgaagtgaggaattaagttagcctttttcttcttcgctcccctcttccttgctgataatttcctttgaattttcttttttttttttttaaagaattagaggaattttttttttttagatttatttatttattatatgtaagtacactgtagctgtcttcagacacaccagaagagggagtcagatcttgttacggatggttgtgagccaccatgtggttgctgggatttgaactcaggaccttcggaagagcagtagggtgctcttacctgctgagccatctcaccagccctgttttatgtttttttatacactttctattagccagtttgtgttgaaatgtcatttaacatccgtgttcaccttgaacgtaagtctctgtactggctggttttgtgtgtcaacttgacacaggctggagttctcacagagaaaggagcttcaggtgaggaaacgcctccatgagatccagctgtagggccttttctcaattagtgatcaaggtaggagggcccattgtgggtggactggtagtcttgggttctataagaaagcaggtttctgtttcctgacctgcttgagttcctgtcctgacttcctttggtgatgaacagcagtatggaagtgtaagctgaataaaccctttcctccccaacttgcttcttggtcgtgatgtttgtgcagaaatagaaaccctgactaagacaatctctgaggacagcactatttgtttgagctgttcaggtggggcgcctggttattaacagccacacggcgttttcttcagcggactccaccatcagcatctccagtgttcgcccctcccagagcacactgcacagcactagcagtcaccccataaaccatagtcaaattacacctgggcttgcctggtaaacattaacaggccctctggagccaaatgatgacctgtcagctccttccagctcccattaagacagccattactaatgcacgagctcagggctagcctgggctatgtaacaaaaatctcattaaaaaaaaatttaaaccgggcgtggtggcgcacgcctttaatcccaatacttgggaggcagaggcaggcggatttctgagttctcggccagcttggtctacagagtgagttccaggacagccagagctacacagagaaaccctgtctcgaaaaaccaaaaaaaaaaaattagcttttggactcgagccaaattattttacatatctttgactttacctcttttgcagagtaggaataacagtcacctctcaaatagaaactggggggaggttccttgagttaacgcgcattcaaatcacctagcccacagtcctgtctgtaagccgttcctgtctgtaagccgttctgtaagccccttttttcattattccacaggtgctgcagataaacaagcaccgaccccgcagccaagccgcaggtactgtgtgtgctctgcacggaagcttcattgagtcattcaacaaacactgattccccctgtgcgtgccagatgctaggttagaccacagggtgtcagagggacggagacaggcggtccctccctactgagggcagcttctaagctgtctggaagtgatgtcttgatgtctgtctgtgcgtgttgtaggcatgaggtgaaccagcacgaggaagatggcaacgaccttcggaccactcctgagttccgagcccacgtggccaagaaactgggagccctgctggacaggtgagcggaggctcatgtcatacccccagtcatgtcctcttgcttcaacctcccagattctgggattacaacctcatgtcccaaacccagaaaaaaaaaaacaaggaaaagaaagagttgttcagttgttgttacccgaaccgtcatccttggtctgggcctcctctccctcagctccattgccatcgcagaagtttggaagaagtcgcaaaaggcaaagatgcagcaggtggcaaaggaggaggatggtgagtccttagactgctgaccagtgctgccctgcagagatgcccctgtgtgcctgtggccagcagcccttcttgcatctgctgtccccacactctgaagtgggaaccacagcaccccattcccgggatgagctagctctgagatccccccacttgccctgttacctgcaagcattgtggcttcttacccagtctttccctcctgctctctctggtcctgacccttttgtggacccttttggaagccaacacaggtaagagactcagctacagacttctaaagcccctggaatctgggtaaggtggtgcttttaatccctgcacttgaggcagaggcagggagatctctgtgagttcaaggccaccctggtctgcatagctagtttctggacagccagggatacacagagaaatcctgtcccaaaacagaagcccctgaagctcactgtccagatgtggcagccagtctgtgccacaagcccctgcctctggctccacagcagggcaagcaagccttgcttcagatcagcttcagtttacacacacacacacacacacacacacacacacacacacacacacggcagtgaggtctaagccttgccactagactgggagtacctaaggactggctgcgtccttagcacctgggggaagggccagtgtctgccttactgactgctggctctgccctatggtgtcttagggccagtgtctgccttactgactgctggctctgtcctgtggtgtcttagggccagtgtctgccttactgacttctgactctgtcctgtggtgtcttaggcttccgccttttcttcacatccatccccggaggccataagaaggaagcctctccaagaccctgccggaagcgccagccccccagctccaggtaagtgctcacagcctctcctggccgagcctgaggaatagctaagcaaccccagtcaggctcagacggagcaagagatcatgagataataaggcaaagtattcccccagcaggaaggcacagggtcttctggggggggggagggggaaatcccatggttttcaagagcagccatcttgggccagagtcccgcctttatcatccttgtctcctgagaagaagctctatgaggtttggacactgtcagggccctcattgtagatgagactactaagggtcagaggcttcgggtacttaatgcagccatgtgactgacgagcagagaagctgactcgagcctgagctacttggctgcctccatctggtccggaggcaaccaggcagctcggagacccgtccagctaacctgactactcgccatggtgacagtgaggacagcgatgaggaactgcagcggtgccgggaggcagctgtgtcggcttcagacattctccaggagtcagccatacactgccctgccaaggcagaggagaagaagaagttgaaaaagaaagccaagaagaaggtggacaatgctgacctggctgcagccccaggtctggaacaggtaaaggaggcaggcgttgtcaatggggacccggtgtcgcttgggatcca

SEQ ID NO: 58 - DNA, 3769 bp, Mus musculus
tcactcactgaagataactagacagaaaacttcgtgagactacctcacgctgtccattgaccaggagcaatcctttgtgcctcacatctttgggactgcggtaggcatcagagaaatgtcacctcgatgggccctgcagctggagagtctgaccctggatatggccttcagctaagacacctgcacagatgatgagcagcctcggggagactagctgaggtcggtagttaggaatgtggagtgtggatgttgtgaccctcagcataagcaggaataacctagcctaaccctatcgctcgagacgccactagtaacggagacactatgcgtgattaagaatgaaataaatgcatttgccactgccagatcaccaggcagatgagattatgtggccaaattgctgaatcttactctgttgtggtaaacaacatcctgtgctcacaacagagccggtggggagactgcatccttaactcctgttcccttctgccttgaagaaggtaaactggatctccctgcagtttcactttcaattcttgtcaaagcttggtttctgtttccagtttctccaaggagggaggggcagagcgcttttcttctttccatgcaactctccatcccattgtctcctccagagaacgctgcaggaagcttctcccatcagagctgagcagaagctcagaggatttatctagaggacaggctggcccagctgaaatggacccgttccccgacctgtatgcgacccctggggacagtctagaccacttcctggaacacagccttcagccccagagggactggaaagaggaagggcaggatgcctgggagagaatcgagaggttctttcgggaacagtgcttccgtgatgagctgctcctggaccaagaagtcagggtgattaaggtggtgaagggaggctcctcgggaaaggggacaacgctgaaccacagatctgaccaagacatgattctgttcttaagctgcttttccagtttcgaagagcaggcgagaaaccgggaggtcgtcatcagcttcattaagaagaggctgattcattgtagcagaagcctggcctacaacatcattgtccttacccacagagagggcaaaagggcccctcgctccctcaccctaaagtgcctgagacgtaaatatggaagaggtgcagtgttgccctcaaaatatgctctggagctgctgaccatctacgcctgggagatgggtacagagagcagtgatagcttcaatctggatgaagggttcgtagccgtgatggagctcctcgtaaactaccgcgacatctgcatctactggaccaagtactacaatttccaaaacgaggtcgtcaggaactttctgaagaaacagctgaagggagaccggcccatcatcctagacccagctgaccccaccaacaacctgggaagaagaaagggatgggaacaggtggctgcagaagctgctttctgcctgctgcaggtctgttgcacgactgtaggccccagcgagcgctggaatgtacagcgagcgagggatgttcaggtgagagtgaaacaaacgggaacagtggattggacactctggacaaacccctacagccccatcagaaagatgaaggcagagatcaggagggaaaagaactttggaggggaactgcgcatctccttccaggagcccggaggggagagacagctgctcagcagcaggaagaccctagcagattatgggatattctctaaggtgaacattcaagtgctggagacctttcctcctgagatcctggtctttgtgaagtatcctggtggccagagcaagcctttcaccatcgaccctgatgataccatcttagatctgaaagagaagatagaagatgctggaggcccttgtgcggaggatcaggtactactgttggatgatgaggagttggaagatgatgagagccttaaagagcttgagatcaaagactgcgacaccatcatactcattaggtggctgcagccaaccagagagtggaaagaagaggtcctggagaccgtgcagacagtggagcagttcctgaggcaggagaatttccgtgaagatcgtggcccggctcgggatgtgcgcgtgctcaaggtactcaaggtaggctgctttgggaatggcaccgtgctcaggagcactacagacgtggagctggtcgtgttcctgagctgtttccacagcttccaggaagaagccaagcaccatcaggctgtcctgagactgatacagaaaaggatgtactactgccaggagctgatggaccttgggctcagtaacctgagtgtgactaacagagtacccagtagtctcatcttcacgatccagaccagggagacctgggagaccatcactgtcaccgttgtgcccgcctacagagccctgggcccttcctgtcccagctccgaggtctacgcaaatctgatcaaggctaatgggtacccaggaaatttctctccatccttcagcgagctgcagcgaaacttcgtgaagcatcggccgacgaagctgaagagcctccttcggttggtcaaacactggtaccagcagtatgtgagagacaagtgcccccgggccaacctgccccctctctatgccctggagctgctcactgtctatgcctgggaagcgggcacccgggaggatgccaacttcaggctggatgaaggcctcgccacggtgatggagctgctccaggatcatgagctcctctgtatctactggaccaagcactacacgctgcagcacccggtcatcgaggcctgtgtcaggagacagctcaggggacaaaggcctatcatcctggacccagcagaccccaccaacaatgtggcagaaggctacagatgggacatagtggctcagcgggccaaccagtgtctgaaacaggactgttgctatgacaacagggacagccccgtccccagctggagggtgaagagagcacccgatatccaggtgaccgtgcaggagtgggggcactcggatttaaccttctgggtgaacccttatgaacccataaagaaactgaaagagaaaatccaactgagccagggctacttgggcctgcagcgtctgtcctttcaggagcccggcggagaacgtcagctcatcagaagccattgcacgctcgcctactacggaatcttctgcgacacccacatctgcctgctggacaccatctcccctgagatccaggtctttgtgaaaaacccggatggcaggagccacgcctatgcgatccacccgcttgattacgtcctgaacctgttttattgtctcatcctagactcagcctagttgcctctccttcccgtcctctgcccggatggtccacgtcttcagtaccttgccagcagggagtcagagggggtgtgagaagtcgtgtacagccagacactcttgtgtgacaatggaattctgcagtcccctgggaagtcatgccaggacctctgccttcctcgtggcctcactgtcaagactgtgtcagtgaatagctggcctcacagactattctcacatgttcagagaaagccaaaccatcttcctaaccaatcacagggaccctgcttgaggttgtcccacctccaaattcttcccagtgacctccatcagggcggctctgaagccttcccctgtgcccccaaccacttctgcctgccttcgactatccaaggcaaggtaggaggggatcaagttcctttcaaatggagaataaaaaagccattgtttcttcccagatgag

SEQ ID NO: 59 - protein, 935 aa, Mus musculus
TGSPCSFTFNSCQSLVSVSSFSKEGGAERFSSFHATLHPIVSSRERCRKLLPSELSRSSEDLSRGQAGPAEMDPFPDLYATPGDSLDHFLEHSLQPQRDWKEEGQDAWERIERFFREQCFRDELLLDQEVRVIKVVKGGSSGKGTTLNHRSDQDMILFLSCFSSFEEQARNREVVISFIKKRLIHCSRSLAYNIIVLTEGKRAPRSLTLKCLRRKYGRGAVLPSKYALELLTIYAWEMGTESSDSFNLDEGFVAVMELLVNYRDICIYWTKYYNFQNEVVRNFLKKQLKGDRPIILDPADPTNNLGRRKGWEQVAAEAAFCLLQVCCTTVGPSWNVQRARDVQVRVKQTGTVDWTLWTNPYSPIRKMKAEIRREKNFGGELRISFQEPGGERQLLSSRKTLADYGIFSKVNIQVLETFPPEILVFVKYPGGQSKPFTIDPDDTILDLKEKIEDAGGPCAEDQVLLLDDEELEDDESLKELEIKDCDTIILIRWLQPTREWKEEVLETVQTVEQFLRQENFREDRGPARDVRVLKVLKVGCFGNGTVLRSTTDVELVVFLSCFHSFQEEAKHHQAVLRLIQKRMYYCQELMDLGLSNLSVTNRVPSSLIFTIQTRETWETITVTVVPAYRALGPSCPSSEVYANLIKANGYPGNFSPSFSELQRNFVKHRPTKLKSLLRLVKHWYQQYVRDKCPRANLPPLYALELLTVYAWEAGTREDANFRLDEGLATVMELLQDHELLCIYWTKHYTLQHPVIEACVRRQLRGQRPIILDPADPTNNVAEGYRWDIVAQRANQCLKQDCCYDNRDSPVPSWRVKRAPDIQVTVQEWGHSDLTFWVNPYEPIKKLKEKIQLSQGYLGLQRLSFQEPGGERQLIRSHCTLAYYGIFCDTHICLLDTISPEIQVFVKNPDGRSHAYAIHPLDYVLNLFYCLILDSA

SEQ ID NO: 60 - DNA, 38690 bp, Homo sapiens
tctgatgtctgatggcaggagaagatgaatgtcccagctcccaaggaggatggcaaattcatcacccttccttcacattttgttctgtccaggctctcagtggattggacggtgcccacctacattagtgagggcagatcttcatccctcagtgtactcattcaaatgctaatctcctctggaaatagccttacaggcacacccagcgataatgttttactctctgggcatcctgatacctaaaattaactgtcatgtggatccaggagtccagatgatgccagagggggtgccagctggtttatgtgccaggccaactctccctgacaatcacacacacagacctgcatagcacttccgttacaccgacccatttccgcagagcagcacaaagactacagggaagctagaagcagacgtggcggggatgcctgcagctgcaagaagatgcctgggaacagacacagaaactctcgctcccagataagcaaaacacagcagcacaaaggcagctgtttgaataaattcattggagagtctaaggcagcaatccggaccaagctgtaaaggagataagacagaaataatcacacaacagacaggccttaaaggtactggggttctccgccgggcccggtggctcacacctgtaatcccagcactttgggagcctgaggtgggtggatcacctgaggtcaggagttcaagaccagcctgaccaatatggtgagaccctatctctactaaaaatacaaaaattagccaggcatggtggtgtgcacctgtggtcccggcaactcaagaggctgagacaagagaatttcttgaacctgggaggcagaggttgcagtgaagtgaaatcatgccactgtactccagcctgggcaagagagcaagactccatctcaaaaaacaaaaggtaccggggttctcacagcttaatggaacttagcaagtctttttttttttttttttggcctctgaccttctagttgaaacaaaattagttaccaatagacttaggcgaatgccatacggcacataggcacataacctcaacctatataagcactaagaaaatggtaacactttgagttggtctggtggaattatctccctgtatcttgttacagcaataaattcccttcttttctagtttctctgcttctcgttattgggcctcgagaaaatgcagccggacccggcttggttctgggcatagtgaatcactccacaacatccatttttctgttcaatgattctgtgacttggctgagcagttttcctggtctgatctggctcacctgccacaggagatctacaccagctccacccacgtgtctggcagttggttcaatatcagctgggaaggctgggcgtggtggctcatgcttgtaatctcagcactttgggaggccgaggtgggtggatcacctgaggtcaggagtttgagaccagcctggccaacatggtggaaccccgtctctactaaaaacacaaaaaattagccggatgtggtggcgggcgcctgtactcccagctactcgggaggctgaggcaggagaatcacttgaaccaaggagctggaggttgctatgagctgagatcatgccactacactccagcctgggcaataagagtgaaactccgtctaaagaaaaaacaaacaaactatatatgtattttatatatatatatattatatatatagtgatatatatattatatatagtgatatatatattatatatagtgatatatatattatatatagtgatatatataatatatagtgatatatataatatatagtgatatatataaatatatagtgatatatatataatatatagtgatatatattatatatagtgatatatataatatatataatatatagtgatatatatagtgtgtgtgtatatgtatatatatgtatatgtgtatatgtatatatatgtgtatgtgtatatatatatatatatatatgtgtgtgtgtgtgtgtgtgtatatatatcagctgagaaaatagggctgccttcaccgtaggtttctccttacccaataggccaacctgagcttgtgcatgtggtcactgggctctgacaggagcaagagaaagagcaagtccccctaggccggcactttttaagcatctgcttgcatcgcgtttgctaatgtctcactggccaaaacaagtcacatggccaagccttgatttgaaggaaatagagaaataaactccacctcttgctgggaggagctgcaaagccagccttgtagaggagtgtgtatacagggaggagaggaaattggcagcattattctatgcattgttagcctttttttttttttttttttttctttgagacggagtctcgctctgttgcccatgctggagtgcagtggtgcgatctcggttcactgcaaactccgcctcccggttcaagcaattctcccatctcagcctccctagttgctgggattacaggcacccgccactgcgctctgttaattttttgtatttttagtagagacagggtttcaccatttggccaggctgaactcgaactcctgacctctcaggtgatctgcccatctcagcctcccaaagtgctgggattacaggcatgagccaccacacccagcctgtgagccattttcttctataatctctctccatgaataggaaacttggccctgctttctatcaaggcattctccgccacctcataagacacatctgtgggtgcctactcacccattaggatgcatgagcaaacctgcaagttcaagggagttaacaccccatggagcaacccataaccaaggggaaggccagaaccagtggcccctcttctacctctcagatggacaattttttctttttttaaacagggtctcactcccttgcccaggctggagtacagtggagtgatcagggctcactgcagccttgacttcccacattcaggagatcctcctatctcagccctgtctgaggtagcaagaccccatctctacaaacaattttctgaaaattaaccaggcatggtgcctgtagctctacctactcaggaggctgaggtgggaggatcacttgagtctaggagttcgacaccagcttgggcaacatagtgagaccctgtctcaacaacaacaacaaaaaacaatttaaaattagccaggtgtggtggcttgtgcctgtagtcccagctactcaggaggctgaggtgggaggatcacttaagcccaagaggtcgaggttacagtgagttgtgatcatgccactgcactccagcctgggcgaatgagcaagacaacatcaaaaaaaaaggaagagaaaagagagagagagagatgacagaaagaaagagaaagaaaggaaggaaggaaggaaggaagaagaaagaaagaaagaaagaaagaaagaaagaaagaaagaaagaaagaaagaaagaaagaaagaaagaaagaaagaaagaaagaaagaaagaaaaagagaaagagttcctcagattggctttctctgcttcctaatcccccacacttaccccttgagatcatttcccagaacaaaccaccttcatgcaaccccttgtctcatgctctgcattgaggggaatccaagctaagacaacactcatctttgtgtctctttctcctgctcaaaacctagctcagccccttcctatccactggctcttctccctccctgcagatgcctgctcaactgggtggtattttaacaaaccataaaaccaacacattactgatttcatgttcccttttgaaatcctcaaatgtcatccaacatattaatgatcaaataattgaaagctatgtaaccctcagagatttcacgaagtcgaataaaaaaccaataggttaaggtctgaatgtttattgtttgaataacttctatattgccttgaagttcattgtcagtcatcgtaaccatatggcaaatgtttggagtcttaaccggttgttgacttagctttgtgaaattgtcactgctctttaaatcctcataatatggtattgctgaaggatcaggtactaccaaacactggaaatataagaacttttataatttatgtaattaaaatatgtgatgctttccacttggggttagccagtttgaaaagttaaattggaatgtgtcatgatggacaaactccttgaaagaatcatctgcacttctggtctccatgcccccgaccccacccagcctaatctggcttcagctccctcctctcgcctaaaactgtgcccaccttgatcaccagtcgttttcttgagtacttttcaggtctgtatttcttaacttttcagaagcattcagcaatgtgggtgacttttttttaactctggttatgcccacctctttggccaccccagcaggtaccgcctaaatttctcttcctctgctcatcacttaaatttggggcttggccaggcatagcagttcatgcctgcaatctcagcactttgggatgctgaggtgggaggattgcttgagccggggttcgaggctgcagtgagctatgattgcaccactgctctccagcctgggagatggaacgagactctgtctctacattagttcattttggtgtgattcattcttccccaaggtaccagtgaccacgtgtatactgagggaaatcaaatatgtctttacatggagcaggtcactcgcttctcatccttgggtactaccaaatcattatccaaaatgcacccctcgaactccccacagccatacccactcctccttctctccttgggaatggtggctccaacagttactcaaggacacaagccagagagctgggagtcatccctgtcttctccttgcccctcacctatagtcaacaagaagccctgcccacccttcttccaaaatagacctagaatccaacccctcttctccacctgcactgcttccagccttgtcttgggcctcactgcttatcacctgcacccctgcgaagtgtcctaatgcatttccctgcatctgcccttgccctctgcggttcgtcctcaccatggaagcagccagaccaatcttaactccactacatgccactcccctaaatttgccactgccctcaggacaaaaagcagattcacctggcactcatttaacccagtggatcatttccatttcttcttcttcttcttctcctttttttttttttttttttttgagacagggtctcactctgtcacccaggctggagtgcagtagcatgatcatggctcactgcagccgcgacctccctggactgaggtgatcctcctacctcagcctcctgagtagctgggactatgggcactcaccatcatacctggctaatttttgtatttttttgtagagatggggttttgccatgttgcccaggctgatcttgaattcctgggctcaagcgatcctcccatcttgactttcaaagtgctgggatttcaggtgtgagccaccatgcccatcccatttcctctttcttaaaacaatatcttcacttggccttcaaaccatcactcctgatttctcttccacctcactagctacttcttttccttcttctttgctggactcgtgcaactccctaaactccgaataatattaagtgctctggggctcagtcctgggtctttttctcttcctgctgtgtcatcactcccttggtgatctcattcagtgtcatggctttaaacatccctatgccggtgacccccacattttatctcaagtccagacctcctccctgtaatacagactcgcatatccaactccccaccacatatctccacctgggtctctgacagacaccccaaacttcagttccaaaactgagttccttcctcatctccatgcccagcctatcccacctcagttaagggcagttcaacctttctgttgctaaggccaaaagccccggacttagaccttgactctgatctttctctctcatcatactctacccattagcaagacctgtcagccttggagtcaaaatatatccagcggaatgacatgatgtccagattcacttccaaataacacagtagggaatctagggatgggggtagaattgaaaccagactgtctataagttgatcattgttgaaactggtgatggtacatggaggttcattgtattattccactttgtttgaaatgttccaaaatcagaaaaattaaaacatactatttcactgctaccactctgatccaagtcaactgacctcttgcctggactgttgcagtagcctcctaaccatacttctgcctccactttcacctccactccaccctctgcttctaatttaatttcctcccagcagccaatgtgattaattccattaaaatgaaagaccgtgtcactcctccactcaaaactctccaatgtatggtgtcagactcctacagaacaacaaaaaatgctccccagtggttccccatttcattcagagtaaagccaactcctaacagtcgtcttcaagatcctatccactcctgctccttgtttatggaataaatctttttaaaaagatcttatatcctggctgggtgcggtggctcacgcctgtaatcccagcactttgggaggccgaggcgggtggatcgcctgaggtcaggagttagagaccagcctggccaacatggtgaaacaccgtctctactaaaagtacaaaaatcagctaggtgtggcggtgggcaccttgaatcccagctgctcaggaggctgaggcaggagaatcgcttgaacctgggaggtggaggttgcagtgagccgagattgtgccattgcactctagcctgggcaacaattgtgaaactccatctcaaaaaaaaaaaaaaaaaggatcctgtatctatttgccttgccaccctttactacttaaaccgcattcccttccactctctgctcttgatcactccgttccaggcacactgatgttccttatacttgccaccgggcagtaccaccacagggtcctcgtactttccactccttctgccatgaagaatcttcttccttctgttacacacgtggctcactctaccttcttttttttttttttttttgagacggagtctcgctggagttcagtggtgcaatcttggctcactgcaagctttgcctcctgggttcacgccattctcctgcctcagcgtcccgaatagctgggactacaggtgcctgccaccacgcccggctaattttttgtacttttagtagagatggggtttcaccgtattaaccaggatggtctcgatctcctgaccttgtgatccacccgtcttggcctcccaaactcttcaccttcttatgtctttgctcagatgtctccttttcagggaggccttccctaatcaccttatgtaagactgaaacctaaatacatgcccccaacacacacacacacacacacacacacacacacacacacaacctcttaatcccttctcttgctttgtttttctgcttagcacttatcaccatcttctttactataattttacctatttatcctatttgttgtttgtctccactaccagaaagaaaactatctgcaggtagggatttttcactactgtttgttcactgttgtatccacagcacctgcctggcacagagtaggtgcccagtaagtatctgttgaatgagtgaacgaatgagtgaatagcactccaagattcaatcctgcccacctgtccaggtacatttctaacctctcccctgctcaccctttcatcccaaggcacacagcacacttgagtccctggcatatcctagcattatttatacttctcagcctctatgctgtaccctcatcctcctggctggagtgccagtcttttttattttttatttggagacagagtctcatgctgtcacccaggctggagtgcagtggcaccatgatagttcactgcagcctgaaactcctagactcaagtggtcctcccacctcagcctcccaagtagctggggctacaggtggacaccaccacacctagctattttttaaaaaactttttgtttttaaaacaaaaactggagttttaaactccaggccaccactgcctctcacctgcaccactgtgcagtgtcctgaccatctccctacatctgttcttgcccttgcaatcatcctcaccacagaagcagagaagttacaagtgtggcaaagggcagaccggaattcaaagccaatgtggagtggggagttggatacatgagtctggatttcagggaagaggtatggatttaagatacaaatgtgggagtcactgggtatggtggctcacgcctgtaatcccagcactttgggaggccgaggagggcagatcaggagttcaagaccagcctgggcaacatggtgaaacactgtctctactaaaaatacaaaaagttagccaggcgcggtggcgggctcctgtaatcccagctccttgggaggctgaggcacaagaatcgcctgaacccgggaggcagaggttgcagtgagccgagattgtgtcactgaactccagcctgggcgagacagtgagactccatctcaaaaataaacaaataaataaaaataaaattaaaatgtggaagttgccagagtaaaaacatttaaacgctggctgaaatcaccaagggagtaagtctagaacaagaagagaaaaggacccaggactaagccctggagcacttaatattattcagagtttgggaagttgcaggcgtccagctatgttgcccaggctggtcttgaactcctggcctcaagtgatcctctcaccttggcctcccaaagtgctgggactacaagcatgagccaccatgcccagcccggatccccggtctttaagattcctctcaagcaggtgtctgctaacaccaaatgaaactcatctgccggcttcatgttttcatgcttttttcctacttaactcatcgcactggacttttgcagtctcttttttctgtgtctcctccaccgttctgggagtccccttggaacaggaacctcatcttattttgtcttcttggctcaatgcatgaacttcttggttcagtgcgtgaatcataatacctgttaaacccactctatgggccgggcgcggtggctcacgctgtaatcctagcactgtgggaggccaaggtgggcggatcatttgaggtcaggagtttgagaccagcctgaccaaaatggtgagacccccgtctctactaaaaatacaaaaaaaaaattagccgggcgtggtggcacatgtctgtagtcccagctactagggaggctgaggcaggagaatcgcttgaacccgtgaggcagaggttgtagtgagctgagattgcaccactgcactccagcctgggcaacagagcaagacccggccaaaaaaaaaaaaaaaaaaacaaaaaaacaaaaaaacccactctatgaatagtgagggtcaaagaggttagagtctggcacaggtagactagaattcccagtctgttctcttgggctccagattctcactccaccacctgaacactagtgagtcccttccgttcccaagcctcaatttccttagacagatgtaagcagttgaattgactaacaactatccaaccccaacctactgggcaagttgcctcctttggggtcaaacactatccaacttcagtttcccaacgtcataaaggagaactctaaaagttgagaatcgaaactgatgacagattgactagacggccagcctgttaaggtggccccagatattccagcctcagcccagagtcctcctgtgcccctactgcagcaagggtgtctccaagaagggggacctggagtcagcccgtcacacctggtttcctctctgctagggtccctcctcccacagagcactggagggcagctgaggaggagctaccttaaaaaaggaggtgtgtgccagggagctgggtaggagcctggctatatatctgcccagcagcggtactctcgggacagagatggcactgatgcaggaactgtatagcacaccagcctccaggctggactccttcgtggctcagtggctgcagccccaccgggagtggaaggaagaggtgctagacgctgtgcggaccgtggaggagtttctgaggcaggagcatttccaggggaagcgtgggctggaccaggatgtgcgggtgctgaaggtagtcaaggtaagactgggctcctccagcccccacgcaagacaaaacccagtatcagagtccacgtccctggggatgctggggacccctgtcctccttatccctagcccatgctgatgacatctcagaataccccatcccacctagctgtctacaccccaccgcaccactgccttgagtagaatgagtctagtaataatagctcacatttgggggctcactggactaacctcttaacatacactatctctaattcttgcactctgtgagataggtactattctttgcccagtttacagattagcaaatggaggctcagaaccaatacaatgcgaggtccttggttggatcctagtgtgaatgaaccatctgtaaaatacagtttggggacaactggcctagatatcagatagtacatatatctgatataggaaatcattgttgattttgttaggtgtaacagtagttttgtggttatcagaaggttgtcttttgtttggacacgaacactgaagtattttagggacaaagttccttggtgcctataatttactttaacgtggcttagattaagcacatgtagccaggaatttagacttgttgaatcaactagttgggtatatgagtgttagttgtatcatctatttttctatgtgttttaactttttgataataaaatgactttttttttttttagagacagggtctcgctctgtcacccaggctggagtgcagtggcacaatcaccactcactgtagcctcaatctccctgagctcaggtgatcctcagcctcctaaatagcttgggattacaggcatgcaccaccatgctcagctaatttttgtattttttgtagagatagggtttcaccaatgttgcccatgctggtctcgaactcctgggatcaagaatatgcccaccttggcctcccaaagtgctgggattacaggtgtgagccaccatgtctggccggccaataaaatgatttttgtttttgttttttttttttgagacagagtcttgctctgtcaccaggctggagtgcagtggcacgatctcagctcactgcaacctctgcctcccaggttcaagcaattcccctgcctcagcctcccaagtagctgggacgacagcgcccaccaccacgcccggctaattttttgtattttagtagagacagggtttcaccgtgttggctaggatggtctcgatctcctgacctcatgatctgccctcctcggcctcccaaagtgctgggattacagtgagccactgcactcggcctaaaatgattttttaatggaggctcagagaggtgaggtgacttgcccaaggtcacacagtgttgaagctgggatttgaacttgactcaagggacccaagcccccctcactgagattttcccccaagcccttcctccagctgtttcatgccaccgcctgtgctagctaagatcaaaattcaagagggtcggagctagaaagactttggagaatcagacagtctcaccaatgactcacttaaaaaattaagtaaaccgaggcacagagagggtgagagataccccaaggtcacacagcgagttggtggcaaaggcaagactagaattaggacccctgactcccagcccagtgctcaagttctctctctaggggcaaccaactcacagagggatctagaagccctgggcccctatccgttctttgcacctatccccagcatatgaagcctgaggccatacaatttataagtgagaaaccacaaattttgatattagacagactcttcgcttcttcctttaccagctgtgtggttttgaccttcccactcttctttctcaaacccacattcttttcatctgtgattggggcatcatcatcatctctccctcaccaagccagtggtgcaatgcaggctgaatgattcatgcacgataaatgctcagaaacagaagcatcattataattcttgccaagctttcttctgggcctgggactcaagtctgactctggcagaccctcctagaccaccccctccccaacaaacttgagaataaagtggagggaataaggaatgtctggtaagaggaggatgctacaagaataagtttattgtgtgtgtgtgtgttccaccacgcctggctaatctttgcatttttagtagagacggggttccatcatgttggccaggctggtctcgaactcctgacctcaagtgatccacccacctcggcctccccaaatgctgggattacaggtgtgaaccaccacgcccggccaagaatgagtttttacggcaggaaatgctatttacctaagcctcaaatacttcctgcacatcatagccacttttcctcttgaaaccactaaatggtagcaatccccagtgagccatgactaatgaggaataatatatcttatttagagtctaaaccctcccgttccccaccctctgaaaatctagtgagcggagctggtccacataagggaatgctcgtcttcaaatgaattgtgcttaaataggtttaaaactgaagcaaatcaggaagcctgttctggatgtgttcttttctctctgcctggatcttaccagtgggaaaggcagaaagggaagtctacgccaggcacagtggctcacgcctgtaatcccagcactttgggaggccaaggtgggaggattgcttgagcccaggaattcgagaccagcctgggcaaaatggtgagacccccgactctacaaaaatatatataaaaaattagctgggcatggcggtgcatgcctgtagttccagctactccggaggctgaggtgggaggattgcttaagcccaggaggtcgaggcttcagtgagtgaagatcgtgccattgcactccagcctgggcaacagagcaagaccctgtctcaaaaagaaagggaagtctagactggccttcggggggaatgtgtccttcattcacacacagggtgccatctccaaccctctcccagggggtggaggtgctgggtctgaatgcccatggtcccttggaagcagggcctggctcacagccttgggtcacgaggaagaaagaggcggaagaaccatcccctacttgagttctggctctttctctgactctgctgccttctggctgggagaccatggcaagctcctcactgcctcagtcttctcatctgtacattggagataattctcctagtacccacctcaatacaggaagtgaaggcgtttttttttgttttgttttgttttgtttagatggagtctcgctgtgtcgcccaggctggagtgtagtggcgagatctcagctcaccacaacctctgcctcctgggttcaagcgattctcctgccttagcttccccagtagctcggattacaggtgcacacaaccacacctggctaatttttgtatttttagtagagatgtgctttcaccatgttggccaggctgatctcgaactcctgacctcatgatccgcccaccttggcctcccaaagtgctgagattacaggcatgagccatcatgcctggctgggaagtaaagattaaaaggaataatatgtatacagggctctcatgggtgccagacacagggcgtgctcatgtcatccagcatccgtgctcatgtcacacagggcatgttatatcatccggcaacagctggaatctgattcttgtgcagtgactccaaccaccaagaaaagtagccctctgggggtctgatgcctccctagcaattccacctcccaacacagaatgagaaggagaggaggccagagagttgtggcgctttgcataccagaggcaccagggcctggagagctcatctagaatctcaaaacatcgaaaaatcccttctcgacctccttccattactaacaggaaaactgaccccccggcagcagaagagattgtctaagtcagctggataatgagaagaaagagaaatgtattgctgacttcctgtgtgccaggcaccccaccaaacgcttggcatacattatttcatctgatcctcccagtagcccagtgactcttgttccaacattactttcattttacagatgagggtctcaggagtcagaatgtttacccagctaagaaacagggaagagtcaagatctttttcaggctgctccatttcacagcctatggctcttaaatccaccaggcaaacttgctccttgctttataatgtcatgaaattattcagccccaccaccacccccagaatcctcaaacaaccctatggagtagatgctaccattcctctggagtaggccttactctgtgggtaagaagactgggtctcagaagcaatgcagtgtagtagataagaagctgggcatttggggaggccaagggggcaaatcgcttgagtccaggagttcgagaccagcctgggcgacatgccaaaacccagtcactacaaaaaatacaaaaattagccaggcatggtggcgcaggcctgtagtcctagctacttgggagactgaggtgggaggattgcttgagccaagatcatgccactgcagcccagcctgggcaacgggagtgaaaccctgtgtaaaaaaaaaaaaaagagtctgggctctgagggctgcaaactgcgagacctgagacaaatgactaatgaggagaaagacaaatgtgttgctgacttcctgtgtgccaggcaccccaccaaacccttggcatacattatttcatctgatcctcccagtagcccagtgactcatattctgccattgctttcattttagagatgaaggtcttaggagtcagaacatttacctagctaagaaacagggaagtgtcaagatctttttcaggctgccccatttctccatcccatgtctcgagatcctccagacatctcagttttctcacctgtaaagtgtgggtattagtactacccacaacccatccctcagcgggtggtgagcattcagtgagacagtgcatgtgaagtgccgcaggggttgcctggctcatggcagtgggcctcagggtgacggggctctgtgttctgcaggtgggctccttcgggaatggcacggttctcaggagcaccagagaggtggagctggtggcgtttctgagctgtttccacagcttccaggaggcagccaagcatcacaaagatgttctgaggctgatatggaaaaccatgtggcaaagccaggacctgctggacctcgggctcgaggacctgaggatggagcagagagtccccgatgctctcgtcttcaccatccagaccagggggactgcggagcccatcacggtcaccattgtgcctgcctacagagccctgggtaaggggaggggaagctcacccgactcacacacttgcccaccccaggagacttcccagtgtctcacctttactcatggccacgtgcacacacccacatttattcatttcatctgtgtcctatgcttggggctgggttattgcagtgcacaggattaactcaactctggctatcatattgctcaacttggaatacagaaattgaccaaagaattgcagagataaatacatgattgcagcctgggcgcggtggctcacgcctgtaatcccagcactttgggaggccaaggcaggtggatcatgaggtcaggagttgaagaccagcctggccaagatggtgaaataccatctctactaaaaatacaaaaaattagctgggtgtggtggtgggcgcctgtaatcccagctactcaggagggtgaggcagagaatcacttgaacccaggaggcggaggttgcagtgagtcaagatcgcgccattgcactccagcctgggcaacagagcaagactccgtctcaaaaaaacaaaaaacaaaaaaacaaacaaaaaaacatgattgcaaatggtgtaaatgctcagagaaaaagaatggggtggcctgggtaaccacagaaagggtgctcaggaagtgactttctggggaaacaacattcaggaggctctgacacccagtgaggggaaggagctaaaagtgggagtgggggtctgtcactgcattttatagaagcagatcctaagacatggatgtgaggatacgcagtttatttgggtattcctcccaggaaacaccggtagggaagtatggaactgagatgggaaaggcaagaattcaatacaacgtgcgtccatgggcaagtcaccaccctgagcttcatgtcctgggagaactcacagtcccattatggagcgaacctcttcgggatcccaagtgggacgctggcgtgcttactcaccagcttcccagccgtcactggttgggggctgctttgggagcactaactcactggcccctgttgtttgtcctcgggcagagtcctaggtgtttgaagtaaaacctacatgctgcaagcccagatcctagaggtttcatctcatgtgctaactcctatcagctgtagtggctggctgcgtggagttgctctttggagaaggtataagagacaggatctgattttagcaaggaagagagtgctgggatgtctcagtgatgtgtaccatggaactggttcctggttctccctatgagtttatatatatatatattttttgagacggagtctcgctctgtcgcccaggctggagtgcagtgccgtgatctcggctcactgcaacctccacctccagggttcaagtgattctccagcctcagcctcccgagtagctgggattacagcccgccaccatgccatgcctggctaatttttctatttttagtagagataggatttcaccatgttggccaggctgatttcaaactcctaacctcaggtgatccgcccacctcggcctcccaaagtgctgggattacaggcttaagccaccacacccggcctccctatgagtattgaaagagatacaaaacagatattaaagaaaatgagggacattgaggacatccagggaggggtctgatgcatggaaagcccaatgttggttctccagagtaagaatttcacaaaaaggacaattagacaaggcaaacctttggtttctgaagatatgaggtctcaagtgtccctggagggatacttccaatgtaaaggcaggctctccccaaaatactacttaccaccctctggcttcctcaatccccaatctcttcctttgctccttcactcctcagggccttctcttcccaactcccagccaccccctgaggtctatgtgagcctgatcaaggcctgcggtggtcctggaaatttctgcccatccttcagcgagctgcagagaaatttcgtgaaacatcggccaactaagctgaagagcctcctgcgcctggtgaaacactggtaccagcaggtgagggggctgccaggatggcaggggcaaggagagggaagagggtgaggaggaaaggcagggcctgattttcatctcaggaagctgcagccaggggaaatggaagcaggtagagagggagagaatgctagtcttttgaaatgtaaagtgaaaccgtcagtgaagaaggtggaaaaggaggagaggaggaggaagaggagaaagaaacagagaaggaaggagaaaaataggtgctctacagtatttcagtaaactagttatttttattttattttattatttttttttgagacaggatcttgctttgttgcccaggctgtagtgcggtggtgcaatcaccactcactgtagcctccacctccctggatcaagacctccctggctcaagtgatcctcccaccttagcctcctaagtaactgggactacaggcatgcacaaccatgcccagctaattttttttatttttcttttgtagagacagggtctcactatgttgaccagcctggtttcgaagtggtctcaagcgatcctcccaccttggcctcccaaagtgctgggattacaggcacgagccaccacacccaccccacatgttcttgttacccttcaattacagtctaggcctggcagatgtcagcttcgccgggtactgtggccattcgtcacagcaggttaaggactaacaaggggaaggatttctttaattccaccccaggagtcgaaaagagggcatgtgtgagtgtaaacagccctcagggacatttctcaggcagcagctcagtcagttttggaaacaaaatcttcctccgagataacggaaactccaactgcaaaacagaactcagagacaaaaatcatttattatatagaacttgcagagaagttacaagggaatcagacagcagaaggaaagatttgatccaataaaaataaaataggctgggcatgatggctcacgcctgtaatcccagcattttgggaggccgaggtgggcagatcatgagatcaggagatcgagaccatcctggctaacacagtgaaaccccatctctactaaaaatacaaaaaaatagccaggcgtggtggcgggtgcctgtagtcccagctactcgggaggctgaggcaggagaatggtgtgaacccaggaggcggagcttgcagtgagccgagatcgcgccactgtactccagcctgggcaagagagcaagactctgtctcaaaaaataaaataaaatataacagggatttaaagaaaaaacaattaccggccaaatgtggtagctcacgcctgtaatttcagcactttaggaggctgaggtaggaggatcacttgagcccaagggttcaagaccagcctgagcaacatagtgaaaccccgtctctacaaaaaatacaaaaatacaaaaattagctgggggtggtgatgggttcctgtagtctcagctgctcaggaggctgaggaggaaggatcacttgagccccggaggtgaagtaagttgagctgggtattttttttatctattcactaaggcttacatcttacagattacaggcatcctacattttatatatcatctaagttttaagaatgtaacatttcactaatattgaagaaaataagttatattaccatgagtttaaatttctaacaaaattataatgttattagttatggtttacaaaattgagtgttaaggatgaatttgcaaaaagttacaaaacaaattaattaacttataatttttttttttttgagacagagtcttgctctgtcgcccaggctggaatgcagtggcgcaatctcagctcactgcaagctccgcctcccgggttcatgccattctcctgcctcaacctcccgagtagctgggactacaggtgcccgccaccatgcacagctaattttttatatttttagtagagacggggtttcaccgtgttagccaggatggtctcgatctcctgaccttgtgatccacctgccttggcctcccaaagtgctgggattacaggcgtgagccactgagcccagccttataaatacattttaattcaaaattgaatttctaaggtcaaggataaagtttttttgttagtaagtcagtgacctataggaaaggcccaaggtttcatttatttgggagatgagaattatacaagatgattctgtgtttgtttcaaggccaaagtgttatagcttttttttttctcctctgactttgggatgggagctaatattcatatatgatggccataggaaaatatgtcagttttacttccacaaatcaaactactgaatatttgaccaaaatttttcactttctggctaaatatcaatgtatcagtgaaattctttttttttttttttttttttctgagacaagttctcactcttgcccaggctggagtgcagtggcatgatcttggttcactgcaacctcctcctcctgggttcaagcgattctcccgcctcagcctcccaagtagctgggattacaggcacctgccaccacacctggctaatttttgtatttttagtagagacggggtttcaccatgttggccaagctggtctcgaactcctggcctcaagtgatccacccgcctcggcctcccaaggtgctgggattacgggcgggaggcactgcgcccggcctcagtgagattcttaacacaggaagtgaccactgtcagttaagatgcttccttttgcaagtaagagaaaaacacaaaaaccaactcaaactggcttaaacaataaagggaattatcagcttatgtaggaaaacccctaaacagtagggggggcgggcggggggggcgggtttcaggcactggtgagggcactggctctgtttctctggaattctctcagcttctcattcctctatatgtcagcttggtcctttggcttgtttccctcttggtggcaaaatggccacaactattcctgccctcatattcacacatgggaggacttctcttctttcaaccactgaacaaaagaactaggctttactctagttgagccaacttagatcgcatgccttctcttgaagcaatcacttgcaagggggaaaggtttatgctgataggactgtgccagtcagggcccatcctggagctgcgggtgggggtcaaccccttccaaacatcatggctactatgcaatggggaaggaaagaatgtctgctagagaggcaaccccaatcttcactacagaatctcacctattaccattttttccctctatctaaggaaacctttcctttcttttaagaaacatttctcagcagctcaatacattaaaatagatttaaatgggactgcttaggctagaatgtttgtgaccgagcgcaatctgctcatacctgttcataagttcattccaggagttacatctgttgagcatatattgaagcccaatggactaactcagccctttaattctaaaatggtgaaacctatgtctagagatggaatgtgacatggccaaggtcacacagccagtaggcagcagagccaggactagaacttggatttctcagcttctggtccaacgccatccttacacagaatcttagggtctctctctctctgtcttcccatctctttcaacagtatgtgaaagccaggtcccccagagccaatctgccccctctctatgctcttgaacttctaaccatctatgcctgggaaatgggtactgaagaagacgagaatttcatgttggacgaaggcttcaccactgtgatggacctgctcctggagtatgaagtcatctgtatctactggaccaagtactacacactccacaatgcaatcattgaggattgtgtcagaaaacagctcaaaaaagagaggtactggaccactgtttgcccaccaaatcttacagaaaaaaagagagacgggctagtgtaacgtggcatagagttttatggattggctgtattaagcagtaaggctgccaccatagttgagcatcgacctcccacaccaacacagctggcatctcaagttggtggcttatcaaagtcactggggggccatggggcgggtagaagcctgttccttgtttcctaagccaccctccaccttagcttggccttcttgctctctgaagaccattcagtgctttgtaggagctagcatgggaaaatggaaagaatcttggagactcaagtttaaatcccagctcagccattttcctactgctatgagcctcaatcccttatccataagacaggagtaaactggaacctacgatataggattgatgtaagggttggagaaaatctgtgttaaggatccacaatatctagcatctggcagatgctgagtaaatgcttatattggagcatgtgctgtcagcgtcccattcatatcctctcggcctttaccgttctagggaaggttggttccacttccagctgtcagcacctgcatccctttgccagcagacccactctgagaagagccctccaccagatctggtgggagttggtggataaataccacagctccctcacccaaaagatggaaggaatctgggtctcattgcgtaactttttttttttttttttaagacagagttttgctctgtcacccagggtggagtgcagtggcgcaatctccactcattgcaacctctgcctcctgggttcgagtgattcccctccctcaggcttctgagtagctgagattacaggcgcctacaacccacacccagctgatttttgtatttttgtagagacagtgctttgccatgttggccaggctggtctcaaactcctgacctcaggtgatgcgcctgccttggcctcccaaagtactgggcttacaggcgtgagccaccgcactgggccccattccatactctttcctaaagatcgcctccagtggaccacagtagtaattacttcaatacccactctttgttgtctgccttcccttatctgtctcactgtctcactcccttatttgtgcttcctgggatcactttccaaataagccaaatccttatctggggatctgcttcaggggaagcccaacccagacaactctctgtgttagaagctctgggcctgtgtaagcaacatcacagtatttagtgttctgttatgtagtattgggtctcttttgtaaggaagaaaagccaggtctgctcatgaaaagaggatttattataaccatggccagaaaaatcgagaaagcatcaggacctgagactccctctctctctctgtcactctctctcatgaactacagcacttttcccctcagcctctgcttctctctccacacctgtccggctcccctctgcctcccaggtataagggatctccatcatccccatgtccaaaccccagagagaaccagtctgattcctggtcacgggacacagaccccatgtgttgggtcacctgccagccaacagaatgagccactttagatcagtgaccccaccccataggacagcctggcactttcaggcaggactgttttagggagcagtcagggttgggaggagccagcctggagcccaaagtccagttcattccagtagcctgtgtcacattcgattacacagatgaagtcgcagctccctcccaagccctggagtacaaagggctgggttttttttgtttgtttttgggttttgtttttttttttttaatggagtcttgctctgtcacctaggctggagttcagtggcacgatcttggctcactgcaaccaccacctcctgggttcaagctatcctcccacctcagccacccaagtaactgggactacaggcgcctgccgccatgccctaatttttgtatttttagtagagacacggtttcaccatgttggccagcctggtcttgaactcctgacctcaagtgatctgcccacctcggccccacaaaatgctgggattataggcgtgagccactgcgccccactcaaagagctggtgttaatcatggacttgcagtcaccccaagttaataagcaagcccaagatccccttcaagccaatattctttaaaatatttattcaatatttatagaaaggagagacttttgggggcagcccaacctctgctctgttgaggaggtagatgggtaagagcccccatctactggctgtaagaacttagggcaatctaggccgggcaccggtggctcatgcctgtaatcccagcactttgggaggccaaggcaggtggatcacgaggtcaggagttcaagaccagcctggccaagatggtgaaaccccatctctactaaaaatacaaaaattagctgggcgtggtggcgggtacctgtaatcccagctactcaggaggccgaggcagagaattggctgaacccgggaggtggaagttgcagtgagccgagattgcaccactgcccttcagcctgggcgacagagcgagactctgtctcaaaaaaaaaaaaaaaaaaaaaaaaaggaacttagggaggtctgtaaaaaggggacaaccacaacaataaacaataaaaataacagtccctaccttatagaattgctgtaagattaaaataggttaatctgcataggatttggccttgtgcttcaataaatgtcagtagttggtggcagtggtgtttctactatccaaagtaattcagcagctctaaccttaaacttaaacttgcaaaacctgctccgaaggtacagggccccccctgcctgaaagggcatctgttattactccagcatgcctcttggggcctcattctccccctaaattccttgcaaacacttaaggcactatcccaaagaagaagaatttttttttttttgagacagtctcactcggtcacccaggctggagggtggtggcatgatcttggctcactgcaacctccacctcctgggttcaagcaatgctcctgcctcagccttctgagtaactgggatgacaggtgcgtaccaccacacctggctaattttttgtatttttagtagagacagggtttcaccacgttggccaggctggtcttgaactcctgacctcaagtgatcctcccgcctcagcctcccaaagtgctgggattacaggcgtgagccactgtgcctggcccagataggaattcttggaaatagcattgtctccatcctgttactctcctgcggtgttttggggccctcttgaacatccccgggatgtggatatcacaattctcagtggctggacgaaataattgccgagaaggtttttttctggcttgaaggccttcaaaccattatgagcctgggcacccttttcctgtgttacaggcccatcatcctggatccggccgaccccaccctcaacgtggcagaagggtacagatgggacatcgttgctcagagggcctcccagtgcctgaaacaggactgttgctatgacaacagggagaaccccatctccagctggaacgtgaaggtaatggctcctctctgggctgtcaagggcttgaaggtcagaacgacagataaactactcagtatttactcattcagttctgtgttgatggagaacagaactttagagtcaccgtttaagggccagctgcaccacccatgggctccgtgaacttggacaaattctttggctctcagagccttgggtttcttaccttcaaattcttgttctcctttcctttctttttcccataatttactggagaatcagttctgtgttcctgatcattctttgcgtgagttgggtccagccaagtcagctcaatcagccattctgtgccagtgctgttctcagggatggggtaggggatgtgggctgggggacaacacaggcacagaaataagacatgaccacgacgctcggccaggtgcggtggttcacgcctgtaatcccagcactttgggaggccaagacaggtggatcacttgaggtcaggagttcaagaccagcccggccaacatggaaaaaacccatctctactaaaaaaatacaaaattaggcgggcgtggtggcaggtgcctataatccctgctactccggaggcagaggcaggtgaatcgcttgaacccgggagctgggggctgcagtgagctgagatcgtgccattgcactccagcctggacagcaagagggaaactctgcctcaaaaaaaaaagaaaaaaagaaaaaaaaaagacaccaccctcactctcagagaactcaccctatgttgtcaggaagcaaatccatgaaacaaacttacacaaaactgctagaattaccagagaagacaagatactctgaaaacaaacaaacaaacaaaaaatactaagtcatattattatatgatgccaaacctatagtataggcagagatcacaaaaatctattttattaacatcacactttctagtgtgcaaagctcttgtccaaggtctgtctcagttgatcctcataagcaattctgtaaagtaagaaggtcgagtgttatcactatctttattattattatcatcattactattattgccattttacagaagagaaaactgaggctcagagaggttaattaactaagggcactctgctaagaggcagcagaaccaggggctctgggggtctggaagcagaataaatgttaactgaagtcaccagagaagattcctttaaaaagttaggagttgaaatgagccctaaaggccggggggagatatagacactcagaacagaggacaaaggatgatgaggggtaaaggatgggaggctgggatgagcaagatgtgtacaggacaggagactgaactgcttggagcagaaggcagaagcagaatcagaggctccagtaaggtacatagagtataaacggggggacccgctggccaaatgaggaggcccacccatgggctggaaaatatacgcctctggatttttcctgaatataaaagccattgtaggctgggggcagtggcgcacgcctgtaatcacagcactttgaggggctgaggcgggtggatcccttgagcccaacagttcaagaccagcctaggcaacatggtgaaaccccgtctctactaaaaatacaaaacttggccaggtgcggtggctcacatctgtaatcccagcactttgggaggccgaggtgggcagatcacgaggtcaagagatcgaaaccatcctggccaacatggtaaaacctcatctctactaaaaatacaaaaattagctgggtgtggtggcatgtgcctgtagtcccagctactagggaggctgaggcaggagaatcgcttgaacctgggaggcggaggttgcagtgagccaagatcgtgccactgcactctagcctggcaacagagtgagattccatctgaaaaaaaaaaaaaaaaaaaaagaacaaaacttagccagatgtggtggcacgcacctgtggtcccagctactcaggaaactgaggcgggaggatcgcttcagcttgggaggtcaaggcgcagtgagttaagattgcaccactgcactgcagcctgaggtgacagggcaaggccctgtctcaaaaaacaaaacaaacacacacaacattgtgcaaatattttttatcttggctagtcagaaaacttggcaatgccaggcttatatttctttttctttttctttttttgttttccttttgagacagagtctccctttgttgcccaggctggagtgcagtggtgcgatctcagctcactgcaacctccacctcctgtgttcaagagattctcccacttcagccttccgagtagctgggactacaggcatacgccaccacacccggctaatttttgcattttttggtagagataggttttgccatgttggccaggctggtctcaaactcctgacctcaagtgatctgcccgccttggcctcccaaagtgctgggaatacaggcgtgagccactgcacccagccaaggcttatatttcttctggaaagaatcagctagaggcctgaccctcgccagcattttccaggtgctctccagccacctggggctctcaggccctggagtgtagcctctggaggtggtgagaacacagactctggagtctgaccaacctcacttcacatatctgccctgctccttactacctatgtgattggtgttcagtaaattacctaaccctgctcagtttcctcatcaataacatgggggtaacagtagaaccaaccaactaatagagatgctctgagaataaaatgcattaagggtatggaaggtgctcagcatacagcctggaaagtgcttaccactccctaaacatttgctgctgccgctgctgctgctactattgtaaagataaggacagatgaagggaacatttgcacatcagacaaagaagtgtggacttaacacctctccttctccctctcccttccagagggcacgagacatccacttgacagtggagcagaggggttacccagatttcaacctcatcgtgaacccttatgagcccataaggaaggttaaagagaaaatccggaggaccaggggctactctggcctgcagcgtctgtccttccaggttcctggcagtgagaggcagcttctcagcagcaggtgctccttagccaaatatgggatcttctcccacactcacatctatctgctggagaccatcccctccgagatccaggtcttcgtgaagaatcctgatggtgggagctacgcctatgccatcaaccccaacagcttcatcctgggtctgaagcagcagattgaagaccagcaggggcttcctaaaaagcagcagcagctggaattccaaggccaagtcctgcaggactggttgggtctggggatctatggcatccaagacagtgacactctcatcctctcgaagaagaaaggagaggctctgtttccagccagttagttttctctgggagacttctctgtacatttctgccatgtactccagaactcatcctgtcaatcactctgtcccattgtctactgggaaggtcccaggtcttcaccagttttacaatgagttatcccaggccagacgtggtagctcacacctgtaatcccagaactttgggaggccgaggtgggaggagcgcttgagccgaggagttcaagaccagcctgggtatcacagggagaccccgtctctacaaaataaaaaaataattcactgggtgtggttgtgcacatttgtagtctcaggcactcaagaagctgaggcagaagaatcacttgagcccaggaggctgaagctgcagtgagctgtgatcacaccgctacactcctgcccaggccacagagcaagaccctgtgtctaaaaactaaaacataaaaataagtaaatccgtttaaaaaaaggattatcccagccctgccagggggaggatgaggaggggtgtgaggactaaatatacaaataaatagtgtggtcacatgacgcacagcaacagaattcggacccacagccttctgcagcaatcaaccccaaaccatcaggacttgggcgataactggcagcatctctaactccccaccctactcccatcctgcttcctatttatgaccaacccaagaaacccaaataagctccccagaccaatcacatggttagccccacttctggtgagtgcacttccagcttccccataccaacagcctcaatcacggcatccctgaagccttcccattttcctgcctgtctttaaatctctgtcaaaagcgagagatgggtggctggttcctttgctatagcaagttgggaataaatcgcctttgttagttctcatttgggggctgtttatttccacagggcctaatgctgtcctaatggttattgcttgatcatttgagcttctcaactctaagaaatgaggactggggaaactgaggcaaaaagagacaaagaatgggagattgaggatgatgcagtgtaaaaaaaaatcacctcaactcctaaaacccatacacaaacagtacataatagtcaggaaactgtaggaaagtaatagcatctttattatcaaaggacgtcatgtgatcaggtttactccaagcaataaaaagtttccttttgcccccctgttttgcctagttttctggtgggctactctcctaccatagcatagaaaatgcacactgcaattggttatcaacagcctctggtcaatttagcaatcataatctgtgtatctcccacctctgtttgccttcagggacagaaaaagtgcctcctttccaggaggtagacaggctgttccagtccccatctttgtgtccttcataatgcccagcacagcccacattgtaggtggtgggaaaattcttgtttaaaataaaaaaaagaatgaaaaatgcaatgtcttagtccatctgggctgctaaaacaaaataccatacactggatggctcatgaacaataaccatttatttcttacagctctggaggctgggaagtccaagtcaagacactggcagatttggtgtctggtgaggacctcttcctgattcacagatggcagcttctcactaagtcttcacatggtagaagaggcaaaggtgtctctaggatcgcttctttttttttttttttttttttttgagatggagtctcgctctgtcacccaggctagagtgcattggcatgatctcagctccctgcaacctctgcctccgaggttcaagcgattctcctgcctcagcctcccgagtagctgggactacaggcacctaccactgtgcccagctaattttttttttatttttagtagagacggggtttcaccatcttggccaggctagtctcgaactcctgaccttgtgatccacctgtcttggcctcccacagtgctgggattacagttgtgagccaccatgcctggcctctggggtctcttttatgaaggcattgatccagttcatgagggctcaggacccattatgtaattgaaagattctccgtggggcctgaaagcttaagagaatgaatgacccctccctcccctccctccttgggcccggtcccaaggcgcaaggccactcgcgccagcagcatgtgtcagcaagatagcagaagcgggaagagagcgggccagaagacacctaccccctgaagaccgagagagacgtcatccgggtacaatgtagcggttacaacagactgagaaacttcctgtttacaggagactacaaaacccctgccccgtcctcatttggtgctgacgccattttaagcctcagcccacctgcacacacactgcctcatgttgtctgttggccacgctcttggggttcgaaccaacacaagaccctttcactaattacttcccagaggtcccacctcctaataccatcaccttgggagtaaggactttttggaaattatcagtatcaaaatggagtcacttatgtcaaaccctaacaaatgcctgtcacaaaaattatctcaagaagttcctaaaatccgcagtattatagataaaccacttgcataagaatatttgcctaacagtgggtgtctccacaataagctaaagccaactcctgcaacaggctcctgtgatcaacggtacttgttttaaagaagcttatgtggactttgtcttttctcgttgccacaacctcttttaatgtgcctatagtccactatagcatgcatatctcaaattgcaattccttgcaattctggaataaacgctttattttggagagtcagtctctctgttatttattttacggtgtcaattttaacatatgaattttggaggaacacattcagaccatatcagtcaccttcctcttctttgaaatagaaaaagctcaaggccagagagtttattttagtaaagttttgacatacctgtcttcaaagataaaacatgaaacagcattccacacacaaaagtaaagtgattttgttcatccttcactgtgaggtattttaaccacagagattctaattttttggtcttggatgggtcctgggagtcagtattgcctggctaatttttgtatttttagtagagatggggtttcaccatgttggtcaggctagtctcgaactcctgacctcatgatctgcccgcctcggcctcacaaagtgttgggattacagatgtgagccaccgtgcccggacaggattctgcatttctcttttttttttttcgagacagagtctcagtctgttgcccaggctggagtgcagtggcacgatcttggctcacctcaacctccacctcccaggttcaagtgattttcctgcctcagcctcctgagtagctgggactacaggtgcgtgccaccatgcccagctaatttttgtatttttagtagagatggggtttcactatgttggccaggctggtctcgaactcctgaccttgtgatctgcctgcctcagccccccaaagtgttgggattacaggcgtgagccaccgtgcccagcctggattctgcatttctaacgagctcccaggtgttaccaatgctgctggctcatggactacactcttaagtagtaaggccctaggctattaaaggaaatacagattcctggattccacctatcagagattctgattctgttagtattttctgtgagacccaaaagtctgcagtttaaccagctctctaaggtgtttcttaggcccagctggactgggaaattactagaataaatgacatggaatcaaaacctgggaactaatcctgggtctgtcattaactccttaggagattcccatcccctctggagatctgtcatcaagaaatgattggagaagttaatctcttaggcccttctagctcttgcctttgagaaccgcccacctccccattcccacctggtatccccaacccagtacagttcatggccaatggcggtccaagtcttggaactacaatccccacaatgcctcgcgcctctcctctcacgtgacgtcatgaaggaggcttgataacggcggtgttctccacaatcctttgcggtggttcaagatggcggcgcccagtggcacagtgagcgattcggaaagtagtaacagcagtagcgatgcggaggagctggagcggtgccgcgaggcggcaatgccggcttggggcttggagcaacgcccgcacgtggcagggaagccaagagccggtagggtactatgtttggggagactggctgaggggcgtgggatcttcccctggagcctgagaggatggatggtgaggagagagtcactgggactcggcttccttccccgagagacctccagggactgggtgtagtgcagattgaaagcatgggcaggtgcagtagggagggtatttcattattccagtcggggaagctgaggtacccaaatgtcttttgattctgcctccttgggtctatcctcactgccccacactgggaaggctgccgtctcttcgagataactgcaacagccccctcccggtattctcgcacccagcctttccccacctccaacacattctcccaccctggaggttgttgccaagagcagtgcccagcacatcactctgaccgtgactccctagtgccctgggaataaatacagagccccgcaacatcaaggggcctaatcatggatagaacccaagggttcttgaatttggaatgaaaacatgttgcatctttgctttctattcatctctgactgaattttagcatctctttccgtcttgcaagcactaagccacagtagttctggcaatgccgttactttatcccaacagaagtcacagattttcatatctcattacaatctttgcagatacagatatcaatatatcattttattgataaaaagatattggggaaaaaagtcatttacactcatccctgatttaaaatgtgccactctaatttttagacccatctctatatctaagatgtaagaagcacatacatcacaagtttggttgtttactatcatgataattaaatttcggtatcattggttttctttgtaatcctgtatgttgcatttcatgcatttaaaacattgctctgagaagagaaccgggcttcaccaggctgttagagaaggctatggcaaagcaaggttaagaaccgctggatttgtttaaaaggacttacaagccctttggtgatccattgccttcctctcccttccttccctcctgccatactgcacttcctgtaggtagcttccagaccatagtctgcccctctcaccccctagtaccataaccacagttttctctgcaagttctatttacagatctgcctttccatctcattagcggtgggaacttgagcaaagtacttaaatctcactgtacctaaatttcctcatctgtacagtgcgggtagtgatagtacccaccccataaggttgagaagtaactgagataatgcaatctacagtgcttggcacatcttaaaggcccaatacatggtggcaaatatgtggttggtctttccacatggactgctttcctcctcctgcctaattctcgctcttttttttttcaaaactaggactcagtctgttaccgaggctgacacaatcatggctcactgcaacctcgacctccccctactcagatgatcctcccacctcagcctcccaagtagctgagactacagatgtatagtcccagctactttttgtattttttgtagagatggggttttgccatgttgcccaggctggtctcgaactcctgggctcaagtgatcctcccttctcaaccttcaaagtgctgagattacaggtgtgagccactgtgctcggcttctagttttttttgtttgtttgtttgttttttggggtttttttttttttttgcatttttttttttttgagatggagtttcactcttgttgcccaggctgcagtgcaatggcacgatctcagctcactgcaacctctgcctcctgggttcaagtgattctcctgcctcagcctccctagtagctgggattacaggcgcctgccaccacgcccagctaattttttgtatttttagtacagacagggtttcaccgtgttggccaggctggtctcaaactccagacctcaggcaatccacctgcctcggccttccaaagtgctgggattacaggtgtgagccaccgcgcctggtctctttttttctttttgagacgcagtctcgctctgttaccaaggctggagtgcaatggcgcgatcttggctccctgcaacctccgcctcccaagctcaagcaattctcctgcctcagcctcctaagtagctgggattacaggtgcccaccaccaggcccagctaatttttttttatatttttattagagacagggtttcaccgtgttggccaggctggtctcgaacttatgacctcaggtgatccgcccaccttggcctcccaaagtgctgagattacaggcataagccaccacacccagcctagattacattcttgagtgcgtctagtaatagccaccaggagttgagaattttctttttgcccctgttctaaacactttgtatttgttgtctgttttcatcttcccagcaatgccacaagagggtgtattagccccattttacagaaaactgattctcataatggtaaaataacttggccaaggttgtccaatttgtgagtggcagaaccaggcgtaaacccaggcctacctgactcccaagtccatgctcttcattgctgctgtgccactctgccatggacaagtgtctattgtggtcaaaactcccaccctttggtccatgactgtggaaatataggtcactattttatttatgtaacctctagagacagctcttaaatccagtgatgaactcgtcactcaaaccactttaattttagggtggcatctactttgacttatttttctgacaattaattcaaaccaagacactatggcaggatctggggatacagaggtaaaaagaggcagaccacgtattcaagtagcttacaaatccaggaaggggatgggtatggaaacagcgtccacaacactgactccagaaggttggtaatcgtattcccattttatagatgagaaaaacaaaggctcagggagagaaagtgacttgcccggcatcacacagcttggtggcagagccaggactcaactgaactgtctccctctgtaatactgtttctgttccctgacggtacctcaccttcatcacactgtagtcatgatggaagagatgctcttcttccaagtgattatgtgctgaagacgaaagaccaggtctttaaagactgtccatccaggcccccacattacccacctccaggagcatggggcgtgtttagcattctgtgttgtgctctggagtacagtgacacagaccacaaggtactaggacacagatgcaatgtgtatgggtgatgacataaacacagcagtgcccccatggagctgtttcttacaccatggccctccactgggcccggagctaccaagtgtccactttgttcagttggccccttaaatatacaagcacgttttgtcttgttagttaagtcagaaacctcagagctaactttcactcatttctcacgccctgtagtcagtccatcagtgaatcctattgactccatctttttttttttttttttttttttttagacggagtcttgctctgtcaccaggctggagtgcagtggcgtgatcttggctcactgcaacctccgcctcctgggttcgagcgattctcctgcctcagcttctcaagtagctgggactacaggcgtgcaccaccacacccagctaatttttgtattttttagtagagatggggtttcaccatgttgaccaggatggtctcgatctcttgacctcgtgatccgcctgcctcagcctcccaaagtgctgggattacaggcgtgagccaccgcgcccggccttgactccatcttaaaagtgcatctatctggagttcacccacttctcaccacatcaattactgcagcagactccgtgttcctgcctttgccccaacagtctcacgctgcacagcagccaaagatgttctgtcaaaacccaggtcagtttatgtcccttctctgctcatttccagagctcctcctcctcaaagtccaggtcctcccattggcccacgtcagggcccttcatgatctggcccctctgagttctccatctctgctgctcccggtttactgggcaggctctggtcacactgacctccttgctggttctaaacacacaaagcaggctccagtctcagggcctttgcagatgctttccctctgcctggaaggctgtgtcccacatgtccacttggttcactccctctcctctctcaaatctctgttcaaatgttgccttatcagtgaagccctctctgcccacctttatgttaacaatccccagcccaacactccccacctctctcgcctactttgtttccgtttttttccatacacttagcattatccaacttgacattttgtttacgtatgtgtgtttatcatctctctccaccaactagaatgtaagctcctgcagacagtgatagtcgagtaagttgctcagcaatgacaacacctggttaataaaaggcattcagtatctggtttgagggaatgaccaaaaggccgggcatccccaccgttttggcttgaaaaatgtgatccacaaaagagccatcttctctctcttccacggcacttagcacacagccaggcaggcattaaactgtgcagtcaaatcacacttagacctgcctgttcagcacagcgtggtggttaagagggggctcaggagtcagatggcctgggcccccagcccaaccctgtcacttattaggtatttgactctggccaagttattttacatatctttgacgtttcttctgcaaaatgggataattgtaatccctccaatcgggttgttgggaagattcactgagttatatgtgttatatatattttaagttacatatataactattttaagttttatgtatatataactaagttatatatataactattttaagttttatatatataactaagttatatatatattttaagttatataactaagatatatatatatataatgtacttacataaaatatgtaactatattatatacatatataactaaattatatgtaactatttgaagttatgggtatataactattttaagttatatataaatataatatatatgagttacatgtgtatgtatatatatgagttatatgtattttaagctgctgaaaatagtgcctggcacgcatttgttgttgctgtcattgtttcctctataaatgccctaattttcatttttccacaggtgctgcaaatagccagttgtcaacctcccaaccgagcctcaggtactatgcactttgggttcaagtttcacttattcaacaaatactgatcccctgcgtgtgccagatgctaggcttcacgcctggcatttccaggtgaacaagacacacatggtccctgtgctcatggggacagcttctgagcgggcaggaagtgaggtctctttgtgtgtgtcgtaggcataaggtgaatgagcatgaacaagatggcaacgagcttcagaccacccctgaattccgagcccacgtagccaagaagctgggagccctgctggacaggtaaacaaaggtggagtttctcctctcttgcccttgttaatatgaacagcaatggctcacattggctgggagctcacggtgtccaggctggcacggtggcaggcacctggcatatgtcatctccctgcatttataaagaacattatcatgtgggtcctgttgttacctttatcctccaggtgaggaaacaggctgtcagcaaggagacaggtgtgcctgaagtcacatcatcatcgcagctaccatttactgagcaactgtttgtggccaggctctgtgctaagtgcttgatgtccattttctcatttaatccttctgatgaccctgagaggtagggactgttatcattcccactgtacagatgggtaactgaggctcagagaggcaaagtcatttgcccaggggacaccgctattaagtgacaaagccaggattcagaacccaggagggaacagaattgggcctcaaacccaagtgcgtctgactccaagcccacatttttttgttttgttttgttttttgagacagagtctcac

SEQ ID NO: 61 - DNA, 1820 bp, Homo sapiens
acagagatggcactgatgcaggaactgtatagcacaccagcctccaggctggactccttcgtggctcagtggctgcagccccaccgggagtggaaggaagaggtgctagacgctgtgcggaccgtggaggagtttctgaggcaggagcatttccaggggaagcgtgggctggaccaggatgtgcgggtgctgaaggtagtcaaggtgggctccttcgggaatggcacggttctcaggagcaccagagaggtggagctggtggcgtttctgagctgtttccacagcttccaggaggcagccaagcatcacaaagatgttctgaggctgatatggaaaaccatgtggcaaagccaggacctgctggacctcgggctcgaggacctgaggatggagcagagagtccccgatgctctcgtcttcaccatccagaccagggggactgcggagcccatcacggtcaccattgtgcctgcctacagagccctggggccttctcttcccaactcccagccaccccctgaggtctatgtgagcctgatcaaggcctgcggtggtcctggaaatttctgcccatccttcagcgagctgcagagaaatttcgtgaaacatcggccaactaagctgaagagcctcctgcgcctggtgaaacactggtaccagcagtatgtgaaagccaggtcccccagagccaatctgccccctctctatgctcttgaacttctaaccatctatgcctgggaaatgggtactgaagaagacgagaatttcatgttggacgaaggcttcaccactgtgatggacctgctcctggagtatgaagtcatctgtatctactggaccaagtactacacactccacaatgcaatcattgaggattgtgtcagaaaacagctcaaaaaagagaggcccatcatcctggatccggccgaccccaccctcaacgtggcagaagggtacagatgggacatcgttgctcagagggcctcccagtgcctgaaacaggactgttgctatgacaacagggagaaccccatctccagctggaacgtgaagagggcacgagacatccacttgacagtggagcagaggggttacccagatttcaacctcatcgtgaacccttatgagcccataaggaaggttaaagagaaaatccggaggaccaggggctactctggcctgcagcgtctgtccttccaggttcctggcagtgagaggcagcttctcagcagcaggtgctccttagccaaatatgggatcttctcccacactcacatctatctgctggagaccatcccctccgagatccaggtcttcgtgaagaatcctgatggtgggagctacgcctatgccatcaaccccaacagcttcatcctgggtctgaagcagcagattgaagaccagcaggggcttcctaaaaagcagcagcagctggaattccaaggccaagtcctgcaggactggttgggtctggggatctatggcatccaagacagtgacactctcatcctctcgaagaagaaaggagaggctctgtttccagccagttagttttctctgggagacttctctgtacatttctgccatgtactccagaactcatcctgtcaatcactctgtcccattgtctactgggaaggtcccaggtcttcaccagttttacaatgagttatcccaggccagacgtggtagctcacacctgtaatcccagaactttgggaggccgaggtgggaggagcgcttgagccgaggagttcaagaccagcctgggtatcacagggagaccccgtctctacaaaataaaaaaataattcactggg

SEQ ID NO: 62 - protein, 510 aa, Homo sapiens
MALMQEKTPASRLDSFVAQWLQPHREWKEEVLDAVRTVEEFLRQEHFQGKRGLDQDVRVLKVVKVGSFGNGTVLRSTREVELVAFLSCFHSFQEAAKHHKDVLRLIWKTMWQSQDLLDLGLEDLRMEQRVPDALVFTIQTRGTAEPITVTIVPAYRALGPSLPNSQPPPEVYVSLIKACGGPGNFCPSFSELQRNFVKHRPTKLKSLLRLVKHWYQQYVKARSPRANLPPLYALELLTIYAWEMGTEEDENFMLDEGFTTVMDLLLEYEVICIYWTKYYTLHNAIIEDCVRKQLKKERPIILDPADPTLNVAEGYRWDIVAQRASQCLKQDCCYDNRENPISSWNVKRARDIHLTVEQRGYPDFNLIVNPYEPIRKVKEKIRRTRGYSGLQRLSFQVPGSQLLSSRCSLAKYGIFSHTHIYLLETIPSEIQVFVKNPDGGSYAYAINPNSFILGLKQQIEDQQGLPKKQQQLEFQGQVLQDWLGLGIYGIQDSDTLILSKKKGEALFPAS

SEQ ID NO: 63 - DNA, 1434 bp, Homo sapiens
cgggacagagatggcactgatgcaggaactgtatagcacaccagcctccaggctggactccttcgtggctcagtggctgcagccccaccgggagtggaaggaagaggtgctagacgctgtgcggaccgtggaggagtttctgaggcaggagcatttccaggggaagcgtgggctggaccaggatgtgcgggtgctgaaggtagtcaaggtgggctccttcgggaatggcacggttctcaggagcaccagagaggtggagctggtggcgtttctgagctgtttccacagcttccaggaggcagccaagcatcacaaagatgttctgaggctgatatggaaaaccatgtggcaaagccaggacctgctggacctcgggctcgaggacctgaggatggagcagagagtccccgatgctctcgtcttcaccatccagaccagggggactgcggagcccatcacggtcaccattgtgcctgcctacagagccctggggccttctcttcccaactcccagccaccccctgaggtctatgtgagcctgatcaaggcctgcggtggtcctggaaatttctgcccatccttcagcgagctgcagagaaatttcgtgaaacatcggccaactaagctgaagagcctcctgcgcctggtgaaacactggtaccagcagaagggtacagatgggacatcgttgctcagagggcctcccaagggcacgagacatccacttgacagtggagcagaggggttacccagatttcaacctcatcgtgaacccttatgagcccataaggaaggttaaagagaaaatccggaggaccaggggctactctggcctgcagcgtctgtccttccaggttcctggcagtgagaggcagcttctcagcagcaggtgctccttagccaaatatgggatcttctcccacactcacatctatctgctggagaccatcccctccgagatccaggtcttcgtgaagaatcctgatggtgggagctacgcctatgccatcaaccccaacagcttcatcctgggtctgaagcagcagattgaagaccagcaggggcttcctaaaaagcagcagcagctggaattccaaggccaagtcctgcaggactggttgggtctggggatctatggcatccaagacagtgacactctcatcctctcgaagaagaaaggagaggctctgtttccagccagttagttttctctgggagacttctctgtacatttctgccatgtactccagaactcatcctgtcaatcactctgtcccattgtctactgggaaggtcccaggtcttcaccagttttacaatgagttatcccaggccagacgtggtagctcacacctgtaatcccagaactttgggaggccgaggtgggaggagcgcttgagccgaggagttcaagaccagcctgggtatcacagg

SEQ ID NO: 64 - protein, 251 aa, Homo sapiens
MQEKTPASRLDSFVAQWLQPHREWKEEVLDAVRTVEEFLRQEHFQGKRGLDQDVRVLKVVKVGSFGNGTVLRSTREVELVAFLSCFHSFQEAAKHHKDVLRLIWKTMWQSQDLLDLGLEDLRMEQRVPDALVFTIQTRGTAEPITVTIVPAYRALGPSLPNSQPPPEVYVSLIKACGGPGNFCPSFSELQRNFVKHRPTKLKSLLRLVKHWYQQKGTDGTSLLRGPPKGTRHPLDSGAEGLPRFQPHREPL

SEQ ID NO: 65 - DNA, 53916 bp, Mus musculus
  misc_feature (1)...(53916): n = A,T,C or G
gctctgtctggacaggtccagacgactgacaccattaacactttgtcagcctcagtgactacagtcatagataaacaggcctcagctaatgtcaagatacagagaggtctcatgctggttaatcaactcatagatcttgtccagatacaactagatgtattatgacaaataactcagctgggatgtgaacaaaagtttccggaattgtgtgttatttccattcagtatgttaaatttactagggcagctaatttgtcaaaaagtctttttcagtatatgttacagaattggatggctgaatttgaacagatccttcgggaattgagacttcaggtcaactccacgcgcttggacctgtccctgaccaaaggattacccaattggatctcctcagcattttctttctttaaaaaatgggtgggattaatattatttggagatacactttgctgtggattagtgttgcttctttgattggtctgtaagcttaaggcccaaactaggagagacaaggtggttattgcccaggcgcttgcaggactagaacatggagcttcccctgatatatctatgcttaggcaataggtcgctggccactcagctcttacatctcacgaggctagactcattgcacgggatggagtgagtgtgcttcagcagcccgagagagttgcacggctaagcactgcaatggaaaggctctgcggcatatatgagcctattctagggagacatgtcatctttcatgaaggttcagtgtcctagttcccttcccccaggcaaaacgacacgggagcaggtcagggttgctctgggtaaaagcctgtgagcctaagaactaatcctgtacatggctcctttacctacacactggggatttgacctctatctccactctcattaatatgggtggcctatttgctcttattaaaaggatagggggagatgttgggagccgcgcccacattcgccgttacaagatggcgctgacagctgtgttctaagtggtaaacaaataatctgcgcatgtgccaagggtatcttatgactacttgtgctctgccttccccgtgacgtcaactcggccgatgggctgcagccaatcaaggagtgacacgtccgaggcgaaggagaattctccttaaaaagggacggagtttcgttttctctctctcttgcttcttgctctcttgcttcttgcactctgctcctgaagatgtaagaataaagctttgccgtagaagattctggtctgtggtgttcttcctggccggtcgtgagaacgcgtctaataacaacagggttgataaggacttcccatttagggctgggcactcggtagtcacttatcctcagcacttgcccccgttgtgaggctccactatttactgcagagagaggcttccctggataaggtgaagagcagcagtaatctatagtaatctatgtgtataagcacagatattaagtcatggcagcttggtatgttatttagcaaaacaacagtgggttcctcactagggcctggacttcctgagccgtgtggatttgaggcaagagtagagtatggctggctggtttttaaggtcaacttgacacaagctagagtcatcttagaggagagtctgttgaggaaatgggagcctcagtcgagaaaatgcctctagattggaggtagaggcaggtggttttctgagttcgaggtcagccaggtccacaaagtgagttccaggacagccggagctacacagagaaaccctgtctcgaaaaaacaaaacaaaacaaaacaaaacaaaacaaaacaaaaaacaacaacaacaaaagattggggcagagatgtgcctatatggcatttccttaattagtgattgatgtcgtgatacacagtacactcctgccctggtagccctgggtgctataagaaggcaggatgagcaagccgtgaggtacgagccggtcataggcactcctctactctgtgcatcagctcctgccaccaggttcctgccctacttgagttactgccctcgcttttctaggtgatgatggtcttttacctggatgtgtgagtgaaataaacacttttctccactgtttgcctttggtcatggtgtttcatcacagcaatggaaaccgtaagatgctaccagatgtgaattcccttctgagaatctggccaaagattccattagaaagtggttagttttcccccacgacagtcgggccgctattgcaccagccagtgcatctgcagcagtggtactcaccacgcgataatgccaaggagaggatccagcttaatagcctgcatcttttaattggggaattggtatcccggttgttattggaaagtgtgttggtcaattttgatgtgtgtgtctgggtgggggggtggctttaattctcttgcttagtattcttctattatggattattctatcctggggccttctggatggttttgaacattttttttctctccattctggaaattccttcaagtgtcttctgcagaactgggttagtgggtttaggttcgttcagtttatttttcatcacggcaagtttcttattttcccttctgtaatgtgaagtggaaacttaagggttctttgggaagtcaattgtgttggaggatgttctgttagggcaaacactcgaaggactgtcctgaagcagatgcaagtgaaaggatgttttttggtttggtttggttttggttttagggttggttttgttgttgttcttgttgttgattttgttgttgttgttgttgttctttttgtttttcgagacaatgtttccctatgtagccctggctgtcctggaactcactttgtagaccaggctggcctggaactcagagatccgcctgcctctctctgcctcccaagttctgggattaaaggcgtgtgccaccacacccggcttaggatgttttgttaaagcaaacacgtgaagaaatgtttcactgaagcggacacaggagaaaggctgttctgctaaagcaagcacgtgaaaggacacgtgatgaaggattcttcgctaatgacacgcatatattggtccacctgacaatgaaaagttgagctgcatttgtcaggactccaaagagagaaacacaccaaaaatcttttagtgtgtgttgtggcttcttgtggcttccttggacttagattggttggcaaagtgacgtcacctgcgacagacttagacgagctatttggaggtggaaatgggattgaacaggcagtgaaggaggctgagcttggctcacatagctaaatgcttgttggttttgtgtcttcgttaatcttcacttccctgcgggagaactttttctgatgtccctcctggtcccgccttgtccctcctgctgacacctgccaatttggctgaggcctggctgtctctgctgggcagtgttaccactgctggttcatgtttgctctcagaactctatggaactggactgctggtgtatctgtgaggtgtttgccagtggattgagctgccgctgcctgataacctgtggactgaactattgccagacaacacagacgggagtcgctccaaagaacctttctaaacaggtccacttcccccgtatcctttctttcccactacctctggtaggtggtgagctacaagggaggttaaagccttaaagtgggctttaaaaaaattaaagttgcaataacggcagatagttttgttgttacctttcagaacttgaaacacatcattctaagcgctgaggcgtttgaagtttcagagtccctgtcccaatggcctgtcttagtgatgtgacctgatgtttctgacttcatgctttcaatagagtgtctttgttctctatgtgtggcatttgatttcagggtgctaaggggagcttttttcctggtcctgtctgcctggtatctatccctaggacattttcccagcttggggaaactattaagattattttgactatttttttttaatgtgtcttttgagcaagattctttcttctatgcccataactcatatatttagtctttttggagtatcagaaacatcttagattcttactgttatttttattttccttttgtccttgttagatggctctgcatctccactgacttcaaactcaggaactatctcgtctccttaacccctctgttgctgcgattccctacatagtcccctagcatttcagagttttaggcctggtctctctttgctgagctcctctttcatgtcatcggttgcctccttcatcacagtctgggaacatctgtatccttacttgagttctctggaatttcctataactcttttgtttgggggtggggggtgtttttttttttttttttggtttttggtttttcgagacagggtttctctgtgtagccctggctgtcctggaactcactctgtagaccaggctggcctcaaactcagaaatccacctgcctctgcctcccaagtgctgggattaaaggtgtgcaccaccacgcccaactcctataactcttacctctgagccatctcgccagccccacacttttttaaaaaaataaaataaaaagaggaaggataaaaatgagagctgatatgctggagagatggctcagtggttaagagtactggctgctcttccgaaggtcctgagttcaattcccagcaaccacatggtggctcataaccatctgtagtgggatccgatgccctcttctggtgtgtctgaagacagttacagtgtactcatataaataaaataaataattctttaaatacagctatagtgtactcatatatatataaaataaataaatctttaaaaaaaaaaagaatgagagaggacatagcaatatgaggggagagatgaggcgtggcctccatgagcagggtcctaacagacagatggatggacagacagagaaacagaagcaaaactagctggaaacatctgtgcaggagtggagacggaacaagacaaaagagggcacaaagataggcaaggtgctcgacgtgcggcacacctgggctggcctgacgagcggagcttccagcttccccaccccacccctaactcccaccacccccaccctcactctagttggttttagtgctcctccgtgacagaggggagaacaggaggccctggtctctggattcaggggtatgaggcagtgttcttagccccttcttggttctgtgggactcatgctatccacagtaggatttccagttcctgccaagttttccgggtgtgatagcacacacctttagtcccaagactctagaggcagaggcaagtggatatctgagagtttgaggcagcttggtctagagagtgagttcaaggatagccagggttacacagagaaaccctgtctccaaaaaaaaaaaagtttctcactacaatagcagactacggaaaagggtacaggttttgcccttggcagagggaacaagctacgcagagacagcctgtaagaggctggagaacttgcaagcttgagatgcagaggggaaggtcctgtgtggagataacacagcaaacccacatgaccccattatatttatagctacttcttattaaattttttacttattttatgtgtgtgtgcatgtagatatgtgtgtgagattttctgtgtatgtgtgcatgtgtatatgtgtgtgtgtgtgtgtgtgtgtgattgtgtgtgtatgtgtgtgtttgtgtgcgcatgaaggtagcagtcagataatagtgttctgcagttggttctgtcctatccccatgggtcccaaaggctaaactcaacctcaggcttagaaatgctccactgagccatcttcatggccctgacagttcttgctaatatttttcaatgctgttagatgttgtatcaagtttcagacccatctcagctttcctgaaagtgattcggccctgctcctgttagtgtttactgtatgccacttctgtgtgccgccattcctgggaaggtacagatgccaccaaagttcagctttgtgggccagtgagttgtatggggacctacttacagaagcagaagtgactcaaaagacagccacatcacttaagcacacccaagcactgggtgacagctcacaaagctggaaatctggaactctcgcaatacagcatgcaggcagctcaggagtgtcctttgcaggtagctctgctagtctctgcctcttctaggcagctctgctgatctcatcctcttctacacggctcactggtctgagagtaactcttggctctctttactgcttatatactacattgggatggagaagggcagggcttagtagatctggtcagtttcaggaacttccttagcaatctgagttgtttccttcctgagcttaacaaacttccctgtaagatggactgtctcagctccctttagaacaacctgttgcgtctgctccttgtgtcttgaagagcttctccatttggtgggaaactttaaactggaggaaatggctgtacaacagccatgggctatcatggcaggcctggccccctcagaccctcgaagttctgcagtgctgatcacatagtacacagtgcttcttgcacagtcctgcagtgcctatcccactctccccacaatatgaaaacaggtcaagagtcactgttcccaaggtcacaccatggacaggacgtggacctagctgaaccactcaagacactcctttccaatacaggcatccactcacccttgcttttaatgcagctttgctcattgcctgtaggcagctgtccatacccattcacaagccccatgtgtgtgtctcctccctgcttccaggtgttcctctgatagatgcctgcctaattattagttcagttcccaatggatgggcatctcggttatttccagccctctacaattgtatctgtttgccgaccaaattttagctcctgttcatgactccaccagtaaaagaagttcctgctggatactggaccgccccccgccctcccccccccaatacccaaacaacaacaaaatcagaacaactttaaaatctgaattctcctcccaggagactgtcctgaggaccagcagaggccattttcagttcagagagcagttgaaggctctaaggatgggtgggtgtgggaagagctctttacagcttagctcactgcccacttagatcctacaaatcccacagacaccttctattccaagatggttggaccagttcctgcccagagccgctgaactcacactcccgcatcctaaaatgcaccctcgttctcttatagctaactcttttctctttttcattagaggcctttccagataggattgtcccaagccatttcaaccccatccctggacttgattttgctttgtttttgcaatactggcaaggaacccagggcctcatgcgtgttaggtaagccagcaccacactcagcgagggggggattgtttcagcttacagctgacagtccatcacgaagagaagggaaggcaggaacctggaggcaggggctgatgcagaggtcatgttggggtgccacttaccggcttgctccccatggtttgctcagcctgcttttattatagcctccaggatcacgtgacgccgcccacaatggactgacctcccacatcagtcaccaatcaagaaaatgtccccacaggcttgctataggacagtctaatagaggcagcttctctactgaagctgtcagatggccgtagtttgtgtgaagtttgcaaaatcagcactgttgctttgaatcttaaactctgactttagtaagggtctttaaatgtcttcatctccctcgtagcccaccacccaccagaggtagtgggaaagaaagggtcttaggatacgagggacatgtacctgcttagaagttgttctttggagcaaatctcttctgcgttgtcaggaaatctgcagttcaggtcacaggatttagcagcagcagctcgatccatttgtgagtactttacaaatatatcagcagggctggagagatggctcagcgggtaagagcaccgactgctctcccgaaggtcctgagttcaattcccagcaaccacatggtagctcacaaccatctgtaatgggatctgatgctctcttctagtgtgtctaaagacagctacagtgtacttacatataataataaatcttttttttttaaagaagagtatatcagtagtctaatttagtagtgtcagaatagcaaactcgaatcagcagtggtggcatgacctagtaggtcaggcctcagccaaatcagcaagagtcagcaggagtgaccaggaccaacagggacgctcagagaagttctttgccatgcttctctcaatgaagtgaagatcagccaagatgtaagaccaacgatgctttgtaaagctagctctgcaagcaagcccccgtcactgtccactgagccctatttatacttcctccgaacaccttgtgtcctccatgggcttttgtctcgccatgtgtcttgcctcactacgcaagtgtcttaagattctacacgagtctgtatcagctgacatcgctctgccaatcagcccaagtctgcaaaagtggaaaaaaagccacaagaaccccaccagaagttttttgctgcgattctctctatagagtcacgacaaaccaagctcaactgtgtgatgtaagaggaaaccaatacatgagtgtcattaactaaaaacccttcattacgtccacttacatgtttttttgttttttttgggttttttttttgttgttgttgttgttgtttttcgagacagggtttctctgtatagccctggctgtcctggaactcactctgtagaccaggctggccttgaactcagaaatccgcctgcctctgcctcccaagtgctgggattacaggcatctgccaccactgcctggcgtccacttacatgtttgctttaagcaaagtatcctttcatctatgtctgcttcagagaaatgttccttcatgtgtttaacccagcagaacaccatctgacacaaacaactttctaaagaaaccataaatttctacttcacagcactgcccattattatcccccacggaatgttctccctgctaatatgtacaatatacttcttacatatattatctggttccatatttagactatccttccagaaaggcagaaatcttgattgggtcctgacatgtctttttttttttttttttccttaagtgacaaggtctttgttgctcaggcaggccctgaactcccagtacctgggcttacagatgcataaagctatgcccagctctcaaatgcttaaaatgacatagggcgtgcggtaggtgctggataaagacttactagatgggtgagtaaatgaatgaggatcttaataacccagccacatcctccagggttcgcagactgtgccttcaaggaaaataacctgttaaagaatatttctgtcccctgagtatgcgcacaggcctgttgcagatgcagagcatccagcactcgggacctggggccaggttgaagctaggtttgttgaaggtgctgtgagttcaggattgccctggatcactctgtccaagagatgcctacaaccctttaccacagaagatccaccccattctaggggatccgcccacttctaaagatcctcccaccctggctgtcccgcctacatctcctgaggctccacctcaccagggaggttcctcccgcagcttgccccggaagctccgccccatcctcgaggctctgttcccgcccacttcccctgaggctccgccccactagggaggttctttcagcccatttctccggaagccttttcctgaagactccgcctcaatccgcctaccccgaggcccctcccactttccttgaggctccgcccacccaggaggcctcaccggctccttctcggaggccccgccccacccaggatgtcccgcctactcccgtgaaactccgcccccggcaccgcccgcctgtcagcgggcagctgggctaggctccgaccttgtagcggcgcagcgccggctccgagcaaagcggtgcccagagcgggctcggtgagaggcaggatcctgtgtccccgcgtcccggccacggtgtcaccctctgacgactcacctggtggcaggtaagggccgcccccagctctgcggagctcgcaacgggaattcggctgttttttgacccttctgcgacgcggtcttgtaggtaccttgcggggagagcgtttggaggagaccctggaggcctgtggcccggcatggagctggtggcgacctctgagggctgcgagcgccaggcctagcctgggccaagccttcccagctatcaagcgggcctgtgcggtcccagagggctcctcctcgcctgcctgagttaattgagatagctgcaagcgtggcggacacttccctgccctctgccccaccccctgaagatgagtggcctccatgaccctgctgcagatggcgtggggacaggtgtcaggacccccttgtttgccaccaggttccctgaggccacctggcgtcgcccgatggagtgccagtcacagcagtgggatgtggtggcccaagcaagagcgggagtcaggatggagccatgtggacccagcctgggtgtgtcatgttctctagagaaaccccctacacaaacacacacagcaacaaggcagttagggactgctgagagcagcaccgaccggcctctccagggctgggccctcggaatgacaagcctgcagagtgaggggtgaatgggagtcacttgagccacccgaggcaggacctttctctgcagatcctaattagcctgggcacgcctttcctctcctcctcctcctcctcctcctnnnnnnnnnnnnnnnnnnnnnnnnnnnnnnnnnnnnnnnncctcctcctcctcctcctcctcctcctcctcctccagcagagggtaaagtgtggggtttcccttgagctgtaagaggcatggggactgttagcctcccagggctctgggtcacagagctgggaggtacagggaccagggaagacccaagacaggtagctgttgtgattgtaatgataacaacttctctcctggctgtttctgattactcttgcttacaatggacggctgtgggtactccaagcagtaccccctccggggaagggggtgggaaagccttctcaaaaaaacccctgtgcttgggatgtagctcagtggaagagttcttacctagcaggagcaaggtcccgagttctaaccccagcaccaatataaaacacaacccagtggggcaggggtcacttgccagtcccatgccttgcctaagcatttgagccaagagaacttgccttgtcttcctggatcctactggcccctgagcaaggcctgcaccgcctctagccaccagcttgcccttgtctcttgggccattcgtatcacctgtgtgcctacagtgcgtcctccaattccacctagctgtgcgtcctcagagtccgggcatatttgggataggcatgtgcctcctgagtggcctttctgcccttggcttttagcctgacagtgtgattgtggccttcccaccatactctgcttggtacttaacgagagtaacctgccaccccaccctcgccccaggattaaaacctgccctgacctgagttggattctgatccgtggatgtttgaatagatggatggcgctgggggtggggtggagggggcagggcacctaggcactataggtgctctgcctcaaatgacccctagccaagcctctctacctcccttcccggcttcatttttttgtcacctgcaaaagtgcttcagctagtctctgatgttagcatctgatgttagcatctggagtgttcttttccagaggacatgggcacttggggctcctaggtgtgggtgggcgcctggctaacttgggctgttggggttgcaggaaggaatcctccatgactgacagtcaaagggagggaggctggatagcggttccagcctgcaggctggcttcccatttctggttgatccttctgtctcgctcctgagccttggcccccttcctagggggcccatgaacccctggtgcccaccccaggaaggcagtagtcgggtacctggcagacctagtgaagccagcacttgcttggcaggaggcctgcggtggcgctaggccaggagcttccctctcgggctccaagtggagttcacccactcacactccctgaggcgtctgcattgcagcagactgagcccaggagctgcattggcagctcggacctagcagggatggaagggctgagggagcctgcctgtctcactccttctctctgccctgaccctacttggccctggctccctttggaaaggcagatgctgactaatcaggctgtagctctgacatacactcaggtctgcctggaagtgctggagtgacagaaaaattaaaaagaaaataaaacaacccccccccccaggctctggacccttcatgccatctccgcgcctcagaccctttcttggcatgggggggtggtggggcatgtccacctggaagagactgtcatcatgtatagagccgtggagcccagactttggagctcaatctagctgtgtgacatggagcagatcatctgacctctctgtgcctcaagtgtctaaaccataaaattagaatttatttcatgaaagtctcacggtgccacgctcatgtgcccatcagaggatgcaggctcttaccagtgtcacctctgcttcttgcctgagcaacgtcaactattttccttaaaggagtacctcctgtcagtgttggttgtatccagatatagtgttgaccgctctgccagttcaccggccgtgggatgctgggtaaattcttccctaggccacattttcgccattggctatgtggcactgatgacactgcaaacctcgcagagtcatcttgaggataatcttaacacatgaaaagcaggcagtgtggggcttggcgccttccataagcacgcaatgcaggtatgcagtgcgcacaggtggaggaccctggtgctggagtccttcacacaggggcttcttttggtttgggccagtgttggctgagtgaaagagctggtgactttgtcttccggtgcctcagtttctccagatgtaaatggggacacagacaaactgacctcatgtaaaaggttagatccctcgacagttcaaagtcagtccccatggtgtggccccccagagcaacaggggaaaggtgtccctcaggactgactgtcctgtcccttagtgccttcctgtaccatagggctcagagtgttgcccgctttattgatagggcaccgacactgttgtttcctctgaggaagatcagatctgatcaggagtcagtcagtgcttgggtccgcctcagccagatcctaaacctaccctaaacaagccccacctccagccacaagatccacaccttgctcacctccctcaagctctgggctctcccaggccctgggagggggagggcgtgtgggaggggcttcagtggcttggacagcaaaagcaagaaaaaaaacaaggtccagagctaggtgtgagggcaaacctaggctggatctaagagactctggaaacttccgagcagacacaaaggtctctgggttgccatggaacccgagagtgtgaaaggtgagttgagatatagtgtttgccgttgctatcagcagcagtcagcgtgtgccaggtgtgccgggcctgatagctaggcactgaacttcactgccaccctgagcaaccggaacagtgaagactccagggccatcttttgagctctgctaatctcagcgtcacctcctcaagtggtggcaaagtcctccatgcgatccccatcgccctgcccccatttcccagtgcctgtgctctcactgtctcagggtacactcctgcctcaggcccaggccttctcttccccctgtccaaaatgctttccccagtgtgtccttgggggcgattctttcctctctgtctctgtttgtctctctgtctctctcccttcctcatatgagagagagagagagagagagagagagagagagtgtgtgtgtgtgtgtataggacattaaacccagggcctcgacttaaccctatactatctcttaaatttgtcttaaatttgacattggtactcactaagttgcccaggctggccctgagcttgccagcctcctgccttccccagtagctagaattccaggcctcgctccctcagctcttccgagtcttcttcgcatgtctcctccccttctatccccctttctcatttcacaggcttcattcttagcatcaggaccagtcctctctttctttttcttatttatttatttatttatttattatatgtaagtacactgtagctgtcttcagactctccagaagagggagtcacatctcattacggatggttgtgagccaccatgtggttgctggggtttgaactcaggacctttggaagagcagtcagtgctcttacccattgagccacctctctatcccctctcttttaagattgctttttattttatgtgtctgaatttcttgcctacctggatacctggatgtgtgtgcaccacatgcattcagtggccaagagggccacaggaggatgtcaaagcccctggaattggcattatagaatgtttagttaccatgtgggtattgggaatcaaagctgggtcctttgggagagcggctggtgcccttaaccattgagttgtttgcccagccccgggtcagccccttttgaatctccctcctgtagagggaggccatctttatagaagcagagatctttgtgctctatgctcactgtttcttgtttctctttgttgtctgctgctgccactgtgtgtgttttgataacaattatttttatttatgggtgtgtgtgtgtgtgtctgcatgagtttatgtgtagcacattgagcaggagcctgtggcgtccagagggcatcagatcccagggagggggagttatacgtgatgctgagccatctctgtagccctctgccttatgttttgagacagggtctctcactgaacgtggtgctcagcgactctggctagtcagtgaactccagatccacctgtctctgacacaccccaccctctgggactcggagtgtctggctggcttctgtggcctgcctctgctgggattaaaggcctgcgccaccacacccggcccattttcttttttttaaaaaaagtgtctttctctctctgttgcccaggctaaccccagcctcaaactcggtgcagtcctccttgcttcagcttctggaggggagtgtggggatcagaagcccgattcaccacacctgcctcaagttttgttcattgctaaatgccaaacgcaaggaacagagtcgcgcctacagcacatgtgaaataaacatcccttgcatggagaagaccctccaccatcccgggacatcactcattaccagactccctcggggtcatgcagccataggagtcccctcgccctgatgctttctttctgatgcccccacaggtgtggccctgcccagctgtcagtgatggccttgccccggtgagccaaagcctgcccctctcacccgccggccaccagccagcaggatgaggctgtggaaggcggtagtagtgacgctggccttcgtgagcacggacgtcggggtgaccacggccatctacgccttcagccacctggaccgtagcctgctggaggacatccgacactttaacatcttcgactcggtgctggacctctgggctgcctgcctgtaccgcagctgcctgctgctgggggctaccataggcgtggccaagaacagcgctctggggccaaggcgcctgcgggcttcgtggctcgtcatcaccctcgtgtgcctctttgtgggcatctatgccatggccaaactgctactcttctcagaagtgcgcaggcccatccgggacccatggttctgggcgctcttcgtgtggacctacatctcgctggctgcctccttcctgctgtgggggctgctggccactgtgcggccggacgcagaggccctggagccagggaatgagggcttccacggggagggtggggcccctgctgagcaggcatcgggagccacactacagaagctgttgtcctacacaaagcctgacgtggccttcctagtagctgcctcctttttcctcatcgtagcagctctgggtaagtggggccttgggtctgaccacactgagccttggtctccagggatgtacttgcagggtgcctagcaacctcttccctctcaaacgggtagccggtagccgttcacttaggtggtttacactgctgggagacccagaaggaatgggtatggtgtcttaccccccttgtcctctcagcatttgagagactgaggcaggaggattgttgagagtgtggtctgcttgggcaaagagaaggcctttgtctcaaaaatatagagagaggagctagagagatggctcagaggttaagaccactggctgcttttccagaggtcctgagttcaattcccagcaaccacatggtggctcacaaccatcagtaattagatccaatgccctcttctggtgtgtctgaagacagccaccgtgtactcctgcataagataaataattctctttttaaaaaatacaaagaagccaggcagtggcggcacacgcctttaatcccagtacttgggaggcagaggcaggtggatttctgagttcgaggccagcctggtctacagagtgagttccaggacagccagggctacacagaggaaccctgtctccaagaacaaaacaaaacaaaacaaaacaaagcaaagaagatgtggaaaggcaaaagtttagttaattctacccgattgcccgcattgttctggcccagggctaaccacagaaggttatatagacttctatgtgggcaggagatccagtcattccctcatctcctgtgtacacacacatatgtgttcgtgttcttgtgtgtacgcagaggtcagcgtgtgtatcatcctcaatggcccccaccttattattgagacagaatcgctctgaacctggaactcattgattgactagaggagatgtcagtcaccctcaggatcctcctatctccacctcccctgcagtgggattatagccaccacgctcagcctttgcatgctgagagccatcttcccaggcgagccctcgtcctttctttttggtgtttggcggcatagctcccaggacatcacttctcacctgtgcatactggttggattcttgtttgttttgctaatgtctcctggacatcccaacccaacattattttctttggctgcatagaattctactgtgtgtggtagcatatatctttccccatctgtctcctgttgcatgagcttgtctcatgtgactgaacagagctgaagggtgaagttcgtcttggtttgaaagttaggtgtgtggtgctataggtctgcttctctcccgaagcatgggcaggaaggtggtacaggaaggttgggactccatagctcctcccactggcagggcctggggtctcaatgagctgtgtgacctggggtaagtctatcaacctttctgaaccatacctctctcttgtggggaatggcaagcacagggcttagtacatcatggtgggtgtccaagaattcacagggaccaaccctgggggcaatgacatagtcagagtagtctcaaagaaggccagtgaacctgagctggctctaccccaatccctccctcactgcctcactgcctcacccccgaccccgagtcccctcagttcctccttttagagtctgtgtgaaccaaaaaataaaaaataaaaataaaaaaattttagccgggcatggtggcacatgcctttaatcccagcacttgggaggcagaggcaggcggatttctgagttcgaggccagcctggtctacaaagtgagttccaggacagccagagccatacagagaaaccctgtctcgaaaaaaccaaaaaataaaaaaaaataaataaataaaaatagagtctgtgtgatatgaggcagctactcagcctctgcttgttggtctctgtgtctgtaaagcaggagtacagtccccacttcgatcagctgtgttgctgtgacagagtgcccgggataacagcttgaaggggagaaaggttagcttggctggtgtaatccggttccagctatggtcgtctgagttcatggctatggaacctatagtgaactagaacatcacggccagagtgtagtggaacagggctgctcacttgatggtggccaggaagaagacagacagatgaagggctgggggaagagaaaggcacaccggccatgactgagcccagcctccaagtcccaggagggttgcgagcctccatcacacgagtttttgtggggatataaaaactaaactatagtccccgtggtattaagggacagggagtgggccaataagctaagaagataaaatgcctcagatgaatcttggcacggggagcacattagctttgagtggctgtgaagtccactcaaagccccaggtccctgcttgggtagccaccttggattcatctgactggcctttctttgcccctcagccattgtgttggtgacatttccaggtctgactcaccccgggtgctgatctctagagccagatgtcactccatgaccttgtccctatgcctgtggtggccccgtgttgctgtggcatgctcagggggacacaggtgtactacagtgcctctgagttctggcagccttcagggttacatcaggccaagggctcagtctgagtcagactctggagcactgatgcccggccagctaaggctcagtttctcaccctgcaggggcatggcgctgtgagtgctaagagagacaagcagggcaccgggagcaggtgcagagccagtgtgaggtgccatctctacagaccagactggccttgaactcacagagctggagatcctcctgcctctgcctcccgaatgctgagattaaaggtgccctgggcatcagtactgtctttcatttcattctttttacttttatttcctgagatagggtctttttatatagccccggctggcccggaaagattcctttattgttttacaatcacattttacatttatttatttatttgtgggaggggctggttgagcagatgctgtgccctgtaagtggtattcttttttttttttttttttttttttttggtttttcgagacagggtttctctgtgtagccttggctgtcctggaactcactttgtagactaggctggcctcaaactcagaaatccgcctgcctctacctcccaagtgctaggactaaaggcgtgcgccaccacacccacccggcttgtaagtggcattctgaggacaacttaaaagagtcggtcagtcagtcctctccttccaccatgtaggctctggctgtcaaacttggtggaaagagctttaccccctgagccatctcaccagctcagcattctcttctgtttgttttccatttttatgtttgtgtgcgcatgcgtgtggcacctgtgtggttgtaagtagaggccagatgctgacgttagctgccttcgatcaccctccaccttaccttttgagacaaggtctctctctgaacctgaagctcattcattcagctgggttggctggcgagtgccagtcccaggacacatgccaccatgctgagctgttcacgtgggtgccgggggtctgaactcaaacttgcacggcaagccctgtaccagtttcttagctcctggttatttgtggttttctctttcagacaggacctcaggtaaccctggctggccttgaactcctgatctccttgcctccaccccccaagtgagattataagcatgtgctatactgcacctggcttgctatttgggacagggtcttcttagatcactgaggctggccccctcaccttgaaatgctcccgcctcacctcccaagcagtgtaaagtaggattcttgcattgggtttcttggcatctcgactgtgtagaaatgtgggcaagctcagagctccagtctcctcctctgtggaaagaagtcatttccacaaatagcaagaacaaaaataccaagcccgtaagaacacagggtgacatttgggacttggaggaaataaaggaatagatgtctgtggtaaggtgtgctctaggcagctgtgcacaggtcctgaggcagaaggaacccagttgttagagaggcactgaggctagcagggctgaaagcaggatgagtgaggtgaggcgaggcagagtcctgtgttgtcctgcgtgggctgtcatgagcctttgcaacaaccttgactctgacccgagaaacctgggaatgaatgggctggattgggctgagatggccaagatatgaggtgagtcccaaggtgggaagcagcccctgagacattccaggcaagatgcgtgacttagagcagggtgggactactgaggcagcagcagaggtcagatgcaggaaacactcctgaagcctagtgtaggattcagtgtccgtgacgcctacagattactcagaagggtttaccctgtgcccccgggacacgagaccacacagcgcatcagaatcaggattccacaagattttcttccctgtgggtaaactgaggctgagcttcagctcagggataagccagctgcatctggaaaccccatctggccagagctagatggcgtcctcgagtttcctgcttctcatccagcagagggcgccatttccccacagaaggccagagtgcaagctgttgtgtatggagaacctacctgggtccagcctcaagcccagatcagcctaagcaaattgcagtgaagacaccccgaggagacagagacccgaccttgaggggctgggcttctgcattgaccattgtgtgagagtgagcattccagaatcctgggaggcaggtgtgctttggctgttctggggtacaatcaacccggcagccttggagcaggtgagggctagcgtgccacccagggccggggcttagctctatccccagtgccagaaatcagaggcagtgccagctttggtgtctggtgagggtcgcatccaagtgagcatagcagagtccttagagaagaggagctgtgcccacgccccttcagatcatcccccagggcagctgcagttctgagaagcagggcagagctttgaaggctcaacccagcttcccagtgaaacgcacctctcctgcctcccacagaggagagatcgcccacatgtgtgaacttgtgttgactctcagccatccctctcctgtgctctgtgacccactgagtcagcagggtgaaggcacaggaagcccgtagatgagaaatcaccctgccagccctagagcgccacccctcagaggggtgggaccagcatggcctggagctgtgccagcagcaaggtcttcctggttctagaaggtggaagacacacctggaagaaggaaatggcctttggcatccctcagctgctgctgctgagttttgtggcctatgtgggtggcatccagacccatgacaggtcctactgtggctttgaatgcttggcacccaggtgtcatcagtgtcacgctatgtgttctccgagagtggtgtattcattttcttctctgggttggcctgggctcccagttgagggcacagtcctcacgtcttggtgccgaagtcatggctcaggcacacgatgccgaaggtcacatggcatctatccatgtgaagcagagatgagcgctggtgctacgcttgctcacctcattttatccggtcaaggacccctgcccagggagtactgtagccctcatttatcatgtatcttcccaccacccgtctagaaactccctccagccctgcccaggggtttgtttccatgatggctaagtcgcatccaattgacagtttgaccacagcaggggcaagcaggcacttgaagaccagaccttggattgggtgagcagagacgggggctgggggcttcccactctgctgagcctgcctgtctccccccaacaggtgagaccttcctgccctactacactggccgggccattgacagcattgtgatccagaaaagcatggatcagttcaccacagccgttgtcgtcgtttgcctgctggccatcggcaggtagccacccaacccatacacaccactcctgcaggagggagggcagaagggagcagggccagcccagcactgcagcaaccgcccagactgacgtggaaccctttggttgggccacatcccagagctgtaccctcttgcctctgaagatggctccagtcccctgaagatagctttctctctccctggctggttggtgaatatgtagcccaaaggattggttttctatactgttctagaagggtctggatgccagtgttaagtcctttacccttgctgtaggacttactggggagtgaggggtctagacctggatgtcatccctacagagtggcctgtcctctgtccttggggaggaggggctgctggtgggtgatgctgcctgccggaaggacaccggctataccgtctctcatcttcaatcagctcattggccgcaggtattcggggcggtattttcaccctcgtatttgccagactgaacattcgcctccggaactgtctcttccgctcactggtgtcacaggagacaagcttctttgatgagaaccgcacaggttggtccctcctggggactttgggtgtccagggtgagctagcttcctgtggggcccctgacagcagcatggcttgccccaccagcacttcctatggtctagttccaggtggagccctgggatactaagctgactggtgacgtttttggtgtgagttggggccaccacagaaccctggccaggcctcttgagctctcggcagtgaccagggcctcctcttgtctagtgctgcctgagagggaggcctgcagaggtccagttcctgtggactgaatgatggatgggaagatctagcagggagagaaacagcatgcccgccatggtcccaagcactgggccaggccacacctgtcccacccatcccatgcagggaccatttccctcctgtagtcgtcgccccgtggctgtcgcaaggcgtcttctagtccagcattccacagtgtatgagaaacgctgctatgcgtttctctctctgagctcaggaggctgtgtctgaggtgggtgtgagggtgtttacccactctgccagtgaggcctagcagagagaagtttggaatctggctgtggtgggcacatgcgctgtcacgttggctgtccccagctgaccttcagccagtttccactcggtagacaggcaggcacctcacacaacacgttgcaaccatgtgtggtacacacccatgaccctgtgacccagggtggcctcaaacaaaacaaagaaaaaaaaaaaagacggtaccaggactagtcttccagaagtgctccccattattcccagatagcagagtgggggagaggtctgactcctattatccatctcagaagccccttagcgtcccctccgccaccccgcccccagcagctctgggcatccttgccacagagggctgagtgcctgtgttccaggggacctcatctcccgcctcacctctgataccaccatggtcagcgacctggtctcccagaacatcaacatcttcctgaggaacacggtcaaagtcacgggcgtggtggtcttcatgttcagcctctcctggcagctttccctggtcaccttcatgggcttccctatcatcatgatggtgtccaacatctacggcaagtactacaaggtaggcggagtctagcccctggcagtgccttggaggctacacaaggctgttctgaggcagtctgtgttcattcacagtcttcacttggtcactgggtgtctcctgaggacccactgtgtgcccagcactgggaagcagtgaagcaggctgccttaggtatcagccaggcatgatcacatccatcactccagtggccaaggactgccactacacgttcagacccaccttagtcagagagaagaccctggtaggaacagaggacaaggccaaagtgaagccgtaagcgtggggtggcgagcggacccgaggaaggtgggcaccctcaggactgtgtgttctgaatagaggggtacagcacaaaactctgtggtaggaatgtgcctggtgggtctgagaagccggcaggtggctgtttgggtaggtgatgggagacaggacagtggcaggtgatgagggcagagtctgaccctctggttttgagggggatggtgacgtgggccttgcctgtgatctactctgaggcagccagaagtccctctgccgttgcctgctgactggacttgctcttcgtggcctcctggagccccagagctgagctccaacacacaaatctgagccccaccacaggctcaggcacccctggggaggtgactcaagaggggagcttccagccttgctgggtgggtcattttccctagctctaggaccctcccccgtgtaaaacagctttccttcaacctccagcaaaaggccaccagccctaagccctgatcatggactctcctctagctcctcactgaggaggaacaggaaatagtcaggatggagctgctccctgcccacctcgttccttctcattggcctctacctctgcccacctcaggccccacctctaagtgggtagagccttaaaggaatttgttcagggtctgccatctttacaaagcacacataccacctgcagccagatgtgctgctaggggcccaaggggtaaaggcaccgaccactgtgcaaacctggggacctgagtccaatccccagggtccattgaaaaggctgaaggacataatcgactccgtaaagctgacccatgccaggggacgtctgcctgtgtccctaacacacacacatacacacacacatgcacacacaccagacgtgacttgggaccccacctcccaggtgcagtgggccttttctcttttctgctctctgtgaccaagtgtgacattcaggtcatagaagcagccctataggaaggacacactcgtgcctgctctggcagccattgtgtttgttactgcagagcagactgctgcaggcctgcctcccctctgaagctgcttgtgctgctgataaactctgccccttagtgctcactgtttctcatactgtgtgcagcctgagcaacagcccgggatgaccatccttacagcagcgcagggccgggtgcggacactccttttctagagctaactgtagtccaagtgtggtcagtggtctcactcaatgtcagtgggggccctgcttcactgcccccccccccccagtgctgggcactgtgagtctcctagccccccaggagctccgctgggtttgctctcttgagtctgtctcatcagttaggaggcgatggggctggggtggacagaacgggatggaggtgtgctcagagggacagtgaggccgtcctgcccatccctgtgcacagaggctctccaaggaggtccagagcgccctggccagagccagcaccacagccgaggaaaccatcagcgcgatgaagacggtgcgcagctttgccaacgaggaggaggaggccgaggtgttcctgcggaagcttcagcaggtgtacaagctcaacaggaaggaagcagcggcctacatgtcctacgtctggggcagcggggtacgtgtggtcaggcgctggggtgagtggatgggcgtccagatatggatcccatgcttgggtgacagtccaggtccccacatgtgggtgtcaagtcatcagagtctttcctggaaagaccacagggcccttccttcggaggcccctgtcccccctacaaggtggcagggtcggtaggagcatgtatcctcaggctagctagggtccaacctaggcctcagctcctccctagagaatggagaggacctggtttgttcctgtcccaacagtctgggaggtaggagctaggctggtctgggagggtgggggcaaggagatacagagtttctttggaggaattagctgtgtgtgtgtgggggggggtacaggggagccaggaggcaaggactactcgggtgccactacctgaaaatgcctgccaagcctctgtcgactcatccacagctagccactgtctgccatacacaaggacacttgtccagctgctggacttcactctggcttggggtggggaaggaatcctgggaaggttgtgggttgtctcatctctcagacacccccaccctccaaatccgtagcatgaggtccccaagatactgtccttcttcaggaaaatacttaaaggaacagaaaggcctcactagcctgctctgactggctgctgtgtggccttattggtgccccaacctctctgagccctgctctttgcaatgagaatgaacagccctgcctggcccagcagaggaacttgaaggtggcatgtgccagccagggctttacaaagaaagccttgttctgctgccaagcccacagcctgctccagctaggggcctttgtagggagctgctgggggaagggtgtgagtgacagatggggcaatggagtttccgttggtgtttagcacttctaaggctgccctccagcacccagtgagatggtttagtgggaaaagacactgtcaccaagcccggtgatctgaggtcctcccctcaagcttctctcctgtctccctggtcttgctaacagggaacagagttgggggacagagtagagggcagggcccagggctggctaaggccgggaagcttacataagccatgcccttctccttccgtgcagctcacactcctggtggtccaggtcagtattctctactacgggggccacctagtcatctcggggcagatgagcagcggcaacctcatcgccttcatcatctacgaatttgtcctgggagactgcatggaggtgaggggcagccgtgggagggcgggggtgtgaggcgagagcaggttccggattctgtggggtgggtaggtttgaaccaaacagaacgcgtggaagacggcagtaagacccatcccagaactccaatagggcacctctaggataacagtgccagagaagcaaccgctgggccggcacaaatggtgaactggtggaggaacacttacaggcacgttgcgtgtgtgctgtgagctcccactgacttcacagcaaccgtgtgccgtcttggtgttacctcagtccccaaggtggacataactatgacagcacctcaagggctgcacacgggagtcaggcaggcatcttccacccatactccgctgccacatccctcagcatgaggtgggacaaaatatttacactctcttgtttctgagagaagccacctcattgcttaaaggcactcggtgaagatggcttctgttttggtccatgtttatactgggtgtgcttgtagccacagagaatgtatacagagtacccacgaagatccatattaaagattaagttagggctgaggctggctcccttggcagagtgcttgctgagcatgtgtggctctgggcttcatccccagctcaaagaggtgctgctgtggggctccaccacagctcttgagaggtgaagcgggagggtgggcctggggcctctgcctagggtgggaggcagagcaggggactgacagctggcagcctgggcatcaagtcagagtccctaacactgcagctgggatgtctccaaggctctgtggtatccccgaagggaagggacccatgctgagcacatcatggcttgccttttgtggacttccttcccctcccccaacacctttaaccctggctgcagagactgggggatctctgagttttaggtcagcctggtcaaatggcaaagtcctgtatcaaaggatcgccttcacctacatgttgagttgtctgaaactgtccggatggacaacaattgccagcttatcacgcgccttttaatcccagctctctggaggcaggggcctgcagatctctgggagttcaaggccagcctgctttacatatggagttccaggatagccaggactatgttgtgagaccttgtctttacaaaaaacagggaacttagaacccgctgtggcagccagaggaaagacttcctgctctgccctgctccccacacatacccgctgcagggttgagtgggatccgtggtccgaccctgggccctggctcctaatgcccagacacagtggcgttacattccccatcgcccttgtttttttttttttcttcatggtcactatctgcctcagcagcaggtggcatccaggggctccctgcatcgcctcaaagctgcagctctgacccgtaacctcccctcaccccatcagtggtaggtgtcaggaaggggctgtgggtgggaccaggatgtgtgtcttccctgcagtccgtgggctccgtctacagtggcctgatgcagggagtgggggccgccgagaaggtgttcgagttcatcgaccggcagcccaccatggtgcatgacggaagcttggcccccgaccacctcgagggcagggtggactttgagaatgtgaccttcacctaccgcactcggccccacacacaggtcctacaggtaagaacagctcaaggtctgccagaaccatcccacatcttggttgtgaggccagaagcaagagaggcaagggcgccactgagaggccgcccattaactctccagtaagagctgctggagagggctggtgtgtcacacgcagagtgcctgcctagtgggaaccaggcccggcttccaaccccagtaccaaaagggttgtgtgtgatggctgggggtacggggcttctttagtgacttgacaagaagccagattggtggactaaagctgtgcggacattggtgtgaatggaaccctcaatttgcatgccacgcccttccagaagcactggcaaagtcatggatccggcttctgtagggggagaggcaggaacacggtgcagagcctctcagagggaggtgacctttaatcagggagcaggagctgaccaggtggctctctacagaaaacagtcagacgaaggcgactgtaaatataaagccagagtcaccaagccagtcctgtttgctcagggtttgtcatcccagcgactgatatggcccagggcaggagggccacaagttcaagccccaccccaggactgcacagcaatgagtgccaggccagtcagtgaaaagagagctgagctatctttccaacattttgggagtctacagcaggaggattagcactatttaaaggctggatagtaagttctagccggccctgggtcccagtataggggaagtagctcagtggttgagcttttggctagcatgcacatgttgctgggttcaattccccagtaccacagaagaagcacatatgttcaaagtgccccagtcctggtatcttaggaagactgttcagaggccagcagcaccgcacagggcagacaggaggctgtcctcctgcctctgagactggaacatcttgtgtccctgcagaatgtctccttcagcctgtcccccggcaaggtgacagctctggtggggccgtcgggcagcgggaagagctcgtgtgtgaacatcctggagaacttctaccctctgcagggcggccgtgtattgttggatggcaagcccattggcgcctatgaccacaagtacctgcatcgtgtggtgagtgccacatgcctattggtccccacacccttccctttcttataagccatgacacggatggaaagaagggtgtagttctgtcactgatgtgacaccccccacccccatgcagaaggttgtggcactccacaagccaccacgtgccccctctcctctcctagaggtaaatccccgccccaccagtgtgacaacctttccttgatttgcatgaatttgaccacccggacttactcagatctcacgactgcttcctccagcctgagcttgctccaggcagatctgaggtgcacaaggtccctcctgttcccgcaggcgcagacggagctgaagtgcagggcacacacaggcctcgcttccttcttctgtaacgttttcatcagcagactcgcactccacaataattcttactgtggcagggattgcgtatggaatgtcttggcgatactcacccttgttactctctcttgctcctgcttctacttaaatgtatgtccttctaaaataacacacacagatacacacacacacacacacacatacacacacaaaagatgatttttttctttaaaagaaagaaaaagttgatccagtgctgactgacacacaagcagaggggcctgtacaggtgttcagtctgtgtactagacacaccatctatccaggcaggagagcccttcactgctggtgtgtgtatgtgtgtgtgtgagtgtggggggggccatgtaagcaaacatacacatctagcgaatgagcacgtgtgcattatcagagcgggatctctggtccttccgtgttagatgagcaatctaccactgagctagcagagctctagtctccatgtgacaggacccacatgctggaaagtccccctgcattgagcatatgtaagcagagatggttagcagagaagggtatgtgacacactgggctgcaggaagagccctgggcagctgcaaacgtgagcgcttagattcccagactgccaagtgtcagcgtgaggaagtggcttcctgcaggctttctcacttcctggcggtgaaagacatgaggccccacttatctgcttattaatcatccagggttcctccggcgaatactgtctccttgactttttttaaattattgcaagcacaagacagtcaagtaccacactgtagccttgagttagtgattttctcatactgtagtgttttttttcctttttcattcattcattcattcattcattcattcatttattcattcattctctctctctctctctctctttctctctctctctctctgtgtgtgtgtgtgtgtgtgtgtgtgtgtgtgtgtttacacgtgtggcatgcatgtttgtaggtatgtgttgagaggcctgaagtcagcccagatcacttccacctcatagtttgaggcagaacttctctgtgaaagccatcatagctgtgaccctctcaccagccagctctaggaaccctgcctttgttctctgaagctggagttagaggcaggcctccatgcctgcccagcaccagggtgcgcttggtgagctgaactctgtccctccgatttgttcagcaagtgctttaaccccagggctgctgtagaggctggacacttaaccacagctctcgggagaggctcacacaggagggttgtcaggatttcaaggcagcctgagctacatactgagttcttggcgagtttggatgacagagtaagaccttgtctcaaaaaaatggggtagggagctgggcagtggtggtgcacgcctttaatcccagcacttgggaggcagaggcaggcagatttctgagttcgaggccatcctggtctacaaagtgagttccaggacagccagggctgtacagagaaaccctgtctcaaaaaacaaaaacaaacaaacaaaaaatggggtagggattagatagaataagggcaactgtccgggaggcctgttgtcatgcaccctggcaaagtcacaaagctacattccatctccctgctctgtgctcaggggaatcttggcttagctcagagcaacaggattgctggctctggattatcattctctgaggcctgaggtctaggatcatctgtgtacccagggcccctgctaggaaggaagagacacagctgagctcagccagccgtgcagatcagatttcagacctgagactcctggcgtcggccaggcgggacttgggagactctgtgacagctggagggttctttgacagactctctaagtcaccttattccccgattcccacttcaacagatctcactggtgagccaggagcccgtgctgttcgcccgctccatcacagacaacatctcctacggcctgcctaccgtgcccttcgagatggtggtggaggctgcacagaaggccaatgcccatggcttcatcatggaactgcaggacgggtacagcacaggtaccaggaggcgactctgagttaggaactggagcgatgcacccaggccctgtcataccatttccttcccattgacatgaaagccccatcacaggaacagctgtgaggtagcctcagggcacaacctcctcctccatcagttttgaacacttggtaaagatcgtgtacaccaccaggcatgatggtacatacgttttcaagttcgaggccagcatggtctacagagtgagttccaagccagccagggctacacagtgagaccctgtctcaaaaaaaaaaaaaaaaaagcgaaaacaaacaaacatggactggacggcttaggggcactgctgctcttccagaggaccatggttcgatcccagcacccacatggtggcccccagctatctgcgactcatgtcccagggaagacagtacttctggcctctaaaggcaccaggcatgtggtgcacaggcatacatgcaggcaaagcaccaacacgtaaaatcatctttttaaaaagatttatttattttatgtatatgagtacacggtagctgtcatcagatacaccagaagagggcatcagatcccattacagatggttgtgagtcaaaatgtggttgttaggatttgaactcaggacctctggaagagcagacagtgctcttaaccactgagccatctctccagctccataaaatcatttttttttaaacaagtaatgtttacctgcacatggtggtgtggggagattgcttcaagttcaaagctagccaagagctcttgaggagactctgcctcaacaaatttgtgtgtgtgtgtgtgtaaaatattaatcacgtgggccacttaaaggcttctttagtgtgaggacagctttggagagtcagctctgtccttccacccagggccgggattgaacttagcgtggctgctgcagaaagtgcctttcccgctaagacatcttccagccctttcttgggatatttttcagacgtagtcttactgtgtaggccaggctggcctggagcccgcatcaccagtttccaagatcagagcactcaaatcacaaacgtgcaccacgaccctggtcttttactggaattccgttacgtaaaaatactgtctttttattctgccttttaatggaaaaagctcagctctttaatttggcgcctggcctttgtccttagcacaccttagtgacctgtcatattggtgcaaggacctgacctgcctcctctttacctgcataagtgtgtaggcttttacagtgactctgtttcctaccgacagacatttgagtcgttcttattaacatctgtcttgtaatgacgctgctgtaatcacacccaccaccacctctggtcctctgtgggagagagctgacggaggacattccctgacaggcttgctgacagagggccgtgcatcctgatggtcacactctgtcattgccgtcagtgtcagggcagagcatcacagtggagttgcccagcccggggaagcaggagctggtcctcggcaggcagccttgcaccagtctgcagtgcactgtgacgggttcggccatctgcctggtgcccgtgggggatgagccgcagtgtgccacccctctgcatggagggctaatctgggcgtctcttcctgagctgccctctgtgggtggtcacagctggagaccctcagaaatgtctgccgagctggtgcccaggtgaacaggagaggcctcctaagagctcaccctgcgtctcctccacacagagaccggggagaagggagcccagctgtcaggtgggcagaagcagcgggtggccatggcccgagcacttgtgcggaacccacctgtgcttatcctggacgaagccaccagtgccctggatgccgagagcgaatacctggtgagtgggggcagcagatgccggggcaggggggggnnnnnnnnnnnnnnnnnnnncaggctgagcagtggccacaggttctctcaggccatggaagggaaacagggagttctaggcaaggacacccagctccaagcagagctacagctgagtgacatgggtaaagcagggtgccagaccagaggatctgatggggtgccccaccctgcaatgctcctgtttcctccctcctctctccctcctctctctactctctttgcttttgtttttcagtcctaactcaaccccaggccttgtacaaatgccgcaccctgcaactacagcagggctctaagctactctttccccagtggtaaagtggatagtattggggcagaaacatagttgtcgcctcaaggagacaacacatagtttattctggagccaaattagagtgactgtgtgcaggaacagactcaggttaccccagttccatgatcaacgtggaagcagtttccagtgtcatgaagttttcatagtaacagaacaacaaaagtcacagcgagacacttttcaaatacattgatgggggtgtcagggaggttacagcaaagctgggagctctgtcacaggcttcatttgcagtctgatgacactcttagctttggttaatgaaaactagggtctgctaacttgacccactccagtgggttttattaaacacagcttgctgaatctacacagtggacaagactgacctcagacagttgaaattcctgagctattgccatatctctaatcagacacacacacacacacacacacacacacacacacacacacacacacacacacggtttccagaaatcctcatcacagttccttatgggctaagcatgacattttgtgcatagattttatcaaatactatttatcaaattttaaaatgttcctcacttggttaccccctcctccgtctggtaatacttacatgcggccacaggacagtcatgcagcaggactgctgtggagtaagcaggcagtggcagcgcacacctttgaacccagcacttgggaggcagaggcaggcggagctctgagtctgagacaaaaagagcaagaattctatcggttaaatcagtgagttaacaaggaaggagaaagcatgcggattaacaaagtttacctattgtttaaagagccagatcggccacgtcccctgtgtttacgtgactggtactctctggactgtcttcctagatggatgtaccttttaattttagcgttccttttagccagctcaatggcatagctgtaagctcccagggagtagctgaccagggctccaggtagactatcacaccgtggctcttgcctgtggacgctacttatctgctttatcgtattggcatcgtcccaggcctactgtggaaatgtagatggaaaaccacagcatagaagaaactagcggagactccagaccccctgacctcctcagcacatgctgactgtagcagcaatgggagcgaggctcaggcctgttgggactcggggtgtcagagcctttgcagatctgatgggtctgtgtactttaatggcagaaatggaagtggggaatctgacagggaatcactgcttctcatcagcaaaatacaagcactgtttaagttagtccctgctgaattgtactgtgggacagtgtagatgctgacttaaccaagaaacattagcacttaatgggtaaacttcttgaatgttgctggtcttagagactagcttgtgtgcattgtataagagttaacccaaggctttgggcgtctctggctggagtgagtggggttcaaggttcaaggcatagctgagcttgtgatagggccatttacagtgtttaagttattgtttctattgatttagttggctcgactttgtttttgagacaggttgctctggctgaccgcaaattcacccccaaccccaggattaaaagctgtgcaccaccacaaccagctatatttttttcttaataagaaaatgtttatttaatttggctgtaagaatcttgatttaaaatattgataccctctaaatggaggggtttttaaaaacaaattttttctagatttatttattatgtgtccagcgtactgcctgtgtgtatgcctgcaagccaggagacagcaccagatctcattatagatggttaggaatcaggctggtgttcttccagaggacctgggtttgactcccagcaccgatgtggtggctcacgacctctgcaactccagttccaagagaatctggtcaggcgttctcttctgttctctgtgggcatggcacacacgctgcacagacattttatatatatatatacacatacacacacacatatagatatatacacacacatatatatacatatagatagatagatatagatatatacacatatatatatatagatatagatnnnnnnnnnnnnnnnnnnnnnnnnnnnnnnnnnnnnnnnnnnnnnnnnnnnnnnnnnnnnnnnnnnnnnnnnnnnnnnnnnnnnnnnnnnnnnnnnnnnnnnnnnnnnnnnnnnnnnnnnnnnnnnnnnnnnnnnnnnnnnnnnnnnnnnnnnnnnnnnnnnnnnnnnnnnnnnnnnnnnnnnnnnnnnnnnnnnnnnnnnnnnnnnnnnnnnnnnnnnnnnnnnnnnnnnnnnnnnnnnnnnnnnnnnnnnnnnnnnnnnnnnnnnnnnnnnnnnnnnnnnnnnnnnnnnnnnnnnnnnnnnnnnnnnnnnnnnnnnnnnnnnnnnnnnnnnnnnnnnnnnnnnnnnnnnnnnnnnnnnnnnnnnnnnnnnnnnnnnnnnnnnnnnnnnnnnnnnnnnnnnnnnnnnnnnnnnnnnnnnnnnnnnnnnnnnnnnnnnnnnnnnnnnnnnnnnnnnnnnnnnnnnnnnnnnnnnnnnnnnnnnnnnnnnnnnnnnnnnnnnnnnnnnnnnnnnnnnnnnnnnnnnnnnnnnnnnnnnnnnnnnnnnnnnnnnnnnnnnnnnnnnnnnnnnnnnnnnnnnnnnnnnnnnnnnnnnnnnnnnnnnnnnnnnnnnnnnnnnnnnnnnnnnnnnnnnnnnnnnnnnnnnnnnnnnnnnnnnnnnnnnnnnnnnnnnnnnnnnnnnnnnnnnnnnnnnnnnnnnnnnnnnnnnnnnnnnnnnnnnnnnnnnnnnnnnnnnnnnnnnnnnnnnnnnnnnnnnnnnnnnnnnnnnnnnnnnnnnnnnnnnnnnnnnnnnnnnnnnnnnnnnnnnnnnnnnnnnnnnnnnnnnnnnnnnnnnnnnnnnnnnnnnnnnnnnnnnnnnnnnnnnnnnnnnnnnnnnnnnnnnnnnnnnnnnnnnnnnnnnnnnnnnnnnnnnnnnnnnnnnnnnnnnnnnnnnnnnnnnnnnnnnnnnnnnnnnnnnnnnnnnnnnnnnnnnnnnnnnnnnnnnnnnnnnnnnnnnnnnnnnnnnnnnnnnnnnnnnnnnnnnnnnnnnnnnnnnnnnnnnnnnnnnnnnnnnnnnnnnnnnnnnnnnnnnnnnnnnnnnnnnnnnnnnnnnnnnnnnnnnnnnnnnnnnnnnnnnnnnnnnnnnnnnnnnnnnnnnnnnnnnnnnnnnnnnnnnnnnnnnnnnnnnnnnnnnnnnnnnnnnnnnnnnnnnnnnnnnnnnnnnnnnnnnnnnnnnnnnnnnnnnnnnnnnnnnnnnnnnnnnnnnnnnnnnnnnnnnnnnnnnnnnnnnnnnnnnnnnnnnnnnnnnnnnnnnnnnnnnnnnnnnnnnnnnnnnnnnnnnnnnnnnnnnnnnnnnnnnnnnnnnnnnnnnnnnnnnnnnnnnnnnnnnnnnnnnnnnnnnnnnnnnnnnnnnnnnnnnnnnnnnnnnnnnnnnnnnnnnnnnnnnnnnnnnnnnnnnnnnnnnnnnnnnnnnnnnnnnnnnnnnnnnnnnnnnnnnnnnnnnnnnnnnnnnnnnnnnnnnnnnnnnnnnnnnnnnnnnnnnnnnnnnnnnnnnnnnnnnnnnnnnnnnnnnnnnnnnnnnnnnnnnnnnnnnnnnnnnnnnnnnnnnnnnnnnnnnnnnnnnnnnnnnnnnnnnnnnnnnnnnnnnnnnnnnnnnnnnnnnnnnnnnnnnnnnnnnnnnnnnnnnnnnnnnnnnnnnnnnnnnnnnnnnnnnnnnnnnnnnnnnnnnnnnnnnnnnnnnnnnnnnnnnnnnnnnnnnnnnnnnnnnnnnnnnnnnnnnnnnnnnnnnnnnnnnnnnnnnnnnnnnnnnnnnnnnnnnnnnnnnnnnnnnnnnnnnnnnnnnnnnnnnnnnnnnnnnnnnnnnnnnnnnnnnnnnnnnnnnnnnnnnnnnnnnnnnnnnnnnnnnnnnnnnnnnnnnnnnnnnnnnnnnnnnnnnnnnnnnnnnnnnnnnnnnnnnnnnnnnnnnnnnnnnnnnnnnnnnnnnnnnnnnnnnnnnnnnnnnnnnnnnnnnnnnnnnnnnnnnnnnnnnnnnnnnnnnnnnnnnnnnnnnnnnnnnnnnnnnnnnnnnnnnnnnnnnnnnnnnnnnnnnnnnnnnnnnnnnnnnnnnnnnnnnnnnnnnnnnnnnnnnnnnnnnnnnnnnnnnnnnnnnnnnnnnnnnnnnnnnnnnnnnnnnnnnnnnnnnnnnnnnnnnnnnnnnnnnnnnnnnnnnnnnnnnnnnnnnnnnnnnnnnnnnnnnnnnnnnnnnnnnnnnnnnnnnnnnnnnnnnnnnnnnnnnnnnnnnnnnnnnnnnnnnnnnnnnnnnnnnnnnnnnnnnnnnnnnnnnnnnnnnnnnnnnnnnnnnnnnnnnnnnnnnnnnnnnnnnnnnnnnnnnnnnnnnnnnnnnnnnnnnnnnnnnnnnnnnnnnnnnnnnnnnnnnnnnnnnnnnnnnnnnnnnnnnnnnnnnnnnnnnnnnnnnnnnnnnnnnnnnnnnnnnnnnnnnnnnnnnnnnnnnnnnnnnnnnnnnnnnnnnnnnnnnnnnnnnnnnnnnnnnnnnnnnnnnnnnnnnnnnnnnnnnnnnnnnnnnnnnnnnnnnnnnnnnnnnnnnnnnnnnnnnnnnnnnnnnnnnnnnnnnnnnnnnnnnnnnnnnnnnnnnnnnnnnnnnnnnnnnnnnnnnnnnnnnnnnnnnnnnnnnnnnnnnnnnnnnnnnnnnnnnnnnnnnnnnnnnnnnnnnttcttttttttttttttttttttttttttttttgggttttcaagacagggtttctctgtgtagccctggctgtcctggaactcactttgtagaccaggctggcctcaaactcagaaatcctcctgcttctgcctcccaagtgctgggattacaggcatatgctagcttttcttaatataggccatgatattttcctttaattagagaattctgctctgttagataaagagatgagtggggattggtctcaggattcacccttggttcccttagaacctcaatatttgaaaacaattactcaacttattaattttatttttatgtgcgagttttttcttcatgtatatatgtgtaccatgcacttgcctggtgcccaccgagatcagaagagggcatcggatccccctggaactgaagtcacagatgcttgtcagccaccatgtgggcgccgggaatcaaactttgcccctctgcaaatgttcttccccactaagccgtctctccagcccctatcattgacttaactcacattcaatgttactaatttctgtaagctaccgcttttataatttcttttccattctcacatgagaaagcaggctgcccattcatgattcttttatggcatgaaaaacatcccagtttccgaatgttaaacgttccccattgagggaaccataaagccagtgaatgtggttccatcttccacatgttcaaatactttcaagtttgaagtctgtaaatcatcacatagacctgactggccccgacccaccacacacagggcttatcccccaacaaatctttttaaaaagctttttctcatttttttctttcctttgaaaaactgcacgagccagaggtggtggtgcaagccttaatcccagcacatagaaggcagaggcaggcagacctcttgagtttaagaccctgggtggtcaaatatgtcttcccagctgggccagtcatgttccttatgacccagagatggagcgaatctgccccctgggtgggcgatcaagtgcctcttacttttattaccaggctccaggaaagtcctcagcttaaggcagcaaggctgtaagaagcagaagccgggaacaggattgtttgaggaaagtcaggagacaacgtcaaatagcagcaaaccaaagtattctaaaggcaaagaaagccaaagaggtagccaagtgcccacagacatctaggagcagggaactgcctgcctgcaaaggctggctgactcctctgatgaaagtggatgatgggtcttggagcccataccgggtactgtcagcacatatatcaccgaagagggagagagctgatgctggagcccatagactccaggcacacggacttaggttatcccaaatcccatgttccaacatggaagcagtaacagaacagattggaaacagagaggcaggttatagccaagaggggaagtctcagcttctctgtcggtcacggtgttaggtcagactgagaatgggctaagaatgacgacttagggggctaaagctagcccaatttaagtcgtaatgagacgcagcaaccttgcagtctcttcacatgactgcagttctattagaactgtctgtgagcgctattagtccgccagcctttgcagacacagcctgtttcctgaaatcctcactcagtgcacatgtccttgatgctggctagtgccacatccctccaagggtcgatctctctcacacagatggtgactgacctgttcccaggccccaggtaccactctagacactggagtcttaggaaaaggctgaccagacaaacaagacctctgcccgcatggcatttctactctcatgggacagacaggtcacaaacaaggaaacagcctgagggttctgtgctacagagaaaaactgtcagtcatccaataccaggaatgggatgggcggccactgtccagcataagcacatctggccatcagtgagtgctgggagggagacacggctgagcattattttcctggtgcagaggttacaggcatttaaagggacagcacggggcgaggaatggcagagtgtcagtgcgggccacagcgtggccctgtgttcaacagaagagatagaagctgactgcaaagaatggtgacgtgactctctctatagtcatgttcaagaataatgctctcaggcccttgaggacatctgtggttataggaggtatatgtatgtcacaagagtcacagaagggcacctgtgcctccgagcccttgttagtaaatgctagggaagaaggccggtgccagggcaggtactgactccgataggacatgtggacatccatgctgagcatctcaggaaggcatccaaggatccctgagcatctgggagtctctactgcacaggagtgttgtcttgggggctgtatggagtcgctagatactctatggcactcactgtgaggaccaggctgtaagtcaccacttagctaagtcctggacacacaggagccagctgtggggagttctggggctgggtaacagagtagaggcagagagaaggccagaagcaaggaagaggcagatgcctcaggctccggcaggcattttggactttttgtaacaagtcacttggttttatttttccagactttttaagtgtaaagaaaacaatgcagaaagttcatagttcccagctctcctttcccccatcctgtcctctgccatgcacagtgcatctgtgtgctctgtctgctgcagtccttcctttactaatgactataaaggccttgttcttggggtgtagttctatggactctgagaagcaggacagcacagtgcgctcgagcgcgcgcgcacacccacccacacacacacacacaggtcacactatgtgagaaactactacaagtttgcatcaaatcccaaagcaaggtgagaagccagtggaagcaagaactgaccaaaacagtaaggagcctggagaggcggtgcacacccgccttggagcacacccaccaccccagcccacccggaggcaggaggagcaaggtcactctccaccccctgaggtttgaggcagaccctgtcttaaaaaccagtgcaggtcagtgagtggctcagcaggtaaaggtacgcgatctgaaacttgccaagtttagtgccaggatgccacctggtaggaggcaaccagttcccacaggttgtcctctgacctctacatgtcaacacatgttcagtgtcacgtgcacacagaccaaatgtgtgtacatatgcacacatacacaggtgtatacacacacacacatgtgcaaggacgagtaatttttaagggaaatgagtggattgctttttttgtcctgggcattgaggctgaagggataaaagatgtctagttcctcaggtacccccctatgttagcacctgggctgtctggaatagaaactcaggacttgagctgccttggtccttattttacaacccaagaactgaatgtcagctggcagcagcagggtaggtgacagcagggcggtggattttctgggggatggtgctgatgctgcgcagccgctgcgcctgctcacctttgctccctgttccctgcagattcagcaggccatccacggcaacctgcagagacacacggtgctcatcattgcacaccggctgagcaccgtggagcgggcacacctcatcgtggtgctggacaagggccgggtggtacagcagggcacacaccagcagctgttggcacagggcggcctctatgccaagctggtgcagcgtcagatgttggggctcgagcaccccttggactacacagccagccacaaggagccacccagcaacactgaacacaaggcctgacagtggcccccaggctgaagcactggaggcgacctgccaagtcccactcctgcttcctgcatcttgcctccttccacttgctccccaggcacccgccagctgccatgggcttacccccttctactgtgtccttcttggctcctccaggcctgccaaggtagagcagcctttttaaaccaagctaccagggtttttactgctcagttcaacgcactccagtcaactctgagatttcaaaaagaacctttttgggactggcagtgagcaagctcactaagatgtttccaagacttctgagccaagagtgcaggaccctttctgactgcctggaggatgtctgggagagaactaagcaccaccctttgcctctcgggagaagcagcctccctgtcccctagggggacacaagggttggcctttccatccttccagtctcccggctctgtgagtcaggccagaggtggggcaagagagtgggaggtggcccactgcccatcacccccctgccactcaaagccagtctcactgtgaaccactgggacctcagcagaggaggggctggccgggcctggtgggcctcggggtgccctcagccccgcacccagcacttgaacccttcaccctctcccctggctggcaccttccctcctgtccacccctgcaactctgcggaggaacctgtcgtttgtaagatgtattctcagattggtggagggggaccaaggcaatgcccagggtctggctttgtcctggtttcaagattttgggagaactgggtcaataaagtgtactacctctgacctctacccggtcatgttttccttggatctggttctcctctgggccttgcacagtacagacagctgtgtaggcggttcagtgctgtcttgaagtccctgtctgtgttgttcacatccctaggaattgagcagatgtgtgtgtgtgtaaactgtctccacataccagggactcctgagttcccatggcagctaaggaccatctgatagcatctgcttttgtcccccacactcccacccagtttgaggtagagaacactgttactaagagtcttgatccagttattttctcttgtcagttaaaagaattaaaaggcagggcctatttaccccaaatttgtgggcctccctttgtgcagcagaccaaccctgagttaggggagggagaccaccttgaactcgtcaggatggtccacagccccaccggcaggagagaaagcctgaccttttgtctcagttgaggcatctgctcctggccctctccccatctgctccatttctaggtcctcagtactactcagcactatggcaagggaggtctgggcctaggcagggcctgtgggtaactcagtttgggcattttgttttgtttttttttttgtttctcaagacagagtttctctatctagtcctggctgtcctggaacttgctttatagaccagggtgacctcgaactcagagatcctcctgcgtctgcctcctgagtgctgggattaaaggtgtgtgccgccaccacctgcctcagcttgggctttgagccagggtctctttctggtgagctgaccatgaacttgtgacatctggggtcccgggtggatattatgcccactaggctaatctgatggaggcaatgcttcactgagattcccctcttaccaggtgtgtctaggtttgtgtcaagttgatgaaccctaaccagcacaggtgtcatagatcttgctttgcctttggttgtctgtggcgactccagtgtgtaaatacgtctttaatgttgtaaggacccaacaagatacactggtgagccaaactggtccagaagaagctgagatggccgaggtgtgcttccgtgtcacagaatgggcctcggtttccccaactgtaaaagggaatgcatttcaagaacttcctgcctctctgctcttccctcggtgggggctctggggtgagcacaggtcgtttgtttcctcttgttgaaaaaaatgaccctactctgaagaaatgtacactctcatagtttgggagaccacaaatctaaagcagggtgtcatggggccctagaggaaaatcttatgtgccccttccgaattttggtgactcctgttgttctttggctgatggtcccagcctccagcctctacctctgccatcaccagctttcctctgcccttagctcaggcctccctctgactttagcagaacccgacagtacactgaagtggcccagggatttcagagccagcttcccttgagagccttgacttagtatgtctgcacagacctttccttcaactagggtccactcacaggttccaggaatttggcatggatatcttttgggggtatccattcagctccccacaaagggacacctgcaacctggctcacgttaaccttggcactcagctggtttgtagaatggaggactaaaagtttgtagtcttcagatgtttccagattaagttggaaataccaactgtagagtggaaaccagctgcttctgcttctctgtccattccccctccccaccccccgccaacccctcccatggaagacaatgtattagagttgaaaaaaaaaaccctagggcagacaagttgtagatctcaaagccgctgggagaaggataatggagaagataaagtcaacattttggagagcagccacttcagaaaaagagttaaggaaacccagagtaccaggaaaagcatgccttgcttggctctggctagccttgaggaagaggctgacaaaaatgaggaagccccccacacacacacacacccagcagaacttcctcctgaggacactggtcactgctttgccacaggctgactccggctgtctccgtgagcagagagatctacagcctcagtgatgggctttccagctcttccaagtccctgcagcttccagatcacagcgtaagcagctgccacagggccctggggtgggcaggcacctccgagcctctcccaacaccagtctccttgtccctctcaggctatggacccgggactcttccctctctttgggcagctccagcacctcagtttataagcccaagcctataagtgaggcctttgcctgtggaagaacctcctggagactgagccagtgccacttttagaggctagcaatgaatttagaaataagtgttattttggacagagttaacgcttacaaaaaatccttaacagccttcacggtccctcacacaaacacctcatgtcacaggttcacctatccccgtgggaccaacacatactcagtcactaaaatgccaagcgtttgggggctgtatcaactttcccacccatggctttctgtttcgcaggttcaaacctgcgtgctaagatgcattcggtgatgtttctcagttgcagtaaatgacacactgtataagactcatcacagcgatgcccggtgtcaccaaggtctaattccaggacactttcaccgcccagaagaaaactctgtgcccatgaaccccacatcctctcctctcccagctcctgctgccactaatctacttgttctcaaactacaggatgtggacatttcgcacaaatcatctaaaaagggtctctgtgtggctgacttctcgctcagcatcatgttcccaatgtccctccatattgtagcatgtgtcagaactttattcctttttatggctgaataatagtccattgtatggagagaccacactctgtgtgtctattcatccacggacggacatctggttgtggctgccctttgactattgtgaggagtgctgccgtggacatctgtggatttgtatggatgtcggtgtgcagttctcttgggttggtgggggtcacaggacgactctctctatcctttttttttttttttttttttttgggttttcaagacagggtttctctgtgtagccctggctatcctggaactcactctgtagaccaggctggcttcgaacttagaaatccacctgcctctgcctcccaagtgctgggactaaaggcatgcgccaccacgcccagcttgtttttgttttttgttttgggtttttttttttttttttttttgagacagggttttactatgtatccctggctatcctgtaactcactctgtagaccagacaggcctctcctgagttctgacattaaaggcacacacaaatacacccagctctagagacagaatcttactctgtagcccagggtggctttgaactcatagaccctcctcctgcctcagccctaagagtgctagaattatcaaaggtgtaagccactacacttgcttgcttgcttatttatttatttatttagagtaaaggtaaagatgcttgctgccaaaccttatgagttgaatttgatacccacagtccacgtagactgggagaatcaactcctgcgaactgtcttctgatccttatgtggatgccacaggtgcacacgatgtaaagagactttaggggctggagagatgatgagtcagcactggctgctcttccagaagacctaggtttgaatcccagcttgtacactgtggcttaaaaacatctccagtctcaggggagccaatgcctcttctgatctctgacagcactgcgtccatgtggtgcacagactaaccttcagacaaagcattcatacacataggctcaggctgggcacaggtactcaggtcagaccggtcaggttattccatgtgtagggctgggaaggcagagagaaggctggcttttgtccagaggctactgagtcaagtttgaggatgtggggtggaatccgcacactggatcaccaactctgctagacccctgagacaccctgagttaaagctcaggctggcccccatagccttgtgggccggggtcaggacaacaaaatgacggttaaaataacacaggatgagacactaggtaaattcaattcactagttctctggctgaatgaaccacagtactgcagtgaaagatggtttaagactttaaaaactagctgggcgttgtggcgcacgcctttaatcccagcactcgggaggcagaggcaagtggatttctgagttcgaggccagcctggtctacagagtgagttccaggacagccagggctacacagagaaaccctgtctcgaaaaaccaaaaaaaaaaaaaaaaaaaaaaaaaaaataataataaaataaataaataaaactttaaaaactgcccaagctacacagaaaccctgactcaaaaaaccaaaaaatgtttttgaaaattggtttgattttgtttcaaagacagggtcttcctatgtagcctcagactcacaatcctcctgcctcaggctccagaatgttgggattcaggccttccttcccctgcctgtggatgtttgtatctacaaagaccgggaacctgttatgtgtctatcagcgtggggttggaaacctgcaggtcaggagagagcaggcattatcttcctcagtgggaatgttcaccaactgagacctcactccctggttattcattaagccagacatttgaatttgaaagaaaggcttgggacaggacagtgtggtagaatattatctgaggagatgctgtgatgtgcacgtgtcccccatggatgtctgagaaatttgatccccaaccccacaggcacagaggccatcgagggctcatgaataggttgactgtcttcacaggagtctgctgtcaaagcaactctagctttctgtgctctcaccacatggccctgtctaccaagcaggaggccatcgcctcagcctctgaaaccacgacacataaatccatttctgttcgtgataaagtaacttggtctgtaccaagtgtggcaatacatgcttaaaatcacatcacttaggaggcagagatgggggtggggggtagggggtgggggtggggtcaatagttcaaggtcatttacggctaaactgtgaatttgaggccagcatgggctgaatgagatcctatcccaaataccaaacaacagtagccgacaagtgtacacatttgcggtgggatctgtctcggaagtttggggacagagcatgaaggtgatgcacaatcatttagttatttcattaagaattacaataagggactggatagatggttctctggttaagagcacatattgctcttgcagaggacctgagattcccagcacctatattgtatggcttataggcttacaaccactgataactccagctccaagggatctgatgccctcttctggcctccaaaggcactgcactcatgtgcacatacccacacagagagatacagataatttaaaaggagtgggctggacaggtggattagcatttaggagtgctagctgatcttgcagaggacccaggtttggttcagttcacagtcatctgtaactcaagttcttaaggatctggtacccaattctggcatgcgtgtgggtaatacatgcatacatgcaaaacactcagatacataaaataaaagtaaatacatctttttttaagttaaaaaaaagggggggagagtggctggagagatggcttatcagttaagagcactgactgttcttccaaaagtcctgagttcaaatcccaatagccacatggtggctcacaaccatccataatgagatctgacgctctcttctggagtatctgaagacagctacggtgtactcacatataataaataaataaatctttagaaaataataataataataaggggtagccagatggctcagtggataaaggccagcccctgacagcgcttaaagacctaagtttgtctccaggtccttgtgcatggtgaaggaaataaagaactcctgcaagttgtcctctgacctctacacagcgctgtcacacacacacacacacacacacacacacacacacacacatccaacccctggcatgcagaggtaggaggatctcagtgggccagcctgagctacatagcctgaccgcgaagaaaccatgctcagctgttgtcctgggtattgacacacacgtctgccatcatgttctatgaatggttttgaatatccaaatgattcctgcacgtggaggatagaaagctgagaacctgcgccaacccccgccttgatgacttgttctgggaagactttctgggaggatggaacccagctccaccggctctgctgactgaacagtgacgttactgagcccagaggagcagggctatcccatggggaagcttcagtccaccctgccatcaccctggggaggcccagcttcctctagagcactggttctcagccttcctaatgctgtggccctttaatacatgctgtggtgcctccatctataaaattattttcattgctatttcataactataattttgttactgttacaaatcgtaatatagagatctgatatgatgccgggcagtggtggcgcatgcctttaatcccagcacttgggaggcagaggcaggcagatttctgagtttgaggccagcctggtctacaaagtgagttccaggacagccagggctacacagggaaaccctgtcttgaaaaaaaaaaccaaaaaacaaaaaacccaaaacaaacaaacaaaaaacaaaaaaagaaagagagagagagatttgacatgtagtatatctgatatgtgaccccttatgaaggggtccatcaatcccaaggggggggatcttgacccacaggctgagaaacactgctctggagtctgaaaagtggacctggatttctggaacattccagagatggaggccagggtggttcatacctataatcctagcacttagaggattctcatgagtgggaagccagacatggctatataaaaggcagatctagattagcctggactacatagtgagactgtctcaaaaaacaaatagtaacaaaaatattccatccagagatgggactttccctagcactgacacagccagcgacgctgaggtcacttgtttctggcctcaggtaggggaacactgtcattgtaaatataaagcttactgaggtggggagctgactctggccttgtaagcatggagatctgaattagatccctaggacccacagaaaaagctggcacggccaggcggtgctgcacacctttaatccccgcactcaggaggcagaggcaggcagatttctgagtttgaggccagcctggtctacagagtgagttccaggacagccagggctgtcatgcttggggtggggggaagctggacacaaagccagagaagtgactcagtgggtaaaggcagcttgccccctaagcctacagacccaagttcaatacctccaaaacccgcctcaggtaaaggtgcaaagagagaatttatgttacaaagacctgtacgaatgccatcctgcctctttgaacttttgtttttgttttttgttttttcgagacagggtttctctgtatagccctggctgtcctggaactcacggtatagaccaggctggcttcaaactcagaaatccgcctgcctctgcctcccaagtgctgggattaaaggtgtgtgccaccatgccctgcctctttgaacttttaaaaccacattttctttttcctctggtctgaaggtccaggcttcggaggtcatttccacacagctgggggacaggtgatgacagaaagcatgtggacctaaagaaactccagtgaccactgcctaggtgtgcgagagaggtcactgtgccccgctgcctaggtgtgcgagagaggtcactgtgccccgctgcctaggtgtgcgagagaggtcactgtgccccgctgcctaggtgtgcgagagaggtcactgtgccccgctgtctaggtgtgcgagagaggtcactgtgcccctctgtctaggtgtgcgagagaggtcactgtgccccgctgcctaggtgtgcgagagaggtcactgtgccccgctgtctaggtgtgcgagagaggtcactgtgcccctctgtctaggtgtgcgagagaggtcactgtgccccgctgtctaggtgtgcgagagaggtcactgtgccaattcctttaaccacaaacccataaggccattactattaacctcccttctccaaaaaaggaacagggggattttaaaacctatgaaaaaaattgcacagctaaatcacagacctaggaactgaggggctggggcatagacgccagtgggagcctcctcgacttgtacacatgaagtcctgggtttaatcccagcacagcagaaagcctccggcacccggtccaggtggtgtatacacatacacctgatgtcccagcacttgggaagtggaagaacgggatccttagcacacaggaagttttaggctagcctgggctacatgagaccctgtctcaaaaaacaaataatgaaacaaacaaaaataagaataaaaaaacccccttgtacctgagcccagacagcgtgagtaactggactcctcaaaccaaaaatggtttgtgttattttaggcaaggtctggctggcttgaaacttgctacgtaaatctggctgatcttgaacttgtggaacgatcctgcctgcctctccttcctcagtgctggctgggatcattctcgagcaccactgcccagcttcaggctggaactcttaaaattacactttactccttttatattgtgtggggtatgggtataagagcgcacgccacaatgtgcacgtggaagtcagaggtcaatgtccaggaattggttctctgcctccttctatcgtgtaggtccagaggactgagctcctttcttagcttggcagcaaatgccctacatgcttaaaagggggacaaaagtagagaaggttgtaggtgaaactggctccctgtggagacatgtgttcagtgtaactgctggttaagaattccagactggctgggtgtggtggcacacgcctttaatcccagcactcaggaggcagaggcaggcagatttctgagtttgaggccagcctggactacaaagtgagtttcaggacagccagagctacgcagagaaaccctgtctcgaaaaaccaggaagaaagaaagaaagaaagaaagaaagaaagaaagaaagaaagaaagaaagaaagaaagaaagaaagaaagaaagaaagaaagaaagagagagaatccagactgggggcagcaagatggctctgcgagtacagcggtggggcatctgcttggaactggtcccaccctagcagcacagatcattacagatgatgatatagcaaacaatgcacacaagtcacgacgggtcagctgccccacactgaggaaggagagataactgtgttgagtcactaaccaggaagccctgggaagaacaccacccaccaccccgggctcccagtggctttggatggtaagaaaggaggaagctgggcctttaaattgctgagtcacctgggcagtgccaacagccacctcagaggatgacgatggcagtcctcatgatcactgtagcacctcaattgagagactgagatcggtcattcagcaagcatttcctgagtgcctgctgtataccaaacacgtggcaggtcaggagaatctccagtctgaggtaatgagatccgaaaggtgacgtgaggagccaagactgaaggtattcaagagagagagacactactgagctgggctgtctgaggaggtgacaaatgacttcagacctgaatgacagtttagaagttcctgaagaagtggagcgtgccagctgggggtgcagctcggtggccatgtgacctaaggagctctgttctagatgtttacccggaagaaatggaaacatctg

SEQ ID NO: 66 - DNA, 3326 bp, Mus musculus
ggcagctgggctaggctccgaccttgtagcggcgcagcgccggctccgagcaaagcggtgcccagagcgggctcggtgagaggcaggatcctgtgtccccgcgtcccggccacggtgtcaccctctgacgactcacctggtggcaggtgtggccctgcccagctgtcagtgatggccttgccccggtgagccaaagcctgcccctctcacccgccggccaccagccagcaggatgaggctgtggaaggcggtagtagtgacgctggccttcgtgagcacggacgtcggggtgaccacggccatctacgccttcagccacctggaccgtagcctgctggaggacatccgacactttaacatcttcgactcggtgctggacctctgggctgcctgcctgtaccgcagctgcctgctgctgggggctaccataggcgtggccaagaacagcgctctggggccaaggcgcctgcgggcttcgtggctcgtcatcaccctcgtgtgcctctttgtgggcatctatgccatggccaaactgctactcttctcagaagtgcgcaggcccatccgggacccatggttctgggcgctcttcgtgtggacctacatctcgctggctgcctccttcctgctgtgggggctgctggccactgtgcggccggacgcagaggccctggagccagggaatgagggcttccacggggagggtggggcccctgctgagcaggcatcgggagccacactacagaagctgttgtcctacacaaagcctgacgtggccttcctagtagctgcctcctttttcctcatcgtagcagctctgggtgagaccttcctgccctactacactggccgggccattgacagcattgtgatccagaaaagcatggatcagttcaccacagccgttgtcgtcgtttgcctgctggccatcggcagctcattggccgcaggtattcggggcggtattttcaccctcgtatttgccagactgaacattcgcctccggaactgtctcttccgctcactggtgtcacaggagacaagcttctttgatgagaaccgcacaggggacctcatctcccgcctcacctctgataccaccatggtcagcgacctggtctcccagaacatcaacatcttcctgaggaacacggtcaaagtcacgggcgtggtggtcttcatgttcagcctctcctggcagctttccctggtcaccttcatgggcttccctatcatcatgatggtgtccaacatctacggcaagtactacaagaggctctccaaggaggtccagagcgccctggccagagccagcaccacagccgaggaaaccatcagcgcgatgaagacggtgcgcagctttgccaacgaggaggaggaggccgaggtgttcctgcggaagcttcagcaggtgtacaagctcaacaggaaggaagcagcggcctacatgtcctacgtctggggcagcgggctcacactcctggtggtccaggtcagtattctctactacgggggccacctagtcatctcggggcagatgagcagcggcaacctcatcgccttcatcatctacgaatttgtcctgggagactgcatggagtccgtgggctccgtctacagtggcctgatgcagggagtgggggccgccgagaaggtgttcgagttcatcgaccggcagcccaccatggtgcatgacggaagcttggcccccgaccacctcgagggcagggtggactttgagaatgtgaccttcacctaccgcactcggccccacacacaggtcctacagaatgtctccttcagcctgtcccccggcaaggtgacagctctggtggggccgtcgggcagcgggaagagctcgtgtgtgaacatcctggagaacttctaccctctgcagggcggccgtgtattgttggatggcaagcccattggcgcctatgaccacaagtacctgcatcgtgtgatctcactggtgagccaggagcccgtgctgttcgcccgctccatcacagacaacatctcctacggcctgcctaccgtgcccttcgagatggtggtggaggctgcacagaaggccaatgcccatggcttcatcatggaactgcaggacgggtacagcacagagaccggggagaagggagcccagctgtcaggtgggcagaagcagcgggtggccatggcccgagcacttgtgcggaacccacctgtgcttatcctggacgaagccaccagtgccctggatgccgagagcgaatacctgattcagcaggccatccacggcaacctgcagagacacacggtgctcatcattgcacaccggctgagcaccgtggagcgggcacacctcatcgtggtgctggacaagggccgggtggtacagcagggcacacaccagcagctgttggcacagggcggcctctatgccaagctggtgcagcgtcagatgttggggctcgagcaccccttggactacacagccagccacaaggagccacccagcaacactgaacacaaggcctgacagtggcccccaggctgaagcactggaggcgacctgccaagtcccactcctgcttcctgcatcttgcctccttccacttgctccccaggcacccgccagctgccatgggcttacccccttctactgtgtccttcttggctcctccaggcctgccaaggtagagcagcctttttaaaccaagctaccagggtttttactgctcagttcaacgcactccagtcaactctgagatttcaaaaagaacctttttgggactggcagtgagcaagctcactaagatgtttccaagacttctgagccaagagtgcaggaccctttctgactgcctggaggatgtctgggagagaactaagcaccaccctttgcctctcgggagaagcagcctccctgtcccctagggggacacaagggttggcctttccatccttccagtctcccggctctgtgagtcaggccagaggtggggcaagagagtgggaggtggcccactgcccatcacccccctgccactcaaagccagtctcactgtgaaccactgggacctcagcagaggaggggctggccgggcctggtgggcctcggggtgccctcagccccgcacccagcacttgaacccttcaccctctcccctggctggcaccttccctcctgtccacccctgcaactctgcggaggaacctgtcgtttgtaagatgtattctcagattggtggagggggaccaaggcaatgcccagggtctggctttgtcctggtttcaagattttgggagaactgggtcaataaagtgtactacctctgacctct

SEQ ID NO: 67 - protein, 772 aa, Mus musculus
WPCPGEPKPAPLTRRPPASRMRLWKAVVVTLAFVSTDVGVTTAIYAFSHLDRSLLEDIRHFNIFDSVLDLWAACLYRSCLLLGATIGVAKNSALGPRRLRASWLVITLVCLFVGIYAMAKLLLFSEVRRPIRDPWFWALFVWTYISLAASFLLWGLLATVRPDAEALEPGNEGFHGEGGAPAEQASGATLQKLLSYTKPDVAFLVAASFFLIVAALGETFLPYYTGRAIDSIVIQKSMDQFTTAVVVVCLLAIGSSLAAGIRGGIFTLVFARLNIRLRNCLFRSLVSQETSFFDENRTGDLISRLTSDTTMVSDLVSQNINIFLRNTVKVTGVVVFMFSLSWQLSLVTFMGFPIIMMVSNIYGKYYKRLSKEVQSARASTTAEETISAMKTVRSFANEEEEAEVFLRKLQQVYKLNRKEAAAYMSYVWGSGLTLLVVQVSILYYGGHLVISGQMSSGNLIAFIIYEFVLGDCMESVGSVYSGLMQGVGAAEKVFEFIDRQPTMVHDGSLAPDHLEGRVDFENVTFYWHTQVLQNVSFSLSPGKVTALVGPSGSGKSSCVNINFYPLQGGRVLLDGKPIGAYDHKYLHRVISLVSQEPVLFARSITDNISYGLPTVPFEMVVEAAQKANAHGFIMELQDGYSTETGEKGAQLSGGQKQRVAMARALVRNPPVLILDEATSALDAESEYLIQQAIHGNLQRHTVLIIAHRLSTVERAHLIVVLDKGRVVQQGTHQQLLAQGGAKLVQRQMLGLEHPLDYTASHKEPPSNTEHKA

SEQ ID NO: 68 - DNA, 57502 bp, Homo sapiens
  misc_feature (1)...(57502): n = A,T,C or G
cctgaatctatctgggtcaactgcaagttccagactgttagctgaaagggacttctagaaggggacccatcctgtttcaggctgccccaacctgagcctagctgggatgagaacccctagatgtacctcaaccatctgggcccacacagggacaggagacagtcatggccaagtcctgtgttccagaggttgctgaggactctcctgggaagcttcccaccactgactccaggggaaggaggaggagggagtggggcagcagccctggcagcagcctgcggggtatatggtaaggtgtgaggagcccaggggcctggaagctgtggctgggatcacatctgctcctgctgtaaaagcttgggcaagggatccctctttaagcctcagcttctcaatccaaaatgagagtggtgcttgtgcttatctcacagagctgttaagaacggcatgactaggcaacttagcaacttagcatttccccttctctctcctggtgccaagactcaggtgtggagggatgagtggggggcaggaaggaggaaagtgagggcctaagtgacccttcagggatcagggactgaggctaggctcaagctgtgtcctcaagctgcggacacaaatctaacgaggaggagctgtgcaggggcaggggactggtacctctgctaacagctgctggaagtccttggcgctaacacagcctcggctgcgcaggatctgggagcagaaagaacactgagcatgactgtatgacctgaggaaatcccttcactctctaagcctcagtttcccctgcttaaaatggggagaggagccccgacctcaaaggatcatggagagaatgaactgcggaaccctgtcaagctcaggacagggctccgggctggtgttgctgtgaggcggcaagctgagcccggccctgtcctaagcaccctacatgcttgttcattccttcctcacaatctcacagggagatactattacccctttacggtgagaaaaccgaggcagagagaggccgtcattcttgtatttgaagatacggtgcgcggcgtgcgcaaagcaaacgaccctggggacgaacttccctcctccactacccctctctgcccactgctccgtagggacgacagcggccactcaccgggccgtagtcccggcgcagctgctgctcgcctcggaagcgcacgtgcagcccatagcgcgccacgtacaagttatcggtgcagaagcaggcgcagcggcagaagtgccgcggagcccccaccgtcgccatagtgaagcacccacagccctaccagcttccgtagagagacttcgggcacgcccccaaccgcgggaggcgcggaaccagcggccaaggggccgctctaagttcccaagggcggaaaaggacgaagacgcacctcgccaggaaacggtctgcggagaaagatgctcctgggccgggttgggaccggcggcctcctcgttccgcctcccagttttcccactacgaggcagggactaatggctccactttacagacagctgaactgggtcgtgccttcacaggacggggagaggaagggactcggagccccaaggcctttgacttaaacgccgacccaccccccgccgtctgcccggagctcgtggagaaccagccgagctgaggacagtttaaagagctcggaggtccgactagttcccgctggtgcttcaatcatccagccctgtacgtttcagtttggatttagcatctaccccgggtccctgcctggcgcttccggtccctccgccacagtctgttggattacctcagattgccccagtgagtgtctccaccaaaacgctccgtctcgcattacttccggtggcgttcccaatggacgcgggagggcggggtcaggtgtgggagggcgacggggcgtggtctcaccgcagccaacaaatgacaactcttgcagaccgagcctcttctctccccggacctttgctcaggaatctaccagcattaaacctttgagctaggtactattatatcaccgtcttacagatgaggaaactgagacccagagaggcacagggacccgccgcaggtcacacatccagtaaggggcaaatatggcgtttgaaccctacagagttccccagttaaccaccacagggcttctgggagtggtggaagtatgtgggatttggggttttctcgtgcagagctgcccggcccgagaaggtgtttaacgttttacagtcgtcttgattgcccagtgatagtgagaggccctgctatctaggaaaggatccatttccccagatcaatgttcattacccgcctaactgccctttttccccaggaggcccagggcaggtcggctccccagccacccaccaggcaggcctggcacatgcagcacccccaaccccaccctcaccccctctccgtttgcagcagtttgcaagatgagtgtgttgtacctatcagtttatttatttgtttatttactttttgagatagagtttcacccaggctggagtgcagtggcgcgatctccgctcactgcaacctctgcctcccggattcaagcagttttcctgcctcagcctcccgaatagctgggattatcggcaggcgccaccacgcccagctaatttttttgttttttgtttgtttgtttgtttgttttgagacggagtcttgctctgtcgcccaggctggagtgcagtggnnnnnnnnnnnnnnnnnnnnnnnnnnnnnnnnnnnnnnnnnnnnnnnnnnnnnnnnnnnnnnnnnnnnnnnnnnnnnnnnnnnnnnnnnnnnnnnnnnnnnnnnnnnnnnnnnnnnnnnnnnnnnnnnnnnnnnnnnnnnnnnnnnnnnnnnnnnnnnnnnnnnnnnnnnnnnnnnnnnnnnnnnnnnnnnnnnnnnnnnnnnnnnnnnnnnnnnnnnnnnnnnnnnnnnnnnnnnnnnnnnnnnnnnnnnnnnnnnnnnnnnnnnnnnnnnnnnnnnnnnnnnnnnnnnnnnnnnnnnnnnnnnnnnnnnnnnnnnnnnnnnnnnnnnnnnnnnnnnnnnnnnnnnnnnnnnnnnnnnnnnnnnnnnnnnnnnnnnnnnnnnnnnnnnnnnnnnnnnnnnnnnnnnnnnnnnnnnnnnnnnnnnnnnnnnnnnnnnnnnnnnnnnnnnnnnnnnnnnnnnnnnnnnnnnnnnnnnnnnnnnnnnnnnnnnnnnnnnnnnnnnnnnnnnnnnnnnnnnnnnnnnnnnnnnnnnnnnnnnnnnnnnnnnnnnnnnnnnnnnnnnnnnnnnnnnnnnnnnnnnnnnnnnnnnnnnnnnnnnnnnnnnnnnnnnnnnnnnnnnnnnnnnnnnnnnnnnnnnnnnnnnnnnnnnnnnnnnnnnnnnnnnnnnnnnnnnnnnnnnnnnnnnnnnnnnnnnnnnnnnnnnnnnnnnnnnnnnnnnnnnnnnnnnnnnnnnnnnnnnnnnnnnnnnnnnnnnnnnnnnnnnnnnnnnnnnnnnnnnnnnnnnnnnnnnnnnnnnnnnnnnnnnnnnnnnnnnnnnnnnnnnnnnnnnnnnnnnnnnnnnnnnnnnnnnnnnnnnnnnnnnnnnnnnnnnnnnnnnnnnnnnnnnnnnnnnnnnnnnnnnnnnnnnnnnnnnnnnnnnnnnnnnnnnnnnnnnnnnnnnnnnnnnnnnnnnnnnnnnnnnnnnnnnnnnnnnnnnnnnnnnnnnnnnnnnnnnnnnnnnnnnnnnnnnnnnnnnnnnnnnnnnnnnnnnnnnnnnnnnnnnnnnnnnnnnnnnnnnnnnnnnnnnnnnnnnnnnnnnnnnnnnnnnnnnnnnnnnnnnnnnnnnnnnnnnnnnnnnnnnnnnnnnnnnnnnnnnnnnnnnnnnnnnnnnnnnnnnnnnnnnnnnnnnnnnnnnnnnnnnnnnnnnnnnnnnnnnnnnnnnnnnnnnnnnnnnnnnnnnnnnnnnnnnnnnnnnnnnnnnnnnnnnnnnnnnnnnnnnnnnnnnnnnnnnnnnnnnnnnnnnnnnnnnnnnnnnnnnnnnnnnnnnnnnnnnnnnnnnnnnnnnnnnnnnnnnnnnnnnnnnnnnnnnnnnnnnnnnnnnnnnnnnnnnnnnnnnnnnnnnnnnnnnnnnnnnnnnnnnnnnnnnnnnnnnnnnnnnnnnnnnnnnnnnnnnnnnnnnnnnnnnnnnnnnnnnnnnnnnnnnnnnnnnnnnnnnnnnnnnnnnnnnnnnnnnnnnnnnnnnnnnnnnnnnnnnnnnnnnnnnnnnnnnnnnnnnnnnnnnnnnnnnnnnnnnnnnnnnnnnnnnnnnnnnnnnnnnnnnnnnnnnnnnnnnnnnnnnnnnnnnnnnnnnnnnnnnnnnnnnnnnnnnnnnnnnnnnnnnnnnnnnnnnnnnnnnnnnnnnnnnnnnnnnnnnnnnnnnnnnnnnnnnnnnnnnnnnnnnnnnnnnnnnnnnnnnnnnnnnnnnnnnnnnnnnnnnnnnnnnnnnnnnnnnnnnnnnnnnnnnnnnnnnnnnnnnnnnnnnnnnnnnnnnnnnnnnnnnnnnnnnnnnnnnnnnnnnnnnnnnnnnnnnnnnnnnnnnnnnnnnnnnnnnnnnnnnnnnnnnnnnnnnnnnnnnnnnnnnnnnnnnnnnnnnnnnnnnnnnnnnnnnnnnnnnnnnnnnnnnnnnnnnnnnnnnnnnnnnnnnnnnnnnnnnnnnnnnnnnnnnnnnnnnnnnnnnnnnnnnnnnnnnnnnnnnnnnnnnnnnnnnnnnnnnnnnnnnnnnnnnnnnnnnnnnnnnnnnnnnnnnnnnnnnnnnnnnnnnnnnnnnnnnnnnnnnnnnnnnnnnnnnnnnnnnnnnnnnnnnnnnnnnnnnnnnnnnnnnnnnnnnnnnnnnnnnnnnnnnnnnnnnnnnnnnnnnnnnnnnnnnnnnnnnnnnnnnnnnnnnnnnnnnnnnnnnnnnnnnnnnnnnnnnnnnnnnnnnnnnnnnnnnnnnnnnnnnnnnnnnnnnnnnnnnnnnnnnnnnnnnnnnnnnnnnnnnnnnnnnnnnnnnnnnnnnnnnnnnnnnnnnnnnnnnnnnnnnnnnnnnnnnnnnnnnnnnnnnnnnnnnnnnnnnnnnnnnnnnnnnnnnnnnnnnnnnnnnnnnnnnnnnnnnnnnnnnnnnnnnnnnnnnnnnnnnnnnnnnnnnnnnnnnnnnnnnnnnnnnnnnnnnnnnnnnnnnnnnnnnnnnnnnnnnnnnnnnnnnnnnnnnnnnnnnnnnnnnnnnnnnnnnnnnnnnnnnnnnnnnnnnnnnnnnnnnnnnnnnnnnnnnnnnnnnnnnnnnnnnnnnnnnnnnnnnnnnnnnnnnnnnnnnnnnnnnnnnnnnnnnnnnnnnnnnnnnnnnnnnnnnnnnnnnnnnnnnnnnnnnnnnnnnnnnnnnnnnnnnnnnnnnnnnnnnnnnnnnnnnnnnnnnnnnnnnnnnnnnnnnnnnnnnnnnnnnnnnnnnnnnnnnnnnnnnnnnnnnnnnnnnnnnnnnnnnnnnnnnnnnnnnnnnnnnnnnnnnnnnnnnnnnnnnnnnnnnnnnnnnnnnnnnnnnnnnnnnnnnnnnnnnnnnnnnnnnnnnnnnnnnnnnnnnnnnnnnnnnnnnnnnnnnnnnnnnnnnnnnnnnnnnnnnnnnnnnnnnnnnnnnnnnnnnnnnnnnnnnnnnnnnnnnnnnnnnnnnnnnnnnnnnnnnnnnnnnnnnnnnnnnnnnnnnnnnnnnnnnnnnnnnnnnnnnnnnnnnnnnnnnnnnnnnnnnnnnnnnnnnnnnnnnnnnnnnnnnnnnnnnnnnnnnnnnnnnnnnnnnnnnnnnnnnnnnnnnnnnnnnnnnnnnnnnnnnnnnnnnnnnnnnnnnnnnnnnnnnnnnnnnnnnnnnnnnnnnnnnnnnnnnnnnnnnnnnnnnnnnnnnnnnnnnnnnnnnnnnnnnnnnnnnnnnnnnnnnnnnnnnnnnnnnnnnnnnnnnnnnnnnnnnnnnnnnnnnnnnnnnnnnnnnnnnnnnnnnnnnnnnnnnnnnnnnnnnnnnnnnnnnnnnnnnnnnnnnnnnnnnnnnnnnnnnnnnnnnnnnnnnnnnnnnnnnnnnnnnnnnnnnnnnnnnnnnnnnnnnnnnnnnnnnnnnnnnnnnnnnnnnnnnnnnnnnnnnnnnnnnnnnnnnnnnnnnnnnnnnnnnnnnnnnnnnnnnnnnnnnnnnnnnnnnnnnnnnnnnnnnnnnnnnnnnnnnnnnnnnnnnnnnnnnnnnnnnnnnnnnnnnnnnnnnnnnnnnnnnnnnnnnnnnnnnnnnnnnnnnnnnnnnnnnnnnnnnnnnnnnnnnnnnnnnnnnnnnnnnnnnnnnnnnnnnnnnnnnnnnnnnnnnnnnnnnnnnnnnnnnnnnnnnnnnnnnnnnnnnnnnnnnnnnnnnnnnnnnnnnnnnnnnnnnnnnnnnnnnnnnnnnnnnnnnnnnnnnnnnnnnnnnnnnnnnnnnnnnnnnnnnnnnnnnnnnnnnnnnnnnnnnnnnnnnnnnnnnnnnnnnnnnnnnnnnnnnnnnnnnnnnnnnnnnnnnnnnnnnnnnnnnnnnnnnnnnnnnnnnnnnnnnnnnnnnnnnnnnnnnnnnnnnnnnnnnnnnnnnnnnnnnnnnnnnnnnnnnnnnnnnnnnnnnnnnnnnnnnnnnnnnnnnnnnnnnnnnnnnnnnnnnnnnnnnnnnnnnnnnnnnnnnnnnnnnnnnnnnnnnnnnnnnnnnnnnnnnnnnnnnnnnnnnnnnnnnnnnnnnnnnnnnnnnnnnnnnnnnnnnnnnnnnnnnnnnnnnnnnnnnnnnnnnnnnnnnnnnnnnnnnnnnnnnnnnnnnnnnnnnnnnnnnnnnnnnnnnnnnnnnnnnnnnnnnnnnnnnnnnnnnnnnnnnnnnnnnnnnnnnnnnnnnnnnnnnnnnnnnnnnnnnnnnnnnnnnnnnnnnnnnnnnnnnnnnnnnnnnnnnnnnnnnnnnnnnnnnnnnnnnnnnnnnnnnnnnnnnnnnnnnnnnnnnnnnnnnnnnnnnnnnnnnnnnnnnnnnnnnnnnnnnnnnnnnnnnnnnnnnnnnnnnnnnnnnnnnnnnnnnnnnnnnnnnnnnnnnnnnnnnnnnnnnnnnnnnnnnnnnnnnnnnnnnnnnnnnnnnnnnnnnnnnnnnnnnnnnnnnnnnnnnnnnnnnnnnnnnnnnnnnnnnnnnnnnnnnnnnnnnnnnnnnnnnnnnnnnnnnnnnnnnnnnnnnnnnnnnnnnnnnnnnnnnnnnnnnnnnnnnnnnnnnnnnnnnnnnnnnnnnnnnnnnnnnnnnnnnnnnnnnnnnnnnnnnnnnnnnnnnnnnnnnnnnnnnnnnnnnnnnnnnnnnnnnnnnnnnnnnnnnnnnnnnnnnnnnnnnnnnnnnnnnnnnnnnnnnnnnnnnnnnnnnnnnnnnnnnnnnnnnnnnnnnnnnnnnnnnnnnnnnnnnnnnnnnnnnnnnnnnnnnnnnnnnnnnnnnnnnnnnnnnnnnnnnnnnnnnnnnnnnnnnnnnnnnnnnnnnnnnnnnnnnnnnnnnnnnnnnnnnnnnnnnnnnnnnnnnnnnnnnnnnnnnnnnnnnnnnnnnnnnnnnnnnnnnnnnnnnnnnnnnnnnnnnnnnnnnnnnnnnnnnnnnnnnnnnnnnnnnnnnnnnnnnnnnnnnnnnnnnnnnnnnnnnnnnnnnnnnnnnnnnnnnnnnnnnnnnnnnnnnnnnnnnnnnnnnnnnnnnnnnnnnnnnnnnnnnnnnnnnnnnnnnnnnnnnnnnnnnnnnnnnnnnnnnnnnnnnnnnnnnnnnnnnnnnnnnnnnnnnnnnnnnnnnnnnnnnnnnnnnnnnnnnnnnnnnnnnnnnnnnnnnnnnnnnnnnnnnnnnnnnnnnnnnnnnnnnnnnnnnnnnnnnnnnnnnnnnnnnnnnnnnnnnnnnnnnnnnnnnnnnnnnnnnnnnnnnnnnnnnnnnnnnnnnnnnnnnnnnnnnnnnnnnnnnnnnnnnnnnnnnnnnnnnnnnnnnnnnnnnnnnnnnnnnnnnnnnnnnnnnnnnnnnnnnnnnnnnnnnnnnnnnnnnnnnnnnnnnnnnnnnnnnnnnnnnnnnnnnnnnnnnnnnnnnnnnnnnnnnnnnnnnnnnnnnnnnnnnnnnnnnnnnnnnnnnnnnnnnnnnnnnnnnnnnnnnnnnnnnnnnnnnnnnnnnnnnnnnnnnnnnnnnnnnnnnnnnnnnnnnnnnnnnnnnnnnnnnnnnnnnnnnnnnnnnnnnnnnnnnnnnnnnnnnnnnnnnnnnnnnnnnnnnnnnnnnnnnnnnnnnnnnnnnnactcctgctttttggacagtccatccaagtaatcgtcttcaagtacaattagtatatttgcctttgtttttgcaccaatagtaacatggttcaactttattctctccttggtttttactcaatacatttaggaggtcattccatacctttatataactctatgtcttctatttttttttttctggctacagagtattctgttgaacaggtgttctctaattatttggccagttccctatggaagggtatttaggttatttccagacttttgctactgtagtaactacctttaagctagtaccttagctcccttgcacaagtctatctgtagaggaaattccttctgggttaaaaaaaaacatagtgttgtaagttctgaacaaattcccctctaaagaagctgtcccaccaagtagcagaggacatttccaattcagagagtgctccaaaaagcctctgttcagggctgggcacacatggctcacgactctaatcccagcagtttggaaggccaaggagggcagatcacttgaggtcaggagtttgagaccagcctggccaacatggctaaaccccatctctactaaaaatacaaaaattagccaggcgtggtagcggacacctgtaatcccatctacctgggaagctgaggcaggagaatcacttgaagctgggaagcagaggctgcagtgagctgagaactcgccactgcactccatcctggagtctctgtctcaggaaaaaacaaagcctctgatcagaggatccagggatgtgggcagttctagccccacctgctgcccctctgggccgtaagtccactcccccacccacttcccacggttcaggccacatggacccttttctggtcctcaagtggccaagttggttcccacctcagagcctttgaacttgcaggccttagcgtaggatgttcctccctccccgtggctcacgccttctcacctttcacttacacaattttatttattttactgcatccagtacctgaatggccttatgcacttacttgctgatgttctgtccccttcacgccatgaaggctgggagttttctgtcttttcacacacagctgtgttcccagcacctggcagtcactgaggacatatcgctgcctcccctctccaatgccccgaatccctgatcttgcaccaattttctccgtaaaatgtattcccttccaatatatctcatttgcttatatgtgttgtctgacaccctcactagaatgtcagctccagaagggcaaggatcttgttttgttaattgtttaatttcaaatgcttaaaagggcatatggcacgccgtaggcactggataaatatctgttgggtgaacgaatgaaagaataagtgaatgaatgaggaccataacccaccctcctggactggctggctgtccctccagggaaaaaggccagttaaaaagctggcctccttcaggtgaaaccatttccgtcccctcaggatgggcccgtggctccaggtggaggccagcacgcagtgtggagggcctggttggccagatgtgggaggagtttgccacaggtgagcaggtggccagctgtggccccgcccccaggaggcccgtccccacccggaggcttcgccagccccctcctcgggggccccgccccgtccaggaaagcccgcccactcctcctgaggccccgcccctcccgggaggctccgccggtccctgccccaggatccccgccccctccgtcactgaggccccgccccgtccatcagcctgtctcaacgcacgccagtctcagctccgaccttgcagcggcgcagcgcgggtgggaggcggggaggagcagcgggaagagcggagcgaggaccgcgtccggcgcagtcttcaatgagcagcgcggaaactgcaccccagacccgagcctgctgcgcgccccctcccagagctcacctggtgccaggtaacaggtaagggcaaggcaccctagacccctggttttgggacctttccaggccagggtgccaggccaggcacgcgttggggggcgtctgggcacccctgcctcggtgggaataggcatctcggttgaaggtgggagcctccctggagccctcccggagcccgcagccgcagctcccagcccccatccctgcagcatcctttccgcgcccgtagggcgaatgttgccattttttttaacccccaaggcgccgctgcctcttggaaaatgtgggaggtgttggaggatcctgggatggctgtcgttcccccaggacggggctggcgcgccttctgagggctcccactgtccatgtcagggcttcccagggatcctgagcaccagggctttggcagaagcctgggggatctggcctgttcctgctgacctgggcaaagcccttttctcagtctcctcagcaggccagtgggctgccgctgctccccgccatccacgctggcagtgaggcctgtaggttcccaggggagcctcttttatttctgggcctctggaaaaaaaaaaaaagcctcctcccccggcctgacattaactgagacagctttaagctgggctgacaggatccccgcctctgcccattccccttttccggatagtgcagggccgggtgacaagaggaggcttggagggagggcacctcgcgcctctctgcctctcctagagctgagagcacctgagacagcttctcaagtcccagagtgaggctgggccccacgtgggctgccagaggctcagcagggatgaaatcaggatggacccacgcagacccagcccgctcctgccccagagccagggacccccacagtcaggccctcccacccagcaggcctctgtcagtcagtgctttgctgcgcagcgaatggaatgggcttatctgggtctgggcccacaccggggtaaaaagctcaccatgtcaggggtgaaccgaggccactgggccacccaagttctttggccccttttcttgcaatccctgaatagcctggacaggggacccccgagtctccatcctggagaccctggatgcgggtctccatcctgccttcgtcctttttctgcgtgtcacttaacctcttctgtctccccagctgtaaaacgaagctgatgaccacagggtcctcccagggaagtggggaggcctggctgctttgggaggtgccaggcacatagtagggcccggtgaagggtctctgttgcagtgtcataataacttttatctattgtctcctggccttctctgcaaagggtctctgttgcagcgtcataataactgctatctatcgtcttctggccttctctgcagctgatgcctagagataccccaaccaatgtctcctaccctgggaagaaaagcctttgacaagacccctggtggggacaaggccacttgcttatcctgtgccattctttagtgcacggagtcagggcgagccacccctgtcttcctgggccttgtccggttctgggtggggcctattctggccaccaccttgtccttgtccctcaggccaagcaggtcacccatgtgctcacaatttgccctccagctccacctggccgagcccagcgcatcctctgagtcaggcagttggagagcggtgacaggcctctaagcagccttggctggtggtcacgcttctgcccagtagctttaaaaataacggagtaactgtccccaccgaggactgtaacccgacccggggctggagtccactctgctaggagtctgtggtagaaggactagtgcttgggggcagggacccaggtgctagcactgctctgccccagcctggtggatgacctgagacaagcctcaccccctccctctgtgggcctcagtttccccatctgcaaaatgtggctttggtagtctgcgatatgagtgtttgaaattttgtttattctgatgaagataaataggcttctggaggcggggggcatgactggtaccctgggctgttgggggatggggaaggaattcccccagaggctgggagtcaggttgggagagtcagccaagcccctgggctgctgtccaggttttgagtctcttgcggatctgcctcctgttccacttctgagcccgagcccctttctggggactgagggaccccatgtgcccaccacgaggagagcagcagctgaggcggctggcagcacctggtgcagccggcagtggcttggctgggaggcctggaatggcaccaggccaggagcttccctccctgggctctgactggagctcacccactcgctcgctccccacggcctctgcattgcagcagacaggagcctgcgtgggcagcacaggcagggctggggagggagccaggacctgggctgagggtgtccgaccatcctacccacttccccttgcccttgaccctgcttggccctgaccgtctttggaggggcagctgctgactaagcaactgtcatctctgcgatgggcttcggtgtgcctggaggtgtgggggtgaaagcagggcccaggcttggaggttgttatatccccccactccattccccctctgcatctcagaccccttctcagcattagtaggggttgtgcctacctcctggagaggctgttttgaagggttggagctatggagttgagagtacagattttggaactggacggccagggttcacatcccagcttgtgacccaactctgtgggtcacctagctctgtgacccagggcaggtcacttaatctctctgttcctcagttttcctaactgtaaaatggggataatgataggacctacttcatagggctctggtgagtgctgacgcatgtaagtgcctggagccaatgtcagctggcaccagctgctgtcattgccagcaattagcctcagcagtcttatcacctctgccacacggcccagccctctgctggggacccttttccttagatgaacacttcccggtagcattttccttcactctgtcacccaggctggagtgcagtggcgcaatctcggctcaccgcaacctccacctcccagtttcaagtgattcttctgcctcagcctcctgagttgctggggttacaggcgtgcaccaccatgctcggctaatttttgtatttttagtagagacgggatttcgccatgttgcccaggctggaatcgaactcgtgagctcaagctgttgcccatcttggcctcccaagaggcccagatgggattacaggtgtgagccaccatgcctggcccctggtagcattttctatattgaatgttatcttagtttaggggtgaagaacacagattctgggctcagacacctatgaatccacatcccagctctgctattcagaagctgtgtaatcttgggcaaattcttcacttctctgggcctcagtttctccatctgttaagtggaagggatgacagtgcacatctcacaaagttgctgtgaggattaaataggtggggccacctggatttgaagcacatggtgcagggcagggctcacaggaagtgcagtgttacatccctgtctgcttgtagttattagacaactgctttgtgccaggcatgcagtagacaggtggagaggcagatgctggggtcctacactcactgactgcctcaagtcatcctggcttgggcccttgttggctgaatgtctggatcaggtggttttgtctctctgtgcctcagtttccctaactgtaaacgggaatatggaaaccctggcctcgtgggactgtgtgaggttccagtcatgccacagtgtgagcggtttgggcacctgggcgccagagcttcggggagaggatctctctcaggatggccccttcccagccacgacagtcatccccgctgtcacccagcgcctcacccctcctcttgggggatctagagcccagcccattttgcagatatgacaacaaaaggcccacgggaggaaggactggagctgagacaggaggtagcacccagggacacaccccagcccggtcctaaccctaccgtggacaagccccactcacaaactcaggcctccaggcccacttcccgggtgtccctgcggctctgggggagtcctgagggacccagtgccgggagatgccttggataaagcagacatcaagattcagaaaaccaaaggggcctagggctgggcacgagggccaacctgggcaggaggaaaagattctggaaacttccaagcagatgccaaggtttctggattgctgtgtggcctgcaagccacccccacagctgtcaagttccctcttagaccaaaatagtttatttggggttgcagagatagaaggcctgacgtgggaggagaaaagtggacaaacatttattaagcacacactgtatatggttgattacaatcagcagcaattatgcaccaggcactctgcccagaactgacacattgaacctcacactcacattttgcaaatgaggaaacaggttcagagaaatgagtagtggtagtaaagacagcggctgtttattaaactctgcttatctcagcttcgtcctcactatggatgcaaaatcctccagatactccccaccctctctgatctcatggggccttgctgccttcccaaggggcactcctgccttggggctctggcactgtttcacctgtgccaagtgcttttccccagatagccacttggcagacttccataactctttcaagtcttgctcaagtgttacctacccagcgaggtcttctctggccccctatttaaaattgatctctggccccgcacagtggctcacgcttttgatcccagactttgggttactgaggcatgtggatcacttgaggtcaggagtttgagaacagcctggccaacatggtgaaaccccgtctctactaaaaaaaatacaaaaagttagctggtcatggtggtggggtacctgtagtcccagctacttggggggctgaggcaggagaatcgcttgaaccagggagacggaggttgcggtgagccgggatcgcaccactgtactccagcctgggcgacagagcaagactctgtctcaaataaataaataaataaaataaaattgatctctgtcttcccccacccctatcctattcaccctcaccccatcctatttacccccctcttttttccaccacaacccttatctctttttttaattaaaaaaaatttttttttttagagataggatcttgctgtcaccagggctggagtgtagtggcatgatcatagctcactgtggcctcgaactcccaggctgaagaagcgatcctcccatcttggcctcccaagtagcttggactacaggagcatgctaccacactcagttaatgtttgtttgtttgtttgtttgtttgctttttaaagacagggtctcaccctgttgcccaggctgctctccaactcctggcctcaagggatcctccaaccttggcctcacaagacacacattatttccttattatcttttttttttttttttgagatggagtctcgctctgtcacccagctaaattttgtatttttagtagagatgggggtttcaccatgttggccaggctggtcttcaactcctgacctcaggtgatccacctacctcggcctcccaaagtgctgggattacaggcgtgagcccatttccttattatctgtctcctgcatgagtatgtcatctccaggagagcagggatctttgttctttttgttcatgacaaagaacaaagaacagcacctggccgcagtgggcactcagtaagtatcccttgaatgagtggaatcttagtacccgggaagttgatattgccattttacagatgagaaaactaaggctcagagatgtcaagtgactttctcaaggtcacacagccagcgagtggcaaacctgaaccccttgtgctgatgtttgctgttgtccctacaggcctggcctcgccctgtggatgatgatggccttgcccccgtgagctacaacctggccttcagcacccgcccacctccaaccagcaggatgcggctgtggaaggcggtggtggtgactttggccttcatgagtgtggacatctgcgtgaccacggccatctatgtcttcagccacctggaccgcagcctcctggaggacatccgccacttcaacatctttgactcggtgctggatctctgggcagcctgcctgtaccgcagctgcctgctgctgggagccaccattggtgtggccaagaacagtgcgctggggccccggcggctgcgggcctcgtggctggtcatcaccctcgtgtgcctcttcgtgggcatctatgccatggtgaagctgctgctcttctcagaggtgcgcaggcccatccgggacccctggttttgggccctgttcgtgtggacgtacatttcactcggcgcatccttcctgctctggtggctgctgtccaccgtgcggccaggcacccaggccctggagccaggggcggccaccgaggctgagggcttccctgggagcggccggccaccgcccgagcaggcgtctggggccacgctgcagaagctgctctcctacaccaagcccgacgtggccttcctcgtggccgcctccttcttcctcatcgtggcagctctgggtaagtaaggacctcggggacatgtggccaccagaacatcaaattaggtggatatgactgccttagattttaaaagattttacttacgtggttcagacatcaaattgatatgaaaaggaaaagaggccaggcatagtggctcatatctataatcccagcactttgggaggctgaggtaggaagatcacttgagcccaggagttgaaaaccagcctgggcaacatagcgagaacccatttctattttatttatttatttatttattgtatttatttattttttcgaaacatagtattgctctgtcacctaggctagagtgcagtggcacaatctcaggtcactgcaacctctgcctcccagcttcaagtgattctcctgcctcagcctctcaagtagctgggactacaggcatatgccaccacacccaactaatttttgtatttttagtagaaacaggttttcgccatgttggccaggctggtcttgaactcctgacctcaggtgatccactggcctcggcctcccaaagtgctgggattacaggcgtgagccacggtgcctgccccatttctattttatgtaatttaaaacgaaaaaataggccaggcgcggtggctcacgcctgtaatcccagcactttgggaggccgaggccagtggatcacctgaggtcaggagttnnnnnnnnnnnnnnnnnnnnnnnnnnnnnnnnnnnnnnnnnnnnnnnnnnnnnnnnnnnnnnnnnnnnnnnnnnnnnnnnnnnnnnnnnnnnnnnnnnnnnnnnnnnnnnnnnnnnnnnnnnnnnnnnnnnnnnnnnnnnnnnnnnnnnnnnnnnnnnnnnnnnnnnnnnnnnnnnnnnnnnnnnnnnnnnnnnnnnnnnnnnnnnnnnnnnnnnnnnnnnnnnnnnnnnnnnnnnnnnnnnnnnnnnnnnnnnnnnnnnnnnnnnnnnnnnnnnnnnnnnnnnnnnnnnnnnnnnnnnnnnnnnnnnnnnnnnnnnnnnnnnnnnnnnnnnnnnnnnnnnnnnnnnnnnnnnnnnnnnnnnnnnnnnnnnnnnnnnnnnnnnnnnnnnnnnnnnnnnnnnnnnnnnnnnnnnnnnnnnnnnnnnnnnnnnnnnnnnnnnnnnnnnnnnnnnnnnnnnnnnnnnnnnnnnnnnnnnnnnnnnnnnnnnnnnnnnnnnnnnnnnnnnnnnnnnnnnnnnnnnnnnnnnnnnnnnnnnnnnnnnnnnnnnnnnnnnnnnnnnnnnnnnnnnnnnnnnnnnnnnnnnnnnnnnnnnnnnnnnnnnnnnnnnnnnnnnnnnnnnnnnnnnnnnnnnnnnnnnnnnnnnnnnnnnnnnnnnnnnnnnnnnnnnnnnnnnnnnnnnnnnnnnnnnnnnnnnnnnnnnnnnnnnnnnnnnnnnnnnnnnnnnnnnnnnnnnnnnnnnnnnnnnnnnnnnnnnnnnnnnnnnnnnnnnnnnnnnnnnnnnnnnnnnnnnnnnnnnnnnnnnnnnnnnnnnnnnnnnnnnnnnnnnnnnnnnnnnnnnnnnnnnnnnnnnnnnnnnnnnnnnnnnnnnnnnnnnnnnnnnnnnnnnnnnnnnnnnnnnnnnnnnnnnnnnnnnnnnnnnnnnnnnnnnnnnnnnnnnnnnnnnnnnnnnnnnnnnnnnnnnnnnnnnnnnnnnnnnnnnnnnnnnnnnnnnnnnnnnnnnnnnnnnnnnnnnnnnnnnnnnnnnnnnnnnnnnnnnnnnnnnnnnnnnnnnnnnnnnnnnnnnnnnnnnnnnnnnnnnnnnnnnnnnnnnnnnnnnnnnnnnnnnnnnnnnnnnnnnnnnnnnnnnnnnnnnnnnnnnnnnnnnnnnnnnnnnnnnnnnnnnnnnnnnnnnnnnnnnnnnnnnnnnnnnnnnnnnnnnnnnnnnnnnnnnnnnnnnnnnnnnnnnnnnnnnnnnnnnnnnnnnnaaaaaaaaaaaaactctcagcagtttgagaccaaaaaaaaaaaaaaaagatattaatattttagttgtgtgtgcctacgtgcaggtgtggcctggtttgtgacatgaaatgtatttgtgcctgtgagtctggtccaaacagtttgaaggcaccactcagcaacatgggtgggaaggtggcactgcatggttggagctcacaggttctgggggcaacgaggcctgggcacaaatccctgtcctgctccctacccagccgagtggccctgcgtaagttctccagcctttctgagcctcacttccctcctctgtgcaacaaggattgttggagtccttatttcctgacattttagatgctgaaaagaacgggagagctgggtgcagtggctcatgtctaatcccagcactttgggagaccaaggctacaggatcacttgagcccaggagtttgagaccactctgggcaacacagcaggaccctgtctctaaaagaaatgtttttttaattagctgggcatggtggtacttgcctatagtcccagctactcaggaggctaaggtgggaggatcccttgagctcaggagcttgagttatagtgagccatgatgacgccactgccctccagcccgggcaacagagcaagacctgtctctaccaaagaaaaaaaaaaaaataggagaaggactaagtacagagcttggcttgtcatggtaagtgctcagggttgttagctattatgagttttaaaaattttaagctgggcgcggtggctcatgcctgtaatcccaacactttgggaggccgaggtgggcagatcacttgaggtcaggagtttgagacgagcctggccaacatggtgaaaccccgtctctgctaaaagatatataaatattagccgggcacagtggctcatgcctataatcccagcactttgggaggccgaggcaagtggatcacctgaggtcaggagttcgagaccagcctggcaacatggtgaaaccccatgtctactaaaaatataaaacttagccagatgtgctggcatacgcctgtaattccagctatttgggaggctgaggcaggagaattgcttgaacctgggaggcagaggttgcagtgagccaagctcacacaactgcactccagcctgagtgacaaagtgagactccatctcaaaaaacataaataataaaatagtaaaataaaaatgttaactgacagagacagagcctagagaggtgacaatgcaataacaatgccagaatgttctgagagaggacaggcaaacccagagctggccctgactctgcagccctgtactcctacgatctacctctgccctctcagtcccatctcctcaacatctgtgtgaggttaggcaagttatttaacccctctaagtcttagcctcctcttctgtgacatgggcatagtagtacccctccaatggggttggaaaggtcagtgaatccacatgggtgagacaccttggacagctcctggcacatagacacctcccagtaatactagcaggtgtgaggactgggatgaccccttcccattaaaccaggcagtttctcctggctcatgctgggcggcccaaaagtcccctccttaggaagccaccttagattctgccaactgtggtaactttgtctgcacctcagttatagcttttatgacataaaaatcatatgttcaggctgggtacggtggctcacacctataatcccagaactctggggagctgaggcctgcagatcacctgaggttaggagttcgagactagcctggacaatatggcaaaaccccgtctctactaaaactacaaaaattagctgggcatggtggcagccgcctgtaatcccagctactcagaaggctgatgcaggaggatatcttgaacccaggaggtggaggctgcagttagctgggattgtgccacagcactccagcctaggcaacaaagtgagactccgtctcaaaaaaaaaaaaaacaaaaaaacaaaaacccaaaaaactatgcatttatgctgggcacagtggctcatgcctacaatgccagtactttgggagtctgaggcaggaggatcacttgaggccaggagttcaagaccagtctggccaacatagcaagaccctgttatgtatgcattcaccctcctgcctcccctcccaggtcctgagcccctcaggggcaggggccaggtctgactcaccctggatcccagtagctggcacagagatgggctcactgaatgaataaatgaacaaaagtatgaatgactgtcatgcctgtgcagacagatggtgccccatgccatgaccttgtttacccgacctgctggggccctgccgtcagctgctgtgtggtcggggaatgcagacatccttaaatactgctgagcagattttcccggcttgcaggattgcatcaagagtcagggcgcagactcgaggctcaggctcccgacttcactgataactttaggcaagttattaacctggccaacgctcacttgaccattctgaagtgagggctttcttggggtactgtgagaaagaagtgagaggaagcttggtgcctagcacaagtaaatacttaatcagtgttagggccaggtgcaatgccatgtacctgtgaccgcagctacttgggtggccaaggagggagggttgctttggcttaggagtttgagaccaacctgggcaacatagcgagaccccatctcaaaaaagacaattaggtactgtgattattaataattatttttcaatcaacaagcattcagcagtgcccagcttttctgtaccctcagaatcttaaaacaaacaaacaaaaacaaaaaacaaaaaaccacccattgggaaatgttagttttagggttgagtatctcttattaaattaaggttctttagaggccaagtgcagcagctcacacctataatcccagcactttggaaggctgaggtgggcagatcacttgaggtcaggagttcaagactagcttggccaacatggtgaaactccgtctctactaaaaatacaaaaatcagccgggcgtggtggcacacgcctgtaatcccagctgctcagaaggctgaggcaggagaattgcttgaacctgggaggtggaggttgcagtgagctgatatcgtgccactgcactccagcctgggtgacggaatgagactctgtctcaaaaaataaaaaataggccgggcacggtggctcacacctgtaatctcagcaagggggggcagatcacctgaggtcaggagttcgagaccagcctgaccaacatggagaaaccccgtctctactaaaaatacaaaattagctaggtgtggtggcgcatgcctgtaatcccagctactcgggaggctgaggcaggagaatcgcttgaacccaggaggcagaggttgctgtgagtggagatcgcaccattgcatcgcagcctgggcaacaagagtgaaactccgtctcaaaaaaaataaaaaaaatacataaaaaacaaatggagtccttttttttttttttgaggcagggcctccctctgtcacccaggctggatggagtacagtggagtgatcacagcgacttcagccttgacctctccagctcaagtgatcctcccacctcggcctcccaaagtgctgggattgcaggtgtgagctaccttctgtagcctaagattctttaatatggatttcatggcaaaccaaatgtataaacttgggcaagtgacttaatctctctgagcctcagtttcctcttttgtgtaaagaatacatttccacaaatggaaggaataattgtaccaaacctataggattactgggtggcctttgagacttaagaaggtaggggagcagatatctggggtaagtggctgggtgtggtggctcacacctgtaatcccagcattttggaaggccgaggcgggcagatcacttgaggtcaagagttcaagaccagcctgggcaacatggtgaaaccctgtctctaataaaaatataaaatttaggccaggtgcgatggctcatgcctgtaatcccagcactttgggaggccaaggcaggtggatcacgaggtcaggagttcaagatcagccaggccaacatggtgaaaccccatctctactaaaaatacaaaaattagccaggtgcaatggcaggtgtctgtaatcccagctactcgggaggctgaggcaggacaatcacttgaacccaggtggcagaggttacagcgagctgaaatcgtgccaatacactccagcctgggcgacggagtgcgactccatctcaaaatatatatatacatatataaaatttagccgggtgtgatggcggtcacctgtaatctcagctacttgggaggctgaggcatgagaatcacttgaacccaggaagtggaggttgcagtgagctgagatcatgccactgcactccagcctgggtaacagactgagactccatctcaaaaaaaaaaaaaaatgtatgtggtaagagcactccaggcagaaggactagcccatgcaaaggtcctgaggcaggaaggtgcccagttgttcaagagcagacaccagttagctggagcagagggagtgagatggggcggggagaagacaaaggtctctgctagcggctcaatcatgcaggtccttgtgggctattgtaaagactttggcttttaccatctcactggatgagaagggggatttggactgttttgagccaaggagcaacaagatctgaagttagttccaacaggatcctgccttctactgtgtggacaggctgatgtgagcaaagttgagagcaggctactgagatagtcccagtgaggttaatgacttggaccagggttggggcagtagaggcagtgaaagtggtcaggttctggaaatggtctgagtatttgctggtgcattggagagtttcacgtaattcttgtgcagattcagcaagagagtttgccggcatgctttgcacagcccctggtacccagtaaggcgattattagcattggtgcttgctggaatcagatattccagaatattctgtcacagctcatcgttgccctcttcttttctgtgggtaaactgaggcagaaactcaggctgggtggaactctgcagcctcagctggagacctcgtctggccaaggactgtggggacacaggccctctaggctgccacctcatggtcccagcagagggcaccagaactgcacagaaagtctcactacccaagtgtctgagccaggccagactgtgctagccagacctgcccggggttcattcactgacctttattgagcacctactgtatgcccagccccaaacctggctctgctcatggaaagaacttcagtggaaacaggtcctgggatgaacaagggcctggcctggcctggtgatgccactatttccttaagaggagagtggacattccggattattgtcgggggagtctcatttctgctgctgtaacaaaataccacagactgggtcatttagaaaccatagaaactgatttcgtactgttctagaggctgggaagtcccagatcaaggtgccagcaggtttggtgtcgtgagggccactctctgcttccaagatggtccctccttgctgtgtcctctggaggggaagactgctgtgtcctcacgctgcagaaggtggaagggcgagagatggcaaaccaggcttacaagccctttgaaaagggccctcatcccatcctggagagctctgccctatcacattggcgattatgtttcaatatgtaaattttgggagatgcattcagaccacaggaggaagggaaaagaaagagcccccaggttgaaagccagtttaggtttgagtcccagcctttccccttgctgtgtgacctggagtaaattcctcagcctctgtgagtctcccattccaccccaggattgttgtgaaaacacagtaaggcaagcgggtaagaaagcacccagcaaggtgtcaagtgccccaccaggaggggtggggtggcaatttccagcattgcttggaaccagaatagcaacgtcttctgaggttccagaatttggactctgaacccattgagaagaatgaaatcaactttggcgtcaatcagccactgattgccatgtggcctggacgagtcatctcattcaacttcactttcagccggacgctgtgactcaggcctgtaaccccagcactttgggaagctgaggtgggtggatcgcttgagcccaggagttagagaccagcctgggcaacctagcgaaacctcgtctctacaaaaaaatacaaaaaattagctaggcctggtggcgtgtgcctgtagtcccggctactcaggagtctgaggtgggaagatccactgagcccaggaggttgaggctgcactccagcctgggcgacaggagtgaaaccctgtctcaaaaagttaaaaaaaaaaaaaaaaaggaaaatattttagaaaaagaaaaacaaattaatttttctcatttgtaaaatgggggtgattccagggcctgctccaaagggaatgaaacaaagttcaggagcggtggctcatacctataatcccagtactttgggaggccaaggtaggaggattgcttcaacccaggaggttgagaccagcttgggccacatagtgagacccctgtctctacaaaaaaaaaaaaaaaaaaattagcctggcatggtggcacatgcctgtattccctactcaggaggctgagacaggaggatcacctgagcccaggagtttgatgctgcagtgagctatgattacaccactgcactccagcccgggggacacagcgagaccctgtctcaaaaaacaagagaatgaagcatcctgcaggagccctggctcgatgcctggtagccactataaataaagaagaaccagcaggctgtgtggatgcaaggcccagtgctcccctgttctctgaggaggggggcattaagcaccctggggccccacgatgggcagcaagagtttgccgagggaggaaagcccaccggtggagtgggcagaggggttggtgtgtggacttctggagcctcaggaggaagggtgcgggttcccctggctgcagacgtccctgaggctgccctgcctcccccaggagagaccttcctgccctactacacgggccgcgccattgatggcatcgtcatccagaaaagcatggatcagttcagcacggctgtcgtcatcgtgtgcctgctggccattggcaggtagctggctcaacccccacgccctgccccgcacaccccgacctgcaccagggagggaagggagggcctgttcctaaggaagacaggggccagggaggccctggaaatgcccctggtgggcctgtccctcagctggtcaccctgggaaccggcttccacactgtcttagagcaccctagaaccacaccctctggtccctgaaaagggcttcagtcctcagggttccctgctcaccctccctggctgttttccaagtaggaatctggtcccaaacagaaccggctttgtctgagctgttctggaaggaagagggtctggctggcacatttgggtctcttgtcccacaactgtcccctttgccctcaccttgaggggggctcccactgggaatgagggggaccccgcagggatgccagccctggagtggggctgcggtggggctcccaggcctgccggcagcgggagggggcagccgggtgtggtcactggtctggaaggacatcgtgctataatatctcttatctgcaattagctcatttgccgcaggtattcggggcggcatttttaccctcatatttgccagactgaacattcgccttcgaaactgtctcttccgctcactggtgtcccaggagacaagcttctttgatgagaaccgcacaggttggtccttccagtgccctaggtgtcctgggggctgggccccacccctgtgggcttgcctggcactgaggaatgaaatgggcgtgtgggtggtctcagccctctgtcttctcctcctgctgttagttcaggctgggaacaccctgggcttggcctgtgtcctgggagctggcttgctcactgaggttttggtgtgggctgcggcctctgtggggcccaggccaggccacccgaggtccctgcaggagccaaggccttgctttccattgccccatggaaaccaccaggtccaggactacccacgcctgtggccgacagagaccctgctcccatgggggtcagcaggtgagggccaggggccacaacggggaagacgatagaatatccaccaagatccaagctctgagagacaccggcctgggtcgaagccctggttcctccactcacgaacttcacctctctgatcctctgttttcttgtctgtaaaatgggaacacggatagtagccaccccatggggtccttacacagctcttagcacaatgtccaacttaggtaagaagtgtctgcgctttcctgcccgccaccagccaggttgttatttccctagaagggaagaggagttaccccctctgccagtgacagggaggagacatgggtttgaagtctggctcagtcacggacaggctgtgtgactctacgggggccttcctgttctgagccccagcctcctccgctgtacagcgggatgtcatgaagcttaagcaagatgctgatgactgggattggctcagagtagccctcgaggggtatctgctcttctcccccaccccccaaccccgcccacaggtagggaggcccggcttcccagtgtctgtctcagaggccccttagcatcccccaccgccacccccaaggcccgggttgctgtggtgagagctgagccgcgtgtgttccaggggacctcatctcccgcctgacctcggacaccaccatggtcagcgacctggtctcccagaacatcaatgtcttcctgcggaacacagtcaaggtcacgggcgtggtggtcttcatgttcagcctctcatggcagctctccttggtcaccttcatgggcttccccatcatcatgatggtgtccaacatctacggcaagtactacaaggtaggcctgccctgtctctgctggggactgtgcgccctggcagcccccaaacatccccttaggaggggctcagggggccactaagggctagtgaaggacaggtcttgaggctgtgtttgcattcattcattcatttcttcgctcattcaataaataattattgaccacctgctatgtcccaggcactgggatacatcagtgaaaaagacaaggcccctgccttcctggaacttgtatctagtgtcagagacagatactaggtaccaacagcataaagaatgagaatccacaatacagtaaaagatggtcagtgctaaggagaaacatgaagtgagcagagggattgggagcattgggtgtagctgcaattttaaattggatttactggctgggcccggtggctcatgcctgtaatcccagaactttgggaggcacaggcaggaggaccacttgagcctaggagttcgagacaagattggacaatatagcaagaccccatctctacaaaaaaaaattttttttagttagctgggcttggtggcgcatgcctgtggtcccagctacctgggatgctgaggtggaggatcgcctgagcccaggaggtcgaggctgtagtgagcaatgatcgtgccactatactctagcctgggtgacacagcaagaccctgtctctaaaatgaatgaataaatacaagttaaataggtcttgctgagaaggggacatctgaataagggtctgaaggaggcgggcatcttgggaggtatgtgctgagcagagggcacagccagtgaaaaggccctgggttggaacgtgcctggtgtgtatgtgggggtggtgcgggcccgctgtgatgccatcgcgggcccgctgtgatgccatcatgggcaggctgctgtcccctctggccaccccacggcactgcttctgcttccgagctagggccgtgagccaggtttgacctcaccctcctcctgcttcctgaatgggcgggtgcccccgagccctaagggacagacaggctgggttcagacaggcagggctgtgaccctgtgacaggtacaggcaaccccctcacagtcacccaggcccacgtggggtacttctagagcaggggcttggatgcatgacggcctccaggtggtgccgggtaagtcattgtcgcagctccattggagcctttggtgttggtgacctgagaccagggtagcaaaggaagccatctcccacccagcccccggtgaggccactccccacagtcttctccagccacacaggtaggacctcttcccgaagttcctggtcacgagcctccccaccgtcctcactgagatgagaaagtaaatctattctttagagtctgagccatttctggcacgctgctccccaccccttgcttccggccttcccaccagcccctgggatggagcaagaaaccctggagctccccctcagcccccacctctgtgtgcactgcaggccctgccttttagttcagctaagggaggcctcaggaaggctctgtttgggttttccaccccatgcctgaatgtgttgtgtgtagccagcgagtcatctccacaaaccacacacaccgcccatggccaaacatgactcaggcaccctgcatgcttcctgcggctggggcgtgacacatggtcatgggacatgccagtgcatgctcctgtcctggactctcaggcagccttcctggctggcttgagaatcagcatagtgactcctgcaaagtgtgaacagctccacccaggggcctcttccaggactctggtgaacagcagcctgatggccgcacacttgggaccacttttcagctctgcctgtggtgacatgcacatggtgtgggcagatttcacaacccatggcccctgccaccatgtagaacttggctgggagttctggaatctctttatcaaccctcaggctctaacataatttatgttgatgatgtaaatggtgcccctttaatagttggtgtttcttaaatagtgtacaacctgaacaaccgtccaaggcatcccctgctcttccagcacagggtcaggtgttgaggccccttttctgaaaggattaccaaaaactgtccagtcatgaatagcctcttttgaatactggggatgacttaacgatcagcaccgtgccctatccttcaggagctgaaaccattgccccaagagcctctctggagttgactacctgagtgtgtcaaattgagccagaaggggatgggggagaaagggctagatcttgtctttttgtcctaggaacctcttgcatatagctggtgccagcgaagggtggaaaaacccagagaggcctgggggctccagtacatagtgaggctgttttggggtcttctccttcttgtccccctcctgtccatagaggctctccaaagaggtccagaatgccctggccagagcgagcaacacggcggaggagaccatcagtgccatgaagactgtccggagcttcgccaatgaggaggaggaggcagaggtgtacctgcggaagctgcagcaggtgtacaagctgaacaggaaggaggcagctgcctacatgtactacgtctggggcagcggggtacgtgcccctggccaggcagctctggctgtggagggatgggatgcaaagatgggggaagccctcgatctaggacatcagtcctgcatgttggtgtcaagctggtggagaatctgtctgtctttctttttttttttttttttttttgagacagagcctcactctgtcacccaggctggagtgcagtggcaccatctcagctcactgcaacctccgcctcctgggttcaagcgattctcctgcctcagcctcctgcatagctgggaccacaggcgcccgccaccatgcctggctaatttttgtatttttggtagagacggggtttcactatcttggccaggctggtctcgaactcctgagctcaggtgatccacccgcatcagcctcccaaagtgctgggattacaggcgtgagccaccgcgccctgctgagaatctttcccagaagcaaggctgcccctctcccagtcacctgacgtggggtggcagggtgggagctttcttttcccagctggggaaacatccttgctgaggtggggagtcagcaggtccctaggccactttcgggcaggtctcatgtcacagccacacacactcccgacagtgtctggcacactcccgggagtgcgtcacagcctctccttggaggatggggagcacttggatcatgtcactgctacactggacacacatgggaggtgggcaggtcagggcatagctgcggaggaatgaggagggtttggagtgagagggaggagggagctggtggtctacaggggagccaggggaaagaggatatctgggacttcctggtgctgccacctcccaaaagtatcagccaaggaggagaggaggggctaaggtccagctcagctagctgagcctcttagcaatccgtctgctggcagggggtgcctttgcagcttccaccaaggcacggtggtccagacagcagcctagttctggctgggcatgaggaggacagatggagtccctgactagggtgtgggctgccatgggtactcagactccactcccttcccagatgccccccaggcacaggaggaaggcatgggcgctcccatcacagccccttcttcacggaaccccactgggggaggagacagagagctcactgtgtgaccttagccagggcacttgccctctctgagtcatgctcttccccatgaggaggacgaatagttcccaggtggccaagctgaggagcctgggggtggcatgtgtgtgccaggacctcacaaagaaagccttgttctgtggccaagcccacagcctgctccagctggaggcctctgtagggaaatgctcggggcaggggaaggcatgagtgacaagccttggaagacacccctgccaacggccggcatttcagtttgtggctgggtctgccctcacctccccctgcagcctgggatgggtcagggaatggggatggtgggggatctaaggtcccctcgacccacatcccctctccctctgccccagctcacactgctggtggtccaggtcagcatcctctactacgggggccaccttgtcatctcaggccagatgaccagcggcaacctcatcgccttcatcatctacgagtttgtcctgggagattgtatggaggtgagaggccagtgtgtccggggatccagagagaagggaggagtttggggaagagggatcttaacagggtgggggcggggctccagggactctgacaatgtggtatttctctctaaggtaagtaggggagacagcatgatcatatcaagaatgataatactaggcagggcgtggtggctcacgcctataatcccagaactttgggaggcggaggcgggtggatcacttgaggtcaggagttcgagaccagcctggccaacatggtgaaaccccatctctactgaaaacacaaaaattagccaagcgtgttggtgggtacctgtaatcccagctacttgagaggagaattgcttgaaccctggaggcagaggttgcagtgagctgagatcgcaccactgtactccagcctgggtgacagagcgagactccgtcttgataaataaataggcaagccgagtatggtggcatgtgcctgtaatcccaggtcctcaggaggctgaggctagagaatcgcttgagcctgggaggtcaaggccgcagtgagccgtgatcacgccactgcactccaggctggacgacagagagagaccgtgtctcaaaaagaaagaaagggccaggtgcggtggctcacacctcaggaggccgaggcaggagaatcgcttgaacccgggaggcagaggttacagtgagccaagatcgcgccactgcactccagcctgggcaaccaaagcgaaactccatctcaaaaaaaaaagaaagaaagaatgataatactaccaacaagtgacagcaacaccctttagggacagaggtgatttcagaaaatggtcttaacagctctgtgagaaattgaagtgatgaaaagaaaactgaacctgagcggtggagtgactcgtccatcacatttgctcgggaacggggctcagggccagccgggcctgacttcctcccagcctacttccagcgtagtgcctcggaaatgcaagggtgttttagattgtcttgattttggtttccgcacaagcagatcctgagacagaattggcgtgcaacggatttgtttgggaggtgatctcaggaaacgggggtgggagtggaaagtgagacgtggaaggaaggaagtcagcagagtgagttgtggagccagttaccagtgtgggcaactgaggtgggatccttctagcggacagggtaggacaccagcaccagagtcatcccatctgagggccagggagctggggtgtttacacccaagctgccatcagccattgctcaaggtcagcctggagtgagggtgttaattctcttgtctgcctcgctcccacaaaaaagcccgcagcccgcaggcagtaagagattgggcctttgtgtgctgcgctgacaaaggctcaaggatgttggtggggtgttcctagcatctgctactcaggccattgcatctgctggagaatcacacctgccatattatttgactcagcagtaaatctgcccctaggaatccatgcttcaagagtactcacagcagtgggcgaagatgtatgtccagagatgttcagtgcagtgttgtttatttattatcattactatttgagacagtctcacattgtcacccaggctggggtgcagtggtgctttcatgactcactgcagccttgacctcctggactcaagtgatcttcccaccttagccacttgagtagctggggttacagtcacatgccaccacacccagctaatgtttttctttttaggttttttttttttttttttttgagatggagtcttgctctgtcgcccaggctggagtacagtggtgcaatcttggctcaccgcaacccctgcctcccgggttcaagctattctcctgcctcatcctccccagtagctgggactacaggcatgcaccaccatgcccagctaatttttgtacttttagtacaaaatttagtacaaaattgtattttcagtagaaatggggttgcaccatgttggccaggctgatctcgaacttctgacctcaaatgatccgcctgcctccgcctcccaaagtgctgggattacaggtgtgagccactgtgcccggccagctctggggttttaggtgtttactaccggctgttgctgttgtcttcacagtaacaggacacagtatgccgatatcacccccttatcaccaatgaggacattcagcacctaagagcctgaactcaggagacagatgggcctggattcaaatcctggctctgccacttctaggctctgtgacctgggccaagttacttgagccctctgtgcctgagattcctcatcagtaaaaaaggagataatgttagaacctacctcctaacatacagagcatgcttggccggacgcagtggcccacacctgtaatcccagcactttgggaggctgaggcaggcggattccttgagctcagaagttcgagaccagcctgggcaacatggtgcaaccccatttctactgaaaatacaaaaaattaactgggcttagtagtggctcatgcctgtggtcccagctactcaggagtctgaggttggagaattgcttgaacccgggaggcagaagttgcagtgagcaagatcacaccactgcactccagcctgggtaacagagtgagaccctcctctcaaaaaaaataaatagagaatacttaagaaaatgggccgttattatgatttacattcatattctatgtatttttacccaaggagaatatatttatttatagtacacattaagacccattttgaaaattgaaatcaagccatgtctggtgactcatgcctgtaatcccagcactttgggagggtgaggtgggcggatcacttaaggtcaggagtttgagaccagcctggccagtgtggtgaaaccctgtctctactaaaaatacaaatattatctgggcgtggtggcgagtacctgtaatcccagctactctggaggctgaggcaggagaatcacttgacttgggaggcggagggtgcagtgagccaagattgcaccaatgcactccagcctgggcgacagagggagactccatcttaaaaaaaaaaaaaaaaagctatgctatcgcaattgaaagatcaaggctggattcccactgtgccacacccctgccggttccttcgcttccatctgctcctgtggggatgatggcacccactcagctggatggccggtagagtgctagtgatgctgctgtcctcagctccccttactgtcgttatctaatgcaccagtgggtggtcaggtggcctcctgcatctccccgccagaactccttgctttccctatacctgcctcctctctagtagcaggggtgggtcccaggagtcgggtatcggtgggacaggaacgcgtgtctcctctccccagtccgtgggctccgtctacagtggcctgatgcagggagtgggggctgctgagaaggtgttcgagttcatcgaccggcagccgaccatggtgcacgatggcagcttggcccccgaccacctggagggccgggtggactttgagaatgtgaccttcacctaccgcactcggccccacacccaggtcctgcaggtgagggcgcggcttgaggcctgccagaatcagcctttccgtcaccccatttctggtgcacctcctatacaccaggctgtggcagggcagctgggaatatgtcaggcaagatcattgccctccaggagttttgggctccagttggggaagacagatacttaacagaatgattcccgataataagtgctagaaagaaaatagatcagggtgctgtggtagggatggtccatgggaatggtggtaacagtcaagaaggggttcttggaggaggtgacatttgaggtgagacctcaccaggggcctccctgcagagagaacattccagacagaggaaacagcaaatctcaaggtgcttccaagtcctagtgtcttagaaagaacgtttaggggccagcagtgcccaagcgagggagaggcacatggggtgggctgggaagggcacccacctgtgtccaaggtcagggcatccagtcctgggacctgagccgataaccccgcactgtgcctgtgtgttctttgcagaatgtctccttcagcctgtcccccggcaaggtgacggccctggtggggccctcgggcagtgggaagagctcctgtgtcaacatcctggagaacttctaccccctggaggggggccgggtgctgctggacggcaagcccatcagcgcctacgaccacaagtacttgcaccgtgtggtatgtgcacgggcctgggccacacttctccgccctttctgcatctaaccgtctttcttgtgagctgtaacaggtgcggaagagggcactagagataaatggacagttcaaagaattatcaccaattacaatgccctcctagagaaacagaacattcttgtccagacgtggtggctcacacctgtaatcccagcattttgggaagctgaggctggaggatcccttgaggccagcctggacaacatagtgagactccgtctctattaaaaaagaaaaaaagggcagatgtgatggcccacacctgtaatcccagcactttgggaggccaaggcaggtggactgcttgagctcaggagttcaagaccagcatggccaacatggcgaaaccccatctctactaaaaatacaaaaattagccgggtgtggtggcacatgcctgtaatctcagctcctcaggaggctgaggcacgagaatcacttgaacccgggaggtagaggttgcagtgagccgagactgggccactgcactgcagcctgggcaacagaataagactctgtctcatgaaaaaaaagaaatagaacattctggcactccagaagcctcctaccccccgccatgtgtcccttctctttccccaagaagtaatgtgttgacttttagagtcttcatgctcttgcttttcattggttctgccatctctgtgtgcacccctgagctctgtgctgcctgctcggaacttcatctgggtagaatcgtgattggtgtgtggattagtttgtgtcttgtgtctcccactcgacattgtgagtcatccaggttgaggctggggacagagttcattcattttcattgctgggtggtaacccactatacatatgtttatcacaattatttatgcattctgggtatttgggttgtttccctttatttttgttttttgagatgagtcttgctctgttgcccaagctggagtgcagtggtgagatctcagctcactgcagcctccgcctcccgggttcaagctattctcctatctcagcccccctagtagctgggattacaggagtgcgtcaccatgcctgactaatttttgtatttttagtacagacagggtttcaccgtgttgcccaggctggtctcgaacccttgacctcaggtgatcagcctgccttggcctcccaaagtgttgggtttataggcgtgagccaccgtgcctcgctgggttgtttccctttatattttattttatttatttgtttatttttatttttatttttttttggagacagagtctcgctctgtcgcccaggctggagtgcagtggcacgatctcggctcattgcaagctccacctcccgggttcacgccattctcctgcctcagtctcctgagtagctgggactacaggtgcacaccacaacgcctggctaattttttgtatttttagtagagacggcatttcaccatgttagccaggatggtctcgatctcctgacctcgtgatccacccgcctcggcctcccaaagtgctgggattacaggcatgagccactgcacctggcctatttttatttttttgagaaagggtctccctctgttgcccaggctggagtgcagtggcacagtcacaacttactgcagcctcagagtcctgtgctcaagtcatcctcccacctcagcctcccaagtagctgggactgcaggcacatgccattatgcccagctaattttatttttttgtagaaatgtggtctcaccatgttgcccaggctgatctcaaacacctggcctcaagtgatcctcctgcctcagcctcccaaagtgctgggatgacaggtgtgagcctctgcccccggcctgtttttcagttttgttttgttttgttttgttttaccattaccaaaaataccagtgtgggatgtggacaattttgtctatgttttctgttgtacatgagtacgttctcccaaggtataatcctaagagtagaaagcttggtgatagtggatgtacatccccaactgccgtagtttctgtcacaacagctatccccaggtggttataccaatttacattttacaatttacattctactagcagtgaaggagagtttcagctgttccacatttaggtcatctccagtactcaaaataggctattcatgactggacagtttttagtaatcctttcaggaaaggaaccataacacctgtccctgtgctggcctaagagcagggatgccctggatggttgctcaggttgtgcactgtccaagaaatataaactattaagggagcaccgtttacatcatcaacataaattatgtgaaagcctgagtgttggcacagagattccagaactcctagccaagttcgagatggtggtgagggccatgggttgtgaaatctgcccacaccatgtgcatgtaaccagaggtagattgttgtgaaatggtgccaagtgggaggccaccaggctgctgctcaccaaagttttagaagagccccctgggcagagccgttcacactttgcagtaggtaccacgcttcgattctcagacacctaacattgtcagtcctgaatttttgctaactggtgagaatgtagtggtagcttattgtggtcttttgtgttttcctgatgactgaagatattaaacaccttttcatatattggccatttggttttccttcatgaatagcctctcttaattatttatttatgtactttttcttttctttttttttttttaagatggagtctcgctctgtcgcacaggctagagtgctgtggcatgatctcggctcactgcaacttcttcctcctgggttcaagcgattctcctgcctcagcttcccaagtagctgggactacaggcacataccaccacacccggctaattttttgtagttttagtagagacaaggtttcaccatgttggccaggctggtctcgaactcctgacctcaagtgatccacccgccttggcctcccaaaatgctgggagtgagccatggcgcctggactatttatgtactttttgtttgagataggatctcactctgtcacccaggctggaatgtggtggtgtgatcatggttcactgcagccacgacctcctgggctcaagcaatcctcccacatcagcctcctgagggactataggtgcacaccaccacatctggtcaattttttttttttttttgagatggagttttgctcttgttgcccaggctggagtacaatggcacgatctcagctcaccacatcctccgcctcgaggggtcaagtgattctcctgcctcatcctcttgagtagctgggattacaggcatgcaccaccacacccagctaattttttatttttagtagagacagagtttctccatgttggtcaggctggtctcaaactcttgacctcaggtgatccgcccacctcggcctcccaaagtgctaggattacaggcatgagccaccgtgtacacctggccaatttttaattattttgtagagacgggttctcactgtgttgctcaggctgatctcaaactcctgggctcaagccatcctcccaccttagcctcccaaactgttggtgttacaggtgtgaaccaccatggctggcctctatttttaaatttaaaatgttaatttctataaacataaaacaataaaatgctacaagctaatcatattctcatagttgtaatgaatcttgtaactaagacatgaatgttcccctccaccttaccttttgaattccaccacatggaggtagccagtgttaacagtttagtaaatatccttttcaatgtgtttcctatctttatagaaatatatcaatatatgaaggtacacgtttataatttttttaaacaaaaatagaatcatgctgtgtatatgtatctattacaattcagttttaaggatgcactgtcactatttaaccaatccccatttatggacacctagattgtttccattttaatttaattaattaactaattaacttttgctacttatggtgttgcaatgatatcttccatactatatatttttttcattttgtagatatggggtctttctgtgttgcccaggctggtcttgaactcctagactaaagccattctcctgcctctgcctccctaagtgctgggattacaggcatgagccaccaggcctggccatactattatttttgtaggcccagattcctgaaactggaatctagagatgatagctcctttaaattgttctcttagaagggaggggaccaccgccagggcagtctgtgtgacctggagccctgctgtggcctcttgcttcctgagatgagcagactcattcacagcaacattctatattctatccctctttctttttttcaggacagggatggccagtgagctttctcttagaggtcagggaacttggcttatcccagagcagcaaatgtagcaggccccagtttgctgattaggggaggctgagggcttgtgggtacaggcgggagtcactgttggggaagaagagaggcagctcagtgcagtcactgggccctgatcaggtttcaggcctgagactgctggtgtctccaggccccaggcagcaaggctgctggggacagctggatgaacacattcctggcctctcatgctccatgctccctcctccccagatctccctggtgagccaggagcccgtgctgttcgcccgctccatcacggataacatctcctacggcctgcccactgtgcctttcgagatggtggtggaggccgcacagaaggccaatgcccacggcttcatcatggaactccaggacggctacagcacaggtgtggagctgggggtggcccctctcctgggcccacagggtcaccctcagggacataaccctctgagttaagcactgccccctgccacctgctcttttttttgtagagatggggtcccgctacgttaccctggccagactcgaacctcctgcgctcaagcaatcttcctgcaatccccaaagtgctgggattacaggcatgagccactgtgctgtgactcagcaaaatatttattaagtaaattattatagaagcccatacactggaatattatgctgctgggaaaaagaggaagtagaagaagggggaggaggtggaggcggaggaggaggtggaggcagaggaggaggcagctctccatatagcagtatggaaaggtcactgagataggatgctgagtgagaagagccaggtgcagagcataaggagctgggttttttttttcctattaaaggactggggagataaaaataacatgttcatatttgcataaagaaactagacaaggacatgtaagcaactaatgaaagacgttttggtgggagcaggagggaactgaagaaagaacttaaacttttcattatttagagttttatatatttttagtttttttagttttttttttttttttgaggcaggggcttgctctgtcacccaggtgggagtgcagtggcgtgatcacggctcactgcagcctcaacctcttgggctcaagccatccttccaccccactttttatttttgttgtagagacggggtcttgctatgtttcccaggctggtctcaaattcctgggctcatgcaatcctcctgcctcccaaagtgctgggattacaggcatgagccattgtatccagcctgtatttttagatttttgaaccacacgaatagccccttttcaataattaaatatatacaatgtataggggggttggggagatgttgatcaaaagataaaaattttcccttaggaataaggtcaagagacctgttgactatagttttttgtttgtttgtgttttaattgagacagtctcactctgtcgcccaggctggagtagagtggagtaatcttgcctcactgcaacctccgtctcccaggttcaagcgattctcctgcctcagcctcctgagtagctgggattacaagtgcccaccaccacaccttgctaatttttttttgtattgttagtagagacggggtttcactattttggccaggctggtcttgaactcctgacctcaggtgatctgcctgccttggcttcccaaagtggtgggatttcaggtgtgagccactgtgtctggccagctatatttagtaacagtgtactgtgtacttgaaaatagctaagagagtagattttaagtgttctctctttaaaaaagtgataaatatgtgagataatgtatatgttaactggcttgatttagctattccacagtgtatatgtatttcagagcatcacgttgtacaccattaaatacaaactatttttacttgtcaatttaaaagaatttttaaattaaaatatactaaatacactaatttttaaaaaaattacctcgatatgaacttaagtagttctagtaattaattgatataataaatatatattattttagaatagtgttttgaaattcagtagaggtggtggttgtgcaacattgtgaatgcactaaatgccactggattattcactttttttttttttcttgagatggagtctcgctctgtcgcccaggctggagtgcagtggcgcgatctcggctcacggcaacctcttcctcccgggttcaagtgattctcttgcctcggcctcccgagtagctgggattacaggcatgtgccaccatacccggctaattttgtgtatttttagtagagacagggtttcaccatattagccaggatggtctcaatctcctgaccttgtgacccgcccaccttggttggcctcccaaagtgctgggagccaccgtgctcagcccggattattcactttacaatggttatgtttatgttatgtcagtttcatctcaatgaaagaaaaatgaaataataaagaactggtggcgtggccaggtgcagtggctcacgtctgtaatcccagcactttggaggccaaggcaagaggatcgcttgaggccaggggtttgagacagcttgggcaatgtagtgagaccccacctctacagaaaaatattttaagttagccaggtgtggtggcatgcacctgtagtctcagttactcagaaggctgaggctggaggattgcttgaacccagaagtttgaggctacagtaagcagtgattgtactactgcactctagcgtgggtgagagagtgagaccctgtctctaaaataataataattgattgactcaatttcctattgatggacatttgagtctatttgttttattttttgcaataacagcgctgtgggtcacaggtgacctgtgtctatattgttgtgcatgggaggaagtcggtccatggggaaaattggtccaggtgggcttgcggggccacaggccacacatctgtggtgaatacacacaacctttgcactgcacagactcatagacccagggttattgctgcagctcttcaagccatggggctcgctccaactccccttctccaggaggacgggtgagggcctgtctccctgcagcctcacctgcactgtgtgctatcagatgtttgggtttctgccaaatgaatgagtgaaaattggtaacttgctatcaatttgcatgtaggcttaatctgcatgccccttatgagttgggtggggggaacatcatttcatgagctttcaagttgtgggttccagcccgccctttccacagctgcagggcagggcctctcactcttccccggtgctgcccggcctcacccattgctaaattgtctctgtgcctccaccatacagagacaggggagaagggcgcccagctgtcaggtggccagaagcagcgggtggccatggcccgggctctggtgcggaaccccccagtcctcatcctggatgaagccaccagcgctttggatgccgagagcgagtatctggtgagtcacagggtggtgggcaatgcgggggcaggagcggctccaggtggccagagcccccatcgcccagcagatggatgctgagaagagacgggccccaggagctctcccagactatcagcctcctgggctggtgaattcctggtgttgagagtggggagccaggagccactctggacccagcctccaggctccaggcagagctgtatggtgtggggcaagagaaggcatcagaatggggagacctgggtcatgagtggtggcttacacctgtaatcccagcactttgggaggccgaagcaggtggatcacctgaggtcaggagttgcagaccagcctggccaacatggtgaaaccccatctctactagaaatacaaaaactagccaggtgtggtagcacatgcctataatcccagctacttgggaggctgaggcaggagaattgcttgaacctgggaagtggaggttgcagtcagccgagattgtgccactgcactccagcctgggcgacagagccagactccatctggctcaaacaaacagacaaaacaaaacaaaataaaataggcccagtatgatggctcatgcctataatcccagcactttgggaggccaaggcaggtggatcacttgaggtccggagttcgagacaagcctggtcaatacagtgaaaccctgtctctactaaaaatacaaaaattagctgggcatggtggtgcatgcctgtaaccccagctactcgggaggctgaggcaggagactcacttgaacccgggagatggaggttgcagtgagctgagattgtgccactgcactctagcctgggcgacagagtgagactccatctacaaaaaaaaaaaaaaaaaggctgggcgcagtggtttatgcctataatcccagcactttgggaggccgaggcgggtggatcacctgaggtcaggagttcaagaccagccgggccaacatggtgaaattccatctctactaaaaatacaaaagtccgccaggtatggtggcaggtgcctgtaatcctagctacttgggaggctgaggcaggagaatagcatgaacctgggaagcagaggttgcaatgagccgagattgcaccactgcactccagccttggcaacagagtgagactccatctgaaaaaacaaacaaacaaacaaaaacaaaaaacagaatggggatacctggattagcagctccgtcctacagtttataactgtgtgacctcaagctagtgcttcccctctgagtcgcattctcactggtcaggtgggcccagtcatgtatttgcagatggctagcaacctcagtctatgcgcggattgattcatttgttacacagagagttactgagctcttctcaggcaccaggcaccaggcaccattctggggttatcgtgggctaactagacaaagacccttgtccccatggtgtttccattccagtggggaaggcagataagaaacaaggaaggccaggcgcggtggctcacacctgtaatcccagcactttgggaggccgaggccaggcggatcacaaagtcaggtgttcgagaccagtctggccaacatggtgaaaccctgtctctactaaaaatacaaaaattagctgggtatggtggcgggcacctgtaatcccctagctacttgggaagctgaggcgtgagactcgattgaacccacgaggcagaggttgcagtgagctgagatcgcaccaccgcactccagcctgggtgacagcaagacttaaaaaaaaaaaaaaaaaaaaaggagggggaagggaaggaccagaagactggagggccagggtagagctgatcccccattcaccaggtgcctcattgtgtctggccctgagctgtctccctttaagaaaaacccaggaagctggccatcgtttgtgaactgagcctcagagaggttaagcatcagcccataggccgtggcatgaagcacggttgcgggtggggcgtccgtgccatgcaagccaggcccccactgtccccgcagatccagcaggccatccatggcaacctgcagaagcacacggtactcatcatcgcgcaccggctgagcaccgtggagcacgcgcacctcattgtggtgctggacaagggccgcgtagtgcagcagggcacccaccagcagctgctggcccagggcggcctctacgccaagctggtgcagcggcagatgctggggcttcagcccgccgcagacttcacagctggccacaacgagcctgtagccaacggcagtcacaaggcctgatggggggcccctgcttctcccggtggggcagaggacccggtgcctgcctggcagatgtgcccacggaggcccccagctgccctccgagcccaggcctgcagcactgaaagacgacctgccatgtcccatggatcaccgcttcctgcatcttgcccctggtccctgccccattcccagggcactccttacccctgctgccctgagccaacgccttcacggacctccctagcctcctaagcaaaggtagagctgcctttttaaacctaggtcttaccagggtttttactgtttggtttgaggcaccccagtcaactcctagatttcaaaaacctttttctaattgggagtaatggcgggcactttcaccaagatgttctagaaacttctgagccaggagtgaatggcccttccttagtagcctgggggatgtccagagactaggcctctcccctttacccctccagagaaggggcttccctgtcccggagggagacacggggaacgggattttccgtctctccctcttgccagctctgtgagtctggccagggcgggtagggagcgtggagggcatctgtctgccatcgcccgctgccaatctaagccagtctcactgtgaaccacacgaaacctcaactgggggagtgaggggctggccaggtctggaggggcctcaggggtgcccccagcccggcacccagcgctttcgcccctcgtccacccacccctggctggcagcctccctccccacacccgcccctgtgctctgctgtctggaggccacgtggatgttcatgagatgcattctcttctgtctttggtggatgggatggtggcaaagcccaggatctggctttgccagaggttgcaacatgttgagagaacccggtcaataaagtgtactacctcttacccctaacctctgacttctacttgggccaactgcctcatcgcccagttaggtttttccaccagaccacggctctcctctcagccctctctggtggagttgcagagagactttgggtggtccagggcctccccctgtgtctgggagccccatctgcactcctcccatcccagggtctctggtgtagacattcctgtctgcctgtctccacggggattgcgcagggggatagagacgttgccttgaaatcccaggggcctctgtgcttcccgggacagctgaactgaggcccaacaaatgccacctgttcttttccatcggggcccaggcacccgacacccaccccaatccatgcagtaaagaaatattacccaggaggacagctcaatcagcagggaggtttgggcccggacacaggaagacccctgcggtggttattcttacttgctgaattgtgaagaactctggggtcccaggaggagggctctgtgccaactggtagagtagtatttcaatttttttttttttttttgagacagagccttgctctgtcacccagattggagtgcagtggcacaatcttggcttactacaacctccacctcccgagttcaagcgattctcctgcctcagcctcctgagtaactgggactacaggcacccaccaccacacccggctcatttttgtatttttagtaaagatgggtttcactgtgttggccaggctggtctcaaactcctaacctcagatggcctgcccaccttggcctccctaagtgctgggattataggcgtgagccaccgcgcctggccagccttgtctttctcttataaaagcacttgtcattggatttagaggccacctagataatccgggctgatctcatctagcggtcctttgcatctgcaaagacccttttttccaaatacggtcacttcacaggttcaggggtttgacaagggaagcttttgggggccaccactcagcctgctacagaggggaacttgcaaccttggttgaagttaacctcaggacttcctttttgattttaggaagcagagggggttaagttttcagagacttagcatatcttcagatgtttccagagaagttggaaattccaattttcatgtgagatcagctgttttttatgtattggctcaaattattttgacaaaaccgaggaccaacaagcacatgtgtagaggtggtctccagcctgtgcatctctagtttgtagcgtcagtgttggacattcctgttctgcaaagtccctcgcaaggggcttcctggccccagcccagccccgttccagtctaagctcctctcccatctgcctgtctcttctcatccctgcactttcaggctgagaattccagattcttctccctctcctatggagttagctccagtgccttgatttgtaaacccacacccaaaagtgcgccataggcagacaaaagaaccttccagagaccgaattaccttctttttaggaggtacataggagttttaaaaaagtaatgtttaggccagatgcagtggctcatgcctgtaatcccagcactttgggaggccaaggtgggtggatcacgaggtcaggagttcaagaccagcctggccaacatggtaaaaccctgtctctactaaaaatacaaaaattagccgggcgtgttggcacacgcctgtagtcccagctactcgggaggctgaggcaggagaattgcttgaatccgggaggcagaggtttcagtgagccgagatcacgtcactgcactccagcctgggtgacagagcgagactgtctcaaaaaaaaaaaaagtttaattttgaaataattttagatttacagaaaagtcacaaaacaatacagaaagttcccttatgccccacccctcacagtttctcttctcttaaaatcccacagtactggggtacatttgtcacaattaggaaaccaacatagcatgtcactatcagtgaaactgcaagctgtatttgtgtgtcactagttttcttactaatgtcctctttctgttccagtgtcccacattacatttaagataggagtgtttttgtttgtttgtttgtttgtttttagagacaggttcttgctctattgcccagactggagtgcagaggtgctatcacagctcactgtagcctcaaccttctgggctcaagtgatcctcccacctcagccttcagagtagctggggctacaggtgcacatcgccatgcccagctaattttttcttttgctttttttttttttgtagagacaggccttgctttgttgaacaggctggtctcaaacccctggcctcaatcaatcctcccaccttggcctcccaaagtgttgagcttataggcatgagccaccacgcccagctagagatataatgttttcttttgtttgttttattttggcagggttttttgttttagtttttgagacaggatctctctctgtcatccaggctggagtgcagtggcacaatcttagctcgctgcaacctctgcctccctggttcaagcgattctcctgcctcagtcttttgagtagctgggactacaggcgcctgcaccacacccagctaatttttttgtgtttttagtagagacagtgtttcaccatgttggccaggctggtcttgaactcctggcttcaagtaatccacctgcctcggcctcccaaagtgctgagattagaggtgtgagccactgcgcccagcctaatgtttttaaaattgtttttattgcagcaacatgcagacaatataaaacttatcattagtgacatctagtacacttatgatgttgtgtaaccatcatcattatctaattccaggacattttcatcaccctaacagaaaaccctatacccattaacagtcactccccaattcttcctccacacagcccctggccgccagcattctaaaatctggctctgcagattggcccctctggccttttcatgtacatggaaccctatactacgtggcctttcgtgtctggcttctctcatcatgtgtacaaggtccaaccatgttgtggcatgaatcagcactttattccttttcatggctgaatgatatcctattgtatggctatgccacattttgtttatccattcatctgttgatagatatttgggctgtttccacctttgggctattgtgaatagtactgctattagtgctgctaatagtgggaacattcatgttttgttgttgttgttgttgtttgagacggagtctcgctctgtcgcccaggttggagtgcggtgatgcaatctcggctcactgcaagctccgcctcccgggttcatgccattctcctgcctcagccgcccgagtagctgcgactagaggcgcccaccgccacacccaggtaattttttgcgtttttagtagagacggggtttcaccgcgttagccagaatggtctcaatctcttgacctcgtgatccacccatctcggcctcccaaagtgctaggattacaggcatgagccaccgcgcccggcccaacattcatgttttttttgtgggagtttgctttcgcctctcttgggtagatgcctgggagtggaattgctgggtcccatgagaactctgtgctcaacgttttgaggaactgccagactgtcttccacagcggctgcaccattttgcattcccaccagcaatccatgagggttgcaatttccccacatcctcaccaacacttgttattttctggttttgtttttgtttttaattatcaccatccagggccgggaacagtggctcacatctgtaatcccagcactttgggaggctgaggcaggcagatcgcttgagcccacgagttcaagaccagcctgggcaacgtggtgaaacctcatctctactaaaaaatccaaaaactgctagccgggcatggtggcacacacctgtggtctcagctgttcatgaggctgaagtgggaggattgcttgaactcggaaggtggaggttgtggtgagctggtatcatgccactgcactccagcctgggtgacagagtgagactctgtctcaaaaacaaacaatataaaattgtcaccatcctggtgggtgtggagagttatgacttttaaagctgacttttttctgttacaattaatttagcaaatgtcactgtcctccttctgtcccacacagtgtgctgggtaaaccaggagaaagtaattgcagtcgagggctttgggaacagcacagttggccagagagacagatgaggaaaacaagcagggatgagagagaatgaagaggagcacggcaccccagggctggcttagtcctggcgccaggacttagtttactctgtcattgtttctttcccacattagagtttgtcttcatcactgctgtattccccagtgcctagaacagtggctgacacatagtatgtgctcagtaaacagccattaaagaaatgtttgagctgagcatagaggcccatgtctgtaattccagctactcgggaggcttaggtgggaggatcacttgagtccacgagtttgaggctgccatgggctatgatcgtgccactgcactgcagcctgggcaacagagcatgaccctgtctctacaaaatttgaaaaagaaaggaatgattgaactcttcgatatgccgtaacatagtgtgaaaacaatgaacacagtccaatcacctcatttaacagacagggaaactgaggcccagagaaaagaaatgactgcagggttataaatgtatttagcagaatggccaaggctggaacccaggtccccacactccctgctgctgccttcgtctggagagtgtatttcagtttccaacttgccagggctaaagacgaccccaatcccaggaagatggcagactcagcccaagtcaatgcctgaggcagctgctgagccatgagaggtctctgaagtgacttggggtcctaggagcccacagggaccctggtgatgacttcagggtgaagatgtgcacaaagcaccttgcgaggcagagccccttccccatgccccctgctatctgctgcagctcccctgtcgactggactggtctgtgtcaacctcactctgtgtcggcaggttcaaaagccacacctgagaaaacggaaacagcacagaggagggttaagcccgatggccctggctcttcagggttttgttccagaacttttggggtcataaatttcttgggaaatttgatgaaaattctaggaactctcctcagaaaaatacccatgcacataaagcattgtatgcaacttgtgggaaacgtgtggtattttacaattcctctgtcagggggccctgagttaaggaccgttgctccactgggattaacaattaagaattaaaaattagccaatgtaagtatcagtgtggctgggcgccctggctcatgtctgtaatcccagcactttgggaggccaaggcgggcggatcacgaggtcaggagatggagaccatcctggctaacacagtgaaaccccgtctctactaaaaatacaaaaaaaaattagccgggcgtggtggcgggtgcctgtagtcccagctactcgggaggctgagcaggagaatggcgtgaacccgggaggcggagcttgcagtgcgtggaggtcgcgccactgcactccagcctgggcgacagagcgagactccgtctcaaaaaaaataaataaataaataagaagtactggtgtaaggcaggacacagtggtgcacgcctgtagtttcagctcctcaggagcctgaaacgggaggattgcttgagcctgggaggttgaggcagcagtgagccatgatggcgccactgcactccagcctgggcgacagagtgagaccctgtcttaagaaaaaaaatgccgagcactgtggctcacaactgtagtcccagtactttgggaggctgaggcaggtggatcacttgagtctaggagttcaagaccagcctgggcaacatagtgagaccccatctctactaaaaactttaaaaaaaagaagaagaaaaattagccaggtgtagtggcgtgtgcctatagtctcagctactccgaaggctgggatgggaaaatcgcttaagcccaggaattcaaggctgcagtgagcccataattgtgccactgcactccagcccgggtgatagagcgagaccttctctctaaacaataaaataataataataatagattggaaggctacacaaccaattcatgttggagtttgtctgggtattgaagacaaaagcatgaagatatgcaataccttacttctttaagaataaaaatagacttggctgggtgcagtggctcacacctgtaatcccagcactttgggaggccaaggtgagcggaacacttgaggccaggagttcgagaccatcttggccagcatggcaaaacccatctctactaaaaatacaaaaattagccgggcgtggtggcacatgcctgtagtcccagctactcgggaagctgaggcaggagaatcacttgaacccgggaggcggaggttgcaatgagctaagatcgtgccactgcactccagcctgggcaacagagtgagactccatctcaaaacaatgaagtccatatttctaaaaaataaaaataaaaaaattaaaaagactcaaagcaaagagaggaaatcgttagcaatggctagtcctgagcggtgggtaccatgtgtttgttatattgttctatgtacatttctgaatactagaattttcttcaggggtaggagagggaacactgtaaacaaactaaacaaaccctggcatgataagtgctgctgtggcccaggaagacttcctgggagaaatggaaagcagctgttctgacttctgttgactgaaaatagcagtcgttaagccacccaacagcaagccagtgcatccggctgagaacctggcccagacctgagcggccggccgggcgtctccacctcctccctccctagccgcctctattcaatgagcccagcctgaaacaggggcctggcattctagacagttccacagagaagaaactctggaacccagcactgacacagccattgctgctgaccatttgtttctggccccaggtaaggaagctgttatttcaaataataatacggacaattttttaaattttttttttggcagagggagctcagaaggaggttaattctttaatgtttgctttttgttttgttttgagacagagtctctgtctcccagggtagagtgcagtggcgcgatctccgctcactgcaaaccccgcctcccatattcaagcgattctcctgcctcagcctcccgagtagctgggattacaggcatgtgccaccacacccagctgatttttgtatttttaatagagatggagtttcatcatgttggccaggctggtctcgaactcctgacatcaggtgatccacctgcctcgctctcccaaagtgctgggattacagacgtgagccactgtcctcggccaatgtttgctttttaaattgtggtaaaatacacataacataacattaaccattgcatttatttattattgttattttttagagacagggtcttgctctgttgcctagcctggagtgcagtggtgccatcatagctcacttcagccttgaacttctgggctcaactgatccttctgcctcaggctcctaaatagctgggactacagcctgtgccaccatgcctggctaatttttagattttctgtagagacagagttgtggttatgttgcctaggctggtcttacattcctagtttcaagcgatccttctgcctcggcctcccaaagtgctgggattacaggtgtgccccatcacgcccagccaaccattttaaattgcatgatccagaggcattaagcagactcccaatgtttcctttgacatttagcaagcatatttattatcttcttagatctgaatgaccagcctgcagatatcagaaccgagatggattgatgatgatgacaatgataaccattcaggtataaaacattttcagtgcagcaaacacgagtctatgcgctttatgtgattttttttttaagacaggggtctcactctgttgcccaggctggagtgcagtggtacgatctcacctcactgcaacatctgcctcccagactccagtgagcctcccacctcaccctcccaagtagctgggactacaggcatgtgccaccatgcctggcaaaattttttttttttgtattttttgtagaaacggggtttcaccatgtcacccaggctggtctcaaagtcctgacctcaagtgatcctcccaccttggcctcccaaagtactgggattacaggtgtgagccactatgcctggcccactttatgtgactttaacgcttttaatcctcacaacaagtctatgaagcagctactacggttaatgcagttttttcaaaaaagaaaaatgaggttaagtaacctgcaaaaattaagtggcacagcactgggaactgaacacaggcagcccgaaccctgaccagagccctgaaccttttccctagactggggacaggtttataggcttatctaatctccacccaaattattttccacctttgccttttttttttttttttcctttgcagttgtcactaagggctgcttgttgcacctcaggagctggggatagtgaaggagatacctgtgctgagtcactaacaggaaagggctgagaaagaagcatcgccaatggtttctctttcctggtttttattctttcctcagagaggaggaagttgaccatttaaacaggtgagttggctgggcgtggtggctcatgcctgtaatcccagcactttgggaggccgaggcaggcggaccacttgaggtcaggagttggagaccagcctggccaacatggtgaaaactcatctctactaaaaacacaaaaattagccaggtgtggtggggaggctgaggcaggagaatcacttgaacccgggaggcagaggtggcagtgagccgagattgtgcctctgaactccagcctggacgacagagtgagactccatctaaaataaataaataaataaataaataaataaataaataaataaacaaacaaacagatgagtcacccagggggaggtcctaacagcgacctaaggtgacagtgacagtgcctcacattattacagctctttacctttgactacctgagatcagtcattcagtaagcatttattgagaacctccgtctaccagaaactgtgctaggttgtgggtcacagtggagactaagaggtccgagatcacctacatcctactgggtaataaactccagatggtgaaaagatggcagcagacaagagagtgacttgggagaggagcactgtttgagctggggtggtctggggaggtgatatgggagctgagccctgaatgacaaggaggtaccagctttgggtatctagaggaaagaatgatcccaaccacagtctggcacttcctcaaaaagctcaacatggacctgggcacagtggctcacagttgtaatcccagcactttgggaggctgaggcgggaggattgcttgaagccaggagtttgagaacagcctgggcaacatagtgggaccccatccctacaaaaatttaaaaatcagccaggcgtggtagtgcataccggtcgtcccagctacttgtgtggctgaggcaggaggatcctttgagctcaaggaggttgaggctgcaacgaaccatggtggtgccactgcactccagcctggatgacagagtgagacctcgtctctaaaaataataaaataaagccaaaaagtgcaaacaatccaatgtatgaatggataaacaaactgcaaaccgtggtatgcacatactgtgggatatgattcagctgtagaaaggaatgaagtgctggtacatgctataacatagatggtccttagaagcattatgcaaatgaaagatgccaggcagggaaggtcacct

SEQ ID NO: 69 - DNA, 3331 bp, Homo sapiens
cccgtccatcagcctgtctcaacgcacgccagtctcagctccgaccttgcagcggcgcagcgcgggtgggaggcggggaggagcagcgggaagagcggagcgaggaccgcgtccggcgcagtcttcaatgagcagcgcggaaactgcaccccagacccgagcctgctgcgcgccccctcccagagctcacctggtgccaggtaacaggcccacgggaggaaggactggagctgagacaggagatgcggctgtggaaggcggtggtggtgactttggccttcatgagtgtggacatctgcgtgaccacggccatctatgtcttcagccacctggaccgcagcctcctggaggacatccgccacttcaacatctttgactcggtgctggatctctgggcagcctgcctgtaccgcagctgcctgctgctgggagccaccattggtgtggccaagaacagtgcgctggggccccggcggctgcgggcctcgtggctggtcatcaccctcgtgtgcctcttcgtgggcatctatgccatggtgaagctgctgctcttctcagaggtgcgcaggcccatccgggacccctggttttgggccctgttcgtgtggacgtacatttcactcggcgcatccttcctgctctggtggctgctgtccaccgtgcggccaggcacccaggccctggagccaggggcggccaccgaggctgagggcttccctgggagcggccggccaccgcccgagcaggcgtctggggccacgctgcagaagctgctctcctacaccaagcccgacgtggccttcctcgtggccgcctccttcttcctcatcgtggcagctctgggagagaccttcctgccctactacacgggccgcgccattgatggcatcgtcatccagaaaagcatggatcagttcagcacggctgtcgtcatcgtgtgcctgctggccattggcagctcatttgccgcaggtattcggggcggcatttttaccctcatatttgccagactgaacattcgccttcgaaactgtctcttccgctcactggtgtcccaggagacaagcttctttgatgagaaccgcacaggggacctcatctcccgcctgacctcggacaccaccatggtcagcgacctggtctcccagaacatcaatgtcttcctgcggaacacagtcaaggtcacgggcgtggtggtcttcatgttcagcctctcatggcagctctccttggtcaccttcatgggcttccccatcatcatgatggtgtccaacatctacggcaagtactacaagaggctctccaaagaggtccagaatgccctggccagagcgagcaacacggcggaggagaccatcagtgccatgaagactgtccggagcttcgccaatgaggaggaggaggcagaggtgtacctgcggaagctgcagcaggtgtacaagctgaacaggaaggaggcagctgcctacatgtactacgtctggggcagcgggtccgtgggctccgtctacagtggcctgatgcagggagtgggggctgctgagaaggtgttcgagttcatcgaccggcagccgaccatggtgcacgatggcagcttggcccccgaccacctggagggccgggtggactttgagaatgtgaccttcacctaccgcactcggccccacacccaggtcctgcagaatgtctccttcagcctgtcccccggcaaggtgacggccctggtggggccctcgggcagtgggaagagctcctgtgtcaacatcctggagaacttctaccccctggaggggggccgggtgctgctggacggcaagcccatcagcgcctacgaccacaagtacttgcaccgtgtgatctccctggtgagccaggagcccgtgctgttcgcccgctccatcacggataacatctcctacggcctgcccactgtgcctttcgagatggtggtggaggccgcacagaaggccaatgcccacggcttcatcatggaactccaggacggctacagcacagagacaggggagaagggcgcccagctgtcaggtggccagaagcagcgggtggccatggcccgggctctggtgcggaaccccccagtcctcatcctggatgaagccaccagcgctttggatgccgagagcgagtatctgatccagcaggccatccatggcaacctgcagaagcacacggtactcatcatcgcgcaccggctgagcaccgtggagcacgcgcacctcattgtggtgctggacaagggccgcgtagtgcagcagggcacccaccagcagctgctggcccagggcggcctctacgccaagctggtgcagcggcagatgctggggcttcagcccgccgcagacttcacagctggccacaacgagcctgtagccaacggcagtcacaaggcctgatggggggcccctgcttctcccggtggggcagaggacccggtgcctgcctggcagatgtgcccacggaggcccccagctgccctccgagcccaggcctgcagcactgaaagacgacctgccatgtcccatggatcaccgcttcctgcatcttgcccctggtccctgccccattcccagggcactccttacccctgctgccctgagccaacgccttcacggacctccctagcctcctaagcaaaggtagagctgcctttttaaacctaggtcttaccagggtttttactgtttggtttgaggcaccccagtcaactcctagatttcaaaaacctttttctaattgggagtaatggcgggcactttcaccaagatgttctagaaacttctgagccaggagtgaatggcccttccttagtagcctgggggatgtccagagactaggcctctcccctttacccctccagagaaggggcttccctgtcccggagggagacacggggaacgggattttccgtctctccctcttgccagctctgtgagtctggccagggcgggtagggagcgtggagggcatctgtctgccatcgcccgctgccaatctaagccagtctcactgtgaaccacacgaaacctcaactgggggagtgaggggctggccaggtctggaggggcctcaggggtgcccccagcccggcacccagcgctttcgcccctcgtccacccacccctggctggcagcctccctccccacacccgcccctgtgctctgctgtctggaggccacgtggatgttcatgagatgcattctcttctgtctttggtggatgggatggtggcaaagcccaggatctggctttgccagaggttgcaacatgttgagagaacccggtcaataaagtgtactacctcttacccct

SEQ ID NO: 70 - protein, 711 aa, Homo sapiens
MRLWKAVVVTLAFMSVDICVTTAIYVFSHLDRSLLEDIRHFNIFDSVLDLWAACLYRSCLLLGATIGVAKNSALGPRRLRASWLVITLVCLFVGIYAMVKLLLFSEVRRPIRDPWFWALFVWTYISLGASFLLWWLLSTVRPGTQALEPGAATEAEGFPGSGRPPPEQASGATLQKLLSYTKPDVAFLVAASFFLIVAALGETFLPYYTGRAIDGIVIQKSMDQFSTAVVIVCLLAIGSSFAAGIRGGIFTLIFARLNIRLRNCLFRSLVSQETSFFDENRTGDLISRLTSDTTMVSDLVSQNINVFLRNTVKVTGVVVFMFSLSWQLSLVTFMGFPIIMMVSNIYGKYYKRLSKEVQNARNTAEETISAMKTVRSFANEEEEAEVYLRKLQQVYKLNRKEAAAYMYYVWGSGSVGSVYSGLMQGVGAAEKVFEFIDRQPTMVHDGSLAPDHLEGRVDFENVTFYWHTQVLQNVSFSLSPGKVTALVGPSGSGKSSCVNINFYPLEGGRVLLDGKPISAYDHKYLHRVISLVSQEPVLFARSITDNISYGLPTVPFEMVVEAAQKANAHGFIMELQDGYSTETGEKGAQLSGGQKQRVAMARALVRNPPVLILDEATSALDAESEYLIQQAIHGNLQKHTVLIIAHRLSTVEHAHLIVVLDKGRVVQQGTHQQLLAQGGAKLVQRQMLGLQPAADFTAGHNEPVANGSHKA

SEQ ID NO: 71 - DNA, 3503 bp, Homo sapiens
cccgtccatcagcctgtctcaacgcacgccagtctcagctccgaccttgcagcggcgcagcgcgggtgggaggcggggaggagcagcgggaagagcggagcgaggaccgcgtccggcgcagtcttcaatgagcagcgcggaaactgcaccccagacccgagcctgctgcgcgccccctcccagagctcacctggtgccaggtaacaggcccacgggaggaaggactggagctgagacaggagctacaacctggccttcagcacccgcccacctccaaccagcaggatgcggctgtggaaggcggtggtggtgactttggccttcatgagtgtggacatctgcgtgaccacggccatctatgtcttcagccacctggaccgcagcctcctggaggacatccgccacttcaacatctttgactcggtgctggatctctgggcagcctgcctgtaccgcagctgcctgctgctgggagccaccattggtgtggccaagaacagtgcgctggggccccggcggctgcgggcctcgtggctggtcatcaccctcgtgtgcctcttcgtgggcatctatgccatggtgaagctgctgctcttctcagaggtgcgcaggcccatccgggacccctggttttgggccctgttcgtgtggacgtacatttcactcggcgcatccttcctgctctggtggctgctgtccaccgtgcggccaggcacccaggccctggagccaggggcggccaccgaggctgagggcttccctgggagcggccggccaccgcccgagcaggcgtctggggccacgctgcagaagctgctctcctacaccaagcccgacgtggccttcctcgtggccgcctccttcttcctcatcgtggcagctctgggagagaccttcctgccctactacacgggccgcgccattgatggcatcgtcatccagaaaagcatggatcagttcagcacggctgtcgtcatcgtgtgcctgctggccattggcagctcatttgccgcaggtattcggggcggcatttttaccctcatatttgccagactgaacattcgccttcgaaactgtctcttccgctcactggtgtcccaggagacaagcttctttgatgagaaccgcacaggggacctcatctcccgcctgacctcggacaccaccatggtcagcgacctggtctcccagaacatcaatgtcttcctgcggaacacagtcaaggtcacgggcgtggtggtcttcatgttcagcctctcatggcagctctccttggtcaccttcatgggcttccccatcatcatgatggtgtccaacatctacggcaagtactacaagaggctctccaaagaggtccagaatgccctggccagagcgagcaacacggcggaggagaccatcagtgccatgaagactgtccggagcttcgccaatgaggaggaggaggcagaggtgtacctgcggaagctgcagcaggtgtacaagctgaacaggaaggaggcagctgcctacatgtactacgtctggggcagcgggctcacactgctggtggtccaggtcagcatcctctactacgggggccaccttgtcatctcaggccagatgaccagcggcaacctcatcgccttcatcatctacgagtttgtcctgggagattgtatggagtccgtgggctccgtctacagtggcctgatgcagggagtgggggctgctgagaaggtgttcgagttcatcgaccggcagccgaccatggtgcacgatggcagcttggcccccgaccacctggagggccgggtggactttgagaatgtgaccttcacctaccgcactcggccccacacccaggtcctgcagaatgtctccttcagcctgtcccccggcaaggtgacggccctggtggggccctcgggcagtgggaagagctcctgtgtcaacatcctggagaacttctaccccctggaggggggccgggtgctgctggacggcaagcccatcagcgcctacgaccacaagtacttgcaccgtgtgatctccctggtgagccaggagcccgtgctgttcgcccgctccatcacggataacatctcctacggcctgcccactgtgcctttcgagatggtggtggaggccgcacagaaggccaatgcccacggcttcatcatggaactccaggacggctacagcacagagacaggggagaagggcgcccagctgtcaggtggccagaagcagcgggtggccatggcccgggctctggtgcggaaccccccagtcctcatcctggatgaagccaccagcgctttggatgccgagagcgagtatctgatccagcaggccatccatggcaacctgcagaagcacacggtactcatcatcgcgcaccggctgagcaccgtggagcacgcgcacctcattgtggtgctggacaagggccgcgtagtgcagcagggcacccaccagcagctgctggcccagggcggcctctacgccaagctggtgcagcggcagatgctggggcttcagcccgccgcagacttcacagctggccacaacgagcctgtagccaacggcagtcacaaggcctgatggggggcccctgcttctcccggtggggcagaggacccggtgcctgcctggcagatgtgcccacggaggcccccagctgccctccgagcccaggcctgcagcactgaaagacgacctgccatgtcccatggatcaccgcttcctgcatcttgcccctggtccctgccccattcccagggcactccttacccctgctgccctgagccaacgccttcacggacctccctagcctcctaagcaaaggtagagctgcctttttaaacctaggtcttaccagggtttttactgtttggtttgaggcaccccagtcaactcctagatttcaaaaacctttttctaattgggagtaatggcgggcactttcaccaagatgttctagaaacttctgagccaggagtgaatggcccttccttagtagcctgggggatgtccagagactaggcctctcccctttacccctccagagaaggggcttccctgtcccggagggagacacggggaacgggattttccgtctctccctcttgccagctctgtgagtctggccagggcgggtagggagcgtggagggcatctgtctgccatcgcccgctgccaatctaagccagtctcactgtgaaccacacgaaacctcaactgggggagtgaggggctggccaggtctggaggggcctcaggggtgcccccagcccggcacccagcgctttcgcccctcgtccacccacccctggctggcagcctccctccccacacccgcccctgtgctctgctgtctggaggccacgtggatgttcatgagatgcattctcttctgtctttggtggatgggatggtggcaaagcccaggatctggctttgccagaggttgcaacatgttgagagaacccggtcaataaagtgtactacctcttacccct

SEQ ID NO: 72 - protein, 754 aa, Homo sapiens
MRLWKAVVVTLAFMSVDICVTTAIYVFSHLDRSLLEDIRHFNIFDSVLDLWAACLYRSCLLLGATIGVAKNSALGPRRLRASWLVITLVCLFVGIYAMVKLLLFSEVRRPIRDPWFWALFVWTYISLGASFLLWWLLSTVRPGTQALEPGAATEAEGFPGSGRPPPEQASGATLQKLLSYTKPDVAFLVAASFFLIVAALGETFLPYYTGRAIDGIVIQKSMDQFSTAVVIVCLLAIGSSFAAGIRGGIFTLIFARLNIRLRNCLFRSLVSQETSFFDENRTGDLISRLTSDTTMVSDLVSQNINVFLRNTVKVTGVVVFMFSLSWQLSLVTFMGFPIIMMVSNIYGKYYKRLSKEVQNARNTAEETISAMKTVRSFANEEEEAEVYLRKLQQVYKLNRKEAAAYMYYVWGSGLTLLVVQVSILYYGGHLVISGQMTSGNLIAFIIYEFVLGDCMESVGSVYSGLMQGVGAAEKVFEFIDRQPTMVHDGSLAPDHLEGRVDFENVTFYWHTQVLQNVSFSLSPGKVTALVGPSGSGKSSCVNINFYPLEGGRVLLDGKPISAYDHKYLHRVISLVSQEPVLFARSITDNISYGLPTVPFEMVVEAAQKANAHGFIMELQDGYSTETGEKGAQLSGGQKQRVAMARALVRNPPVLILDEATSALDAESEYLIQQAIHGNLQKHTVLIIAHRLSTVEHAHLIVVLDKGRVVQQGTHQQLLAQGGAKLVQRQMLGLQPAADFTAGHNEPVANGSHKA

SEQ ID NO: 73 - DNA, 88441 bp, Mus musculus
  misc_feature (1)...(88441): n = A,T,C or G
tttgttttgtatgtatgtgtgagccatggtccgtgttgaacatggggaggtcattggtcaagttgtgaggatcagttctcttctgccacctgaacctggggaatgaattcatgtcctaaggcttggcagcaagaaggctggatagcaagtgtcttaatttgggtttcagtgctgtgaagaaacaccatggccacagcaactcttaactgtgggtggcttatagtatcagaggttcagtccattatcagcatggtgggaagcagagcagtgtgcaggcagacatggtgctgaaggagccaagagcagtagattccacactgggtggaacttgaacataggagacctggaagcccaccctccgcagtgacatacttcctccaacacaggaacactcacacatgtacacacacgtacaagaaatcgtttctcttttaaggaacatatacttcgggaaggagttataaagtctgtggaggaagtaatctgagttcatagctatcctgaaccgcatgcttagacaatggcagatatcctgtagctggcaatgcttgtttagaggggcgagcttcaccatgggatggagtattttatgtctttttaacttttgttttacagatttattttagttttagttaagtgtatatgtgtgttggtgtgtacaggtgggcattggatctcctggagctgccattatccactgagtagtcttgctggcccttatgctatgataatgacactttgaaatgtcctgacttcaatgctaatggcaaccactgatgtccactcaagggtctgtcccttggctgaacttcattctcttttcttccaaccattgttcaattgaagacccaagctgaaggagcaatggctgcctgggtgagttcctgtggttggtagtatgcatatgcacagtgaagaaatgtataggggttcctaatgcttagcctgggcctgtaaaagttcatttcttcccacatttttttccgtttaaagactgtctcgtgatctaatgttaaggtcagcttgagatctatagcagctgggagtgacatgttggcaatgtgaagttagtgttcttatcatcctagaacctgtaggtcagagtgttagcctgcttttaaaaaaaagggtgagtgaaaatccacttacaagcggtgaatgccagcttagttgccaaagtgcttgacactcaagcatgaggatcagaggtcagtcctcagcacccacatatacaaggtaccgggcgcactggctttgtatttgtaatcacggtactcaggacatggagacaggtgatccctggggctcatattattaggaggcatggattttagaaaacagtaatctatcctcataaatgaccctgaagatgtcccttaacacccccatccccccgctatgtcaatgaccatgagaagacagcatctgtgagaaaatgctgactctgctgtggtcttggtctcagacttcccagttaccagaatttcctgcaatttttaaaaagtgtgtgtgtgtgtgtgtgtgtgtgtgtgtgtgtgtgtacacgccttcctgtgggcgcctgcaggggtgagaaagtgacataagatctccttcagatggagttgtaggtggtatgagctgtccaacatgagtgctcagagccaaactcaggtactttttaagctgtcttgaccattgagccatctatccaatccctagcactggatttttgtattttataaacagcctctggcattttgatatagcatctccaaggggataagtcaccgaacatcctggttaattttttaactgtcaacctgatacatctagaatcatctactaagagggaatcttaactgaagagttgcctcaatcacactggcctgtgtggatgtgtttgggggcactgtctggtttgttagtcggggcaggaggagctagcctgctgtgggtagtaccatccctaggcaggttgtcctgagctctgtaagaaagctcgagcatgagcctatgaatgggacaggaagcaaggcaacacgaagcattcctccacagttcccacctctaatttcctgcttgagttcttgctctgactctctcagtaatggaatatacaccaaagtcctttcctcctttaagttgtttcattcagagtttttacacagtaacttagaaccctgtgaacattccaactgccccttaagtgctggtgaagtcatgatggtcactgaagggatacttggtctcttagttagagtgtggtgctgtgaacagacaccatgaccaagggaactcttataaaggacaacctttaattggggatggcttacaggttcagaaattcagtccattatcatcacggcataaggagcatggcagtgctctggcaggtgtgagactggagtagctgagagttctacttcctgtttcgaaggcagctaggagaagactggctttcaggcagttagcatgagggccttaaagcccatgcctagagcgacacacttcctccaacaaggccatgcccactccaacaaggccccacctcctaataatgtcactccctgggcctagcatattcaaaccaccacacttggtgagcagagaaagttgccaattcaccttgctgaactgctcagacaattcaatgatcagtgactactaccagaacctgcactggctcagcatggataaacagtgtttctcccatgcaggaaggatacttcattttgactttctaaaatgatgctgaaatgttcttatccaattagtgagatgtccttgatacttttctagtcaagcctcatgcttgtgtttctcttcaattttccctccttgtttgtaagtattgccacaggcaatgaacatcctgctaccagcttgtcttttaggtgtttaaatgtgctttttttcttcttggtcaggcagacattattaatattgatataactcccatctcaccctcttctctcattcctaagtacacattttcaccaacaacgggatgctctaccaatgaaaatgctgtgtttagccagttctttattagaggactttgcataaattctgtttttttttcccttagttcaacattgttatatacagaagtcataaaaatacagtggggattcaggagatgtttctgccagtgaagcaggagaatggcctaagcccagatcagtgtagtcccaaaaatctgggtacaggggtgtaagaccatcccccagggctgagggagcaaatacaggtggatccctgcagctctctgggctgccagttagccgcaatgagctctacatttactgagcaaccctttctcaaaagcaaaagtaaaatggagagcgatcaaggaagacgcttgacctgttctggcccacacatgtgcatacatccacatacatactgacattaacatacacacacacactcaaagtattttatatatatatatatatatatatatgtagttatatatagttatatgtatatagttatatgtatatatagttatatatacatgtatacatataactgcatatacattaaacatgtgtataatatacatctatatatctatatgttatatgtatacatatataaaattgcaagatatatatatatatatatatgtatatatatatatatatatatatataatcacacacacacacacacacagaaagtatcatacccaaggatgtgtttgaagttcttgtacatttgagaagctgctgttgctatcctaccctcagaccccacagcctggatccccgttctctgggactcatactgcagatcacctcatctcagggctacatcagtggtcattacactcaggccctgctgctgaagcctttgctgatcagcttcttcctagaaacacacgaggcatgagctctgtctgagagggggttgcagggaccatggaaggctatgctgtacacctcaagtgtgccccttctctgagatgctttctctggggtttccttatgacacctttacgtctctgtgaaatagcatgggagagctgcgtcttggtctcatcctgactgtccttagactgtttcccaacccattgcagcaggttttcttcccttaataacatttatttctaccagacattatcttattaatttacatgcttaatttccctcacttattatcttgtctagtttgttggctgtaataactccagcaccaagaacaacttctggcacaaattcttgtcaaattcaccattccctggaaccacctgcaaagactttaaaatccctttggagactggggtggtaacgcacagttggaaaagttcttaagtgctgcacaggcacaaggacccagttccgtccccatcacccacatggaaagtacatgtattagcacgcatttacaatgccagccattgggggctggagacaggtgtgcatccctggggttcactgaccagccaagcctagcctaaccggccagatccaggccatgagagaccctgtctccagaatcaaggggttgggtcttaaggagtaaaacctgaggttgactcctggccttcatacatgcttacacacttatgcatacacatgcactttcacatacacttgcatctgcacttacacaaacttgctcattcacacacacacacacacacacacacacacacacaatcagaggaaatgctgataacatgttaagtatcattttcttcaggagacacagaatgttgaagtgttctcattaggagacagagagcacagcagatattctccaacatgtttattcattgctgtggagagctgggtccttgtcaaatcattttaaatgaagctaagctaatagagtatgttcatgaaagttattggactttgttaataaaactattctttgtttagagaatgggcttgaggaactcatcagtgtgggtgcgggtgtgtgggtgcgggtgtatgggtgcgggtgtgtgggtatgtgtgtgcaggtgcgggtgtgtgggttcggatgtgcgggtgcgggtgtgcaggtacgggtgtgcgggtacgggtgtgcgggtgtgtgagtgtgggtgcgggtgtgtcggtgcgggggtgcggtggtgtgggtgcgggtgtgtgggtgtgcaggtgcgggtgtgtaggttcgggtatgtgggtttgggtgtgcgggtgcgggtgtgtgggtgtgcgggtgtgcgggttcgggtgtgtgggtgcgggtgtgcgggagtgtgggtgtgcgggtgtgtgggtgcgggtgggggatgggggatgtgctggtgtgtgggtgtggaggtgggattgcaggggtgcgcaggggtgtggctgggaggtaaggggatgagggtgcaggtttgtgtgtgggggtgcaggggtgcaagggggctcagggccggggagtgagggacagtggtgtcggggtgtggaggggtggaggggcgtgggtttgtgggtgtatgcgtgtgtggggtagatgttgggttattttatcttcagtccagaagacatagggtttaaacctgaagtattcaacttgtggatcatgacccctttggcggttgcatatcaagtatcctgaatatcagatatttacattatgattcatagcagtagcaaaattagttatgaagcaggaatggaataattttatggttaggatcaccacaacatgaggaactgtattaaagagctgcatcattaggaaggttgagaaccgctggtttaaatcatcttgtcatgtcctgtcacatctctaccttttcattgtacaaatgtctcatgctgacagccttggtggcacagactctaattctagctactcgggagtctggtgcaggaggattgtaagttcagggctaacttgagttacagagtgagttcaacactgtcctgggcaagttagtgaggtcctatctcaaaataaaaagtgaaaagaaggttggttcagtggcagagtgctggtctaggttgtgcagtgctccacagtcagtccctcagaggaaaaagaggcaagtacgctaaatatagaatgcaacgttgcacaagtgtaaaagcttaccacttaagaacagcatacagttaagaactttcaggaagaagagatagtaatgacagctcagtgagtcaagtgcttgtcttgcaagcatgggaactgagtttgatccccagaacctaagtttagaagaagaggaggaagaagaggaggaagaggaggaggaggaagaggaggggaggaggaagaagaggaggaaaaggaagggagtggtggagggggaggagaaagtgaaggaggaggaggggaaggaggaggagactgcagcctggaggcttggaggcctggagagatggcttagtgcttaagagcacttgctgttcttccagatgacttattctgtttccagaacccatgttaggaggctcataattgcttggaagtcctcttctggccttcatatacacccgcacacatggggtacacacacacacacacacacacacagtcccagttttttgtggtaaacaccataaccaaaatcaacttgggaaggaaagggtttatttcattttacaacttatagcctatcatgaaagaaagttagggcaggaactcaaggcagaacacactgtccaggagagtcaaataatacagttagctactcttgtttatttaaaacattggaaagggtggctagaaaactggctcttggtagttgtcagatcacaaacacttgtaactctagctccaaaggttttgatcccttcttctggactccaaaaacaactacactcatgtactcgaatccacacagagatacataacacattttgttttttatctaaaacattgtgaaggcatttataacggggaaccgaggtctcgacacctttgacgtgggctactctacaaccgggtatttaaattcacctgtcctgaggcagcggtccatgtttgaccccacatggctacaattttcagtatatatcaagtcagcgatggaaagttttagggttataaaaatgaggtcgttggagagttatggatgggccctttagacatgagttttactgtgtgagagcaagagctctaacccagggggagagctctcttctcagcacctcactttgttctcccgttatgtgggggctcaagaaactttctcttcctttggttcaccttggagctcactgctcatcccagactggttggttagaaaggccgaggggtcggcctgtctctgcctccccaacagaggaatacaagcacacctccaccgctcctggaattttccactgggttctgaggatcatcctcagatctgaatgcttgcaaaacaatcactttatagcctgggttcagcctttagtcagggcaggaagttcttaagactcttcctaccacttgtgtgctctgcgtccagagaagccattgttctgtttggataaaccccaaagtacaaaatacaaagttctccacggacaaacatttacttcgtatttaagtttttgaagacttcaggtataggagctgtaccagtcagggctccctagagtaacagaacttatagaactaatctctgtggagagtcattggatctattggaatgacttacaggctgcagtctagctaatccaacaaccgctggctgtgaacagaaagttcaagaattcagaagttgctcggttccacaaggctggatgtctcggctggtcttcagtttacatgttgtcccagagtaggttctaatgacagtgaagaaatggatgtgctagcatggtgagagaacagtcaggcaaaaaaaccagaaacctttcttctatgtctttatatagacttccagcaacaggcgtggcccatactaaaggtgtgtcttcctgcctcaagatccaggtcaaaggctgtgtcttcctgtctcaaaggtctggaccggaactggattcacccacttcagaccaagcagaaaaatctctcccaggtgtgttctctacttctggattgtagttcatttcagactgtggtggtttgaataggaatggccttcatagattcatttctttgaatgcttgactataaggagtggcaagattaggtgtggccttattgccataggtgtggacttggtggaggaaatgtgtgtgacatggtagaagcaggctttgaggtctcctatgctcaaattacatgaagtgtggcacacagtcttctgctgcctacaaatcaagatgtagaactcttggctcctctgggaccaagtctgcctgcatacttccatgcttcttgccatgatgatagtggactaaacccctgaaactgtaagccagccccaatgaaatgctttcctttataagagttaccctagaggccgggcgtggtggcacacgcctttaatcccaaagcttggaggcagaggcaggcagatttctgagttcaaggccagcctggtctacagagtgagttctgggacagccagggctatacagagacccaccccccaaaaaaaaaagagttgccctagtcatggtcccaagaattgctatcatagaagctggagagatggcttggtagttaagagctcttactgctcttacagaggacctaggtttgattcccagtggctatgagatagctcataattttctgtaattcaggtaccaggggaacctcataccctcgaatttctttgagccagaggcatgcacatggtatgtaggcatacatacaggcacaacagtcatacacctaaaataaaataataaatctaagaaaaaacaatcaaaagttatcagagatattaagaggaagaaaggaagcaaacacaaaacctctttaatggcaagaagcatatgtttttccagttttccacccgtccttcagtaaagatctctcctacagcagaagacttcatgtcacttctgcctccatctcttacaaaatgaaaataggctggtaagctgttctgcagcaggtgctgggctggcaggaaaaagacaacccttttgtatagctgccatcctctgggacagacaaggggcacattgcataagtggtacagcagctaatcgtatgtgatcaccagactctgcattttacaaaacatgtccccagaaagatgcagggtgtcaggatgagatgggtgaggattattttccaaaacaaaattttcctggaaataaaatgcagagactaggaaggaacaaatgtaatgatctctttttgagttctctgtccccaggtccacatgttaatagctggcacaagagtgtgttaaacatggctggaactgggtcttagctgggactgactcaggagctgggagctgtccaagccaggcttggaaagaaccaaactcagaatctgatacccagggaaaggaaagggagccagaaggcaagagatcctcacgacacagggaaatagcttttaagaagctccgtgaaggccaagaaactagaaagtgggaatagttaaaagaactctggtgatataacagttgaagggagaaatactagaggtagaaggatttaagaagggaagggaccggcaaggagatggtagagaaaagagggtgggtgttcaagtaaaactaaggatatatgaaaatgccataaggaaacgtgctactttgtaaacgaaaaaaaaaaaaaaaaaaaaaaaaaaggaactgatcatggtggcgcattcctataaactataggggaacaaagtcatccttaggaagtgctaagccaggctggctaagacactgtctcaaggaacaaaaaaaaagaaaaaaagaggaacaataagaaagcattttaagaaaacttaggaaagaaaggaaaaagtaggaaaagaaaaaagaaaaagaaagagaaacatttttaaaagaaagaaaaagtaccttaggaggaatcttgagttcagcacctcctctgaggggaggatcggttactcgggatccagccccgcccagcagtgctggctgtccttgcgcaggcgcagtggttcctcgcttcagcactagtgcgcatgctccgcggggccacggttctctgacctgctgtggtagtgtcagctcctgtgaaggaagtttccgctttgcaccccacccggatcacagttcggttgtagggcccgctctctccggctccacatcagcgcatctggatcatggggttacccaaggggccagagggccagggactcccggaggtgaggacctctgtccctgacaccctggggttgctggggagagagggccgagcccagggcggcgggcagggaccagcctggggtggcggggacactgtctatggttgctcaggtgtgtctgtcccaaggcgggccctaggtaccctggaggggcagctgactggtcccccggcgtgccagggtgcatcgtgtcgctgggtgcaaacttaagggttcctgggtcctctggggacagaggaaacatccagatcccggcccagatgcaacctcacacatcacgaggtccccgggaattcctatctcgggttgtctggaggcccctcacattgcgagactggcttcccccgggccaaggctgctgcgcttaggagtctcagcagtcacgagatgagcggtgggactgtcctgctcccggtgtgcagcgggcggtgaccttgggacacacaccttctgcgggacccatgtggccagcctttcattcccttttgtcaggaaggcacgctacctacccggcttgtagcctcctgcccctccccccgtcccacgggccggggagggtgaaggaagtttggaagctctgcgcacatcagggtgatgacagagttgaggacactctctcctgtggtgcctgtgtcgggacaggaacatgctgcgtgttctaaggagggaggaccttttcagaaatggtttagtcgagtactcagccagtactcattcgatcctatgaacaggactaccacgtaggctgggaagaaaagtgcaaccactctctaacggtgggctaccgttagagcttggctgtgggatttccagttgtcctcctagttgctttactcaaagctctgagcttagagaagagtcccagtttccagagagaattagggaacacctctaaggcacctggatctctttctaaggctggaaggcaggctttggcagaggtgtggtgtgcctatttgacactgtgcctagtgcccgttcttattcagctgcgccgatcttgcttccccgtgcccctcacaaatccttctgttacatcttcatcctactcattacagagtcgaagtgttctgtgtccaggtgatgaagggtgggtatgtgtggccctgggttaggtaaagtttcatggggtctgggttgtaatagttcagattttctttgccatgtaaaaatctctgtctgtctgtctctctctctctgtctgtctctctctgtatgatgaagtgcatatgtgagcatgtgtggaggtcagaatagagcctcccatgtcaccctcatgaatgctgaaaacctcctttgagacaagtactcattggcctggcacttcccaataggctagattggttggccagtgagacccagggatctttctgtccctgggattacaagtgcacagtaccatggctggtgtgtttatatgggtcctggagattgaactctgatcctcatgtcgtgaggcaagcgctgggctattgttgcagctttaaggcttttcttggccgtctgctatggagtcctgtgtagggcttccagttctaccctagttccttcaaactagtggaagtttttctaaaagtaataaacacaccactttcatgagtaggtgtgactcctcatagatagccaggaggctgggtctgatttgttactcttttctagcttgttctacatcgtgagttctggagcagctgtgggtagggagatgagaggggtgggcatacatagtgagatcctgtctcaaaaaagaaaaagcaaaacacagaaagaccaaaatgactgttatagtgtgcacacagatatagacttaaaaaaaagatataaaggctaaaagctagcatgagtataaagttgaaaagctccaaataccgagggtttagggcagagtgcttacatatgtgcctgagctctgggttctgtccccagcacagtgaacagtgagggtggggtgcctgtaatctcagcactggggaggcaagagaactaggaatgcaaggtcactgtccacatagaggaatggagaaggccaaccctgggccacaggagaccctttcttaaaagacaaaacaaaattgctgtcacctggctctcactaatccagttaactcctgctggtcaggttttgaatccctttgtgtgtatatgaaagaaagcaatagctagacccttccagcttctgagagctacagtgcagggcagatgggagcttctctggccttgtttaagagctctctgcgatccatctctatcagtctctggttatgaatttatttccctttacttacgtatatgtccatgtgtctgtatgtgcgagtgaatctgagtacctgtgaagtcctgacgagcgtggcagataccagagatgagtaaaggtggtggtgagatgcttagtgtgggcttggggaactgaacctgggtcccctagaagaacggtatgtgccctgaaccactaaaccgtcgtctctggcctccagtgtcctacgttagtaactggaggtattatccagtgtgctggggttttatggtttcaagaaggatggttttttgttctctgcatatcagcacatgaccactttccattctgtgtaagcgcgttaatgtgtaaagtgaatttggaatcaaacatccccattcagtgtcttaggccaaaaacttatttcattggttctatttcaaaaatacagttgtacatcctgaaatgacaggcagccggtggggatgctatatgcaatgaattgaggtgggagattgtccttctgggctatagtgtccccttcttggcagtatctttatgacacatgatggctgaatactcgaaggaattctgtcttatttacctgtgtgtgtgtgtttgcatgtgtggtgtctagacatgcctgtatgcgtgtgtatatggatgttcatatgtgtgtatagatggtcacacgtgtttgaatacacatgtatgtgagtgcatattgacacctgaggttggcatcagttgtcttactctgccatttttctaccttattcattgaggcaaggcctttcaattgaacctagagtttactagctgggctagtctagctataaatagctagcctgtggtctttgctttccaagtgctgggctcacaggtgggccaccatgcctgcccaggatttgcatgggttctggggaatctgaactcttgtcctcatgctaatatgaacatccgactcttggcagcggaaggatttacttcatttccgttcagtggagatggcctttaccagttacgtgcatcccttttgttctaggtggagacgagagaagacgaagaacagaatgtcaagctgactgaaatcctggagctcttggtcgcagctggctatttcagagcaagaattaaaggcttgtctcctttcgacaaggtaagagaaagcctcgatagccactgtgccgtctctctgcaggactgcgcggttactcaaggtagcggaggataaactgattgtgtttttacttcctctgtacccgtggtccagattcctcggggatgtactcggatttcctgttcaaagtcagtagatgcaattgggttccattactgtgcacactattttagggactgtaaacaagcaagagagtattttctcaggccgggagactcctcagtcagtaaagtgcttgctgggaaagcatggggacctgacttggatccccagaacccatgcaaaaaaaaaaaaaggaaaggagagagggagggagggagggagggagggagggagggagggaggaaggaaggaaggaaggaaggaaggaaggaaggaaggaaggaaggaaggaaggcaggcaggcaggcaggcaggcaggcaggccagacctgtggcatgcttgtgatttcagtactgggcaagtggagacaggcagatccctggggctccccggccagcctagccaaattgatgagttctaggacagtgagaccatgtgtctcaactagatagatggatggatgactcctgaggaatgacacccagtgcggacctgtggcctctacatgtatgcatgtgtgtgcacaaacatacgcacacaggaacactcacacatgtacacacacgaacaaaaaatcatttctcttttaaggaacatatacttcgggaaggagttataaagtctgtggaggaagtaatctgagttcatagctatcctgaaccgcatgcttagacaatggcagatatcctgtagctggcaatgcttgtttagaggggcgagcttcaccatgggatggagtattttatgtctttttaacttttgttttacagatttattttagttttagttaagtgtatatgtgtgttggtgtgtacaggtgggcattggatctcctggagctggagttagagtggggaccgaactcaagttctctacaggagcagcagacacttttaaccgccaagccatcccttcagccctggggtggtggtgtttaatttagcagagctgtgaacagttaccatgcacaggacctagtgttaggtgttgagggcacagagataaaccatagcccttcactcaaagagctccaccgtcgtagagaagagtgacaagccaaccagcagtcagggcctaaattatatggtccccagtctcctcaggcacctgggaccaatggtaaggcaggccagggaggctttggaataatgctgcaggccccagggatcgctctcctccttctttgtcgcggaatccgcaagggatgttttataagaagcacgtccagacctcctccatcgagcttctgcgtaggtgggtctgggctagcgacctggaaatgtgtattttatcgtatatctcagccattaaataaggaccagaaaatgtctgccttgctgcccacatgcctggttggtaaaagacatcctctctctccatctggcatgtgtcagaacctgggctagaaatctctcagctggggctggagagatggctcagctatctgctcttccagaagtcctgacttgagtccccagcaaccacatggtagctcgaaatagttataatgggatctgatgctctcttctggaccgtaggtgtacatgtagatagaacactcacatactttagatatatttaaaaaacaaaaagaaagaaaagaaagagacagagacagataaagaaatctctcagctgatgactcagtaggctgtgcatgcattaagatctgagcttaatctccatataaaaagccagctatggtagtgggcaggggtaatcccagtactgaggtgatgaggatccctggtgcgctccagagtcagtgagagaccctatctcaaaaaccaaggcaaagaacaatacaggacaccattgtgtctctctggcctccacatgccaatcaacaggcgaacacaaacgcatactcactcacacatgagcacatcacataaaagaaatccaagcgcgtactatctgacccttgcctaggaagaagagcaatgagtgctaagactgtctctgtaggtattggtggattgcgcaggacagttgatcaaagaaatgagagccactgcaggatgagttcaggcttctcaccagcaaggggggaacctctgtgggactgaaccccaacagtctcctggaagctctttttattgttacacaaaaggcacctttagcatagcaatttcgcataccaaaatatttcatctgacctatgggctatcgtgaaggacccatcatcaaagcaactctcagccatgagagacttcctggtttgccaggcctgtctccagagtaagatgtgcaaaggctcttgagataccttcaaggaaacaatcccatcaaatctcagataacaatcactaacaaaagactacttcaaagcctaggcaccatcactccagatacctgccagatacaacagttctgctaaaacagtcagctcctccgtcacactggaagtactttgagtgctcaggaatcagccagggccagtagcttctgtagcagacagtatagggatgggcactgccacgatgggcactgccaccactgcagaaggatttatgacggtgccagctgatgagtggtgggtagggaagacagactctctctagagacacattgtatgggagagctgcagagagagctgtcagtaaagttacactgtatgacgacttaagctcagtccccagaatccatgtaaagatctgggtgttgtggtgagcacttgtcacctcggcactggggacatggagacaggaaaatccatgggcctctccggccagccagccaaatcagatcagcaagcgagagaccagtgagagaccctgcctcaacaaacaaggtgtacagcatgagggtcaataccagatttgatatcttgcctctacatgcatgcacacacacacacacacacacacacacacacacacacatgaacacatgtgcatacacaccagatatttatggttttctgagctttttgagtctgtatgggttgcttaggaaaggagtttcctcccctggcctctgttcccctccttgaggggctcatgagcagtctcctctcttacaggtagtaggaggaatgacgtggtgtatcaccacatgcagctttgatgtggacgtggatttgctctttcaagaaaactctacaatcggtcagaaaatgtaagttactggggcttgccatagatgggccaaatgatggggaggagggctttatagcaaagatggttcttatgtgtttatatacagattcctttgtatttttcctgctttgaagctgtattgtgtgtgtgtgtgtgtgtgtgtgtgtgtgtctgtgtgtgtgtctgtgtgtgtgtgtgtctgtgtgtgtgtctgtgtaggccaggggatgaccttagctcttgttcctcaagcactgtccactctttgaaaagacatctcttactggcctggaacttgccatatatatgctaggttgacaggccactgtgccccagggcactgccagggtactggattgtctccacctctccagtgttgggattatagtggtgtggcactatgcctgacttcccctacctttcattgaatgtggagtgtgtgtgtgtgtgtgtgtgtgtgtgtgtgtgtgtgtgttaggattacaacttaggtccttgggcttgcaagacattctttttactcactgagccatctccccagcccaagcttctgtcttttaacccattagcatcgtgtagtctctcctgatttctaagtatttagagtcgactttttaatgtctttatttggccttatacccccaactaccatcctaacattgccttcaaaatggtaagggcataatatttatgataatagttaagtagattcttaaatgtatagtcatttttatagtaactactatataagggacaggatcagaaaaaaaaggaaatacagtcttttcaacctaatgatactttaaaagaatggtgtgtgtatttatgtgtgtgtgagactgtgtgtgtgtatgtgtgtgtgtatgactgtgtgtgtgactgtgtgtgtgtgtatgactgtgtgtgtgactgtatgtgtgtggtgtgtgtgtgagtgtgtgtgtgtgtgtatgcgtgtctgtgtgtgtgtgtgtgtgttgtgtgtgtagatcaaaagataacttgagggagtccatttctccatcttttaggtcccagggattcttttttttttttttttttggtgtttcgagacagggtttctctgtagccctggctgtcctggaactcactctgtagaccaggctggccttgaactcagaaatcctcctgcctctgcctcccaagtgctgggatcaaaggtgtgtgccaccatgcccggcagcacacttcttaacccaccaagccttcttgccagtgtaaatggtactttttaaaggagaaaattgaaagtatcaggtgaaaagagtcttcattaatcctttcaataaatatttatcaagtctgtgttactactgcagctcagacattattcaggtactttggaaacattaagaaattccctgacttcataaagtttataattatcatggcacagactacagatatcaaataggtgaagtgtggggctgaagacagcttggtaattaaggatacactgctctcgcagaggctcagggttcagccctcagccccgagcttgggcagctcacagctgtctgtgtcttagttacttttctactgctgtgataaaataccatgaacaaaagcagcttggggaggaaagggtttattttatttacatttctccatcacagcccatcttagaaggaagtcagggcaagagcctggaggcaggaactggaggggtgatgcttgctggcttgctctccaaggcttgctcggactgttttcatgtacagcccagagccgccagctctggggcagcacatccacaatgggctttcccctcacccttatctaattaagaaaatggactacgggcttctccatgggtcattctagtggctgtgttttctcagttgatgttccgtcttcccagatggctacagcttgtgtcaagctgacataaaactagccagcacagtccatgactccagctccaggggatccaatgcctgttcttgaccacacatacccataattaaaaattaaaatgtgaatctctgtcctgcctttgaatttttgagacaaggattcttcccccccccccctctctgtatgtgtgcatgcgtggtgtgtgtgtatgtgcgccatagcttgcatgtagagttggacacaggtaaaagttgcttctttcttaccatgcaggtcctggagactgaactcaggttgtcaggtttggccgcaattgcctttatcctcttagccatcttgctgtccccgttgtttctcatgttttaggtctgtctgaacgagagctggtgacttgccagatgtccaagaggtggtcgggctgggatttagatccgggacaaatgaaccatcatggaggaggaaatagtgaatgtaacacgtaaaactttaaaagagtccgctcgatgtgctggtgcacacccgtaatcttggcattcaggaagctgacgcaggaggattacagttttgacactatgcttaactgtatagcaagatcctttctaaaaagaaaatacccttaaagtatcagacagtgttatactaaaatctcaagctcagaggtttgcctggtgatccacatgtgtcccttgtttgattttgtaatgttgctgtggtagacaccatgatcaaaagcagcttaggggagaaaagagtttatttggcttacaggtcccaggctgtgaagaagtcagggcagcatgcggaggaagaatgggagcaggatccatggccgaagcctgctcactcgctctcagattgatgcttggctgactttcttacacactcagggtgacctgggtcgggatgctgctgcccaccatggagtgggtgatcctagagcagttaacaacataacctcccaaccactcacacaggccagcctgatctgggcagttcctcaattgcggctctctgctcaaatgacttcaggctgtgttaggttggccgagcttttaaagaagctctgacttttccgaaacagttctgctgactttttaggaagtctgagttcctgagcagagctgagggtggctggcgaatgtttctaagaagtcttcctgccttctctgccctgcctccctactgtgtgcttccttccctattgctcccgccaccagggttagtgctggcagccactcctgcttgttgctgggactgcctgggcttggctctagtttctgggaggcagttttaagagactcataaaccccaacatgacttgctatatcctcccctctgggcacttatgaattgcttgattaagctgccagtgaggagtggctagggagagccctctggaaaagcaagaaggttggttgtgtattgtcgaggtctcagccgctggatttgaagctcccaaatggaactttttcaagctcgagctctgtggcccactagggggagcactcttcctgctgaagatggcactaaagaccagcgtggtggtgtgctgagcataaagacactcagagccaaccagggcctggaacttgtctcccttggattagtgtggattctgggtaggtggtccgcagcaccacatgaccaggacgtggtggcatgaacctataaaaccagttccaaggtggaggcaggaggatctatctttcttgtctaggagtcaagtttgaggccagcccgagctgcacaggaccttgccttaaaaacaaaacaaaaaccagaaaaacgaaaagaaaaaaaggaaagaaggcaataggtgtaatacatgatgggaagaatcctttgtgaccttacatgcatgtagctgaattgtgcttctcatgttggtctactgggatgaacttggtcaggtctgtcactgtcaccctgaccaggctgggacttcttcacagttctgcctagactttagagctgtctttagaaccactcagtgtgtcctgactctgcttactgttttcttctggacagtgctctatcggaaaagattgtctccgtcctcccaaggatgaagtgtccccaccagctggagccccaccagatccagggcatggattttatccacatattccctgtcgtgcaggtgagggcttctgcgtggattcttgcctcttaactgggagttcctggaacacacctggctctcacagcccagcctggacccaggctgtagtgtgggatgggtctggggccctggaccctaggtgtagcgtgggatgggtatggggccctggaccctaggtgtagcgtgggatgggtatggggccctggaccctaggtgtagtgtgggatgggtctgctgccgcgcagctgacagggattcttgccagcaatctcaaaaggcagctgtgctccctgcacggtagtagtttcactttggcttctgctgtgacctttgaaggttcccaccaatggcttttgttttcccttttcatatgtgcattgccgtgtgcatatgtgtgtgttgcacatgtgtttgtgggtacatgagtgtggaggtgcatgtgtggggacatacaagtgcgtgtgggtgtcttgtgtatgtgtgcatgcacatgtgtgcatgcatgtgagtacatgcatgtgaaagccagaggacagtgttggccattgacccttacatgactacttgccaagtagactcgaccagccggctaagacttgtctgtttctcttgcccatactggatctgtctgtgagagcagatcctctttgcaagtgctgcagcagtcatggtggaaagtgagtatctgaccgacattagctttgacagcaggaactccacagcgggttctgtgagaggctctgggatgcagccttccccttctctactgcatcacactaggtatggtccatcaaagcacatctccccagacacagtggacacaggcttgagaggtcagaacggggagaggggctggtgatccgcaggaaggcagaggtgaaccgagacaatcgctctgtggttgctgctttctgtttgttttagttttggttttggattttggatttttgttgttgtaattgtttgttgttgttgttgtttttgattgtttgagacaggtttttccctttgaagccttggctgttgtgaaactcactctgtagaccaacctagccaaactagtctgcctctactcccagatgcggaagggtgtgggcaaccacacctggctacatggttggttctcatcttcaatttgatacactgtagaacctaactggaagagagttgcactggattgtgtagatcagcttggcctgtaggtgtgtctgtgagggattgtcttgactgctgtaattgatgtgggaagacatagactgaaagtgagcaatgccagtcctggattgggtccctggactctatccgtagagaaagctagctgagcattaggcgtgcgtgtgttcctttctctctgttcttttctgagctgtgactaggtttgaagatcctgactcgacttcctcacagtgatggacctgcgattgtgagataaaatagtgtttgcttttgctctcctaagtctttgttttttttttttttttttttggttgttgttgggattttctatcacaacaacagaaggagccaggacaaacaccgtgtgatccagagtcatggttcttggtgcctgatgctatctctccctgatgctatctctcaccctgctctgctatgatttcagttaatgtccaaggtctctgggggtggggtcggtggtagagtgggaataaatggaagatgctaataacaggaatgttcttcctaggatatacacagcacaggaatgtaccctgtggagtatgtgctgtgtagcatggttttttttgtttgtttggtttttttgtttttgtttttgtttttcatgaagtcaacttattggggcaactgcttcctaatcgtgtcttttgcttgtagaatttgagtccttgcgatgattctggacgtaaagcatctgtggaatcccagtgacctgaatttgattcctaggccccacgtaaagatggaagaagagaagcaactccacagagttgtgttctgacctccacatgcaaaccatggcacacaagtcatcagtacaaatgaactatagatctccctattcctgccttaggagtgcctccctatggcttatatacctaggtgcctaggcagctggacctggccgagtttgctgtgcacttgagaaataaactaccactgcccccgtattgttttgaggatgtgagagttctctctgaggagggactgtcaactctaacaaatggttctttcttctgatgtgcttgtgaataacggaaagaatgaatgaagagcaggcattatccacagtgtgtgagtgtgagtgtgtgtgtgtatgtgtgtgtgtgtgtgtgtgcatgcgcatgatgtgcatatttatgtttgtgcatacgttgtgtgattatgtttgtgcatacgttgtgtgataaaacattttctgggaagacgtaacacataggcctgctcacctaagatagggagcccacaaaagattaaagtacacatatcaccaaagtccaatccagtgaaccaatgggggttttattagagtttcttacaggaatccgttcacgtgagggcttacttacaggagcagaaatgactcaaaaccagctgggaatctgagcacactgcacagcctgctggttgtggcctgtggcaggttggagaatatcctttccagctctaagctctgccaggcagctttcctggtttccgtttcttctaggctgctggtcttgtgtcagagtcttctttggtccgcttcttctaggctgctggtcttgtctcagggtcttcttcactttggttgtccgagtgtcttctttgcaggttggcttccttctgtctgagggccattctcagcttttattacttactctgccagggaggggtctagtgaatctggtcagtttcagggatttcctgatgttattttgatcttgtttacgttccagtccttgcttaaagagcttccctgtttcagtcttgaaggaaaaaaactgcacaacagcatatgtgtttttaattacatgatgtttttttaattggaaactcggactagcaaagccaactgcttccagacaccagctccatgagactggcaacttgaacagaaaccccatgttagtcacttgatggggaaacctcccagttgtagctcccggctttatcttgtagctgcagatcatttgaggagagtaatgtagtgtctgtgtaaggtcctataaaggttgtacctgaaatgtcacaaggattcagagaatgttctagccagtgatcccagggcctcaggccctgtactgctacaaactcttctaccacctgaggatttctttcatctagcagaagaggggttgtctcaagtggtctctgtagtgtctgtctgtctgtctgtctctgtctctctctctctcaatcacccactgacattaagatgaatgcatacctgtcatcccagcacgtgggatcatgctcacccacacagtgagtttgaggtcagcctgagctccatgagaccctgttccaacaacaaaaggaatgccaaggaactcccccttctcttgaagagacggacaggcctatagctttcaaatgttgcacagttacttacggctagtcacacgaggtcaccgggtcctgtcacctcagaggcccaactggctgctcttgtctcgtagcagtgtgttctcatggtttcttcccacctgggcaggtcagtcgtgccgacatgaatccccgggctgcacagtttccctgcagtaggagtccattcctgtcatctcacctcactttctcccacagtggctggtgaaacgagctatcgaaacaaaggaagagatgggagactacatccgctcctactccatctctcagttccagaagacctacagcctcccggaggtcagtgctctgccccgcttccttctgcttactcattgtctgtcctggtgtatttaatttcttcctctttcaggtgtatgtagattgagtgtgcttgtgtgtttacatgggtgcaggtgcctaaggaggccaaagacatcaggttccctggagctagagttgggaggtggcgagccacctgacccgcatgctaggaagcaaccttgagtcctcttgcaagagcagtaagagctcagctgttgccgtaaatctccaaccccaataaacccatgcaaaggacacacggcttggttgtaatatttataagctgcacgcctggactgggcaatataccactacactactatactccccagctatgagatcccttgctacttgtggctcctccaagccacgtggttctgctccatcttccttccacctcctcgtcctcctccttcctctctctcttctgtctcctcctctctaaaacttccagccccaccttcccttctaccgcccagtcacaggctctggcctttatttgaccagttaaaatggggagaggttcacatggaatcacctgagtatgtgatcccctgctcatcggggcagcccctgttgaggaagcagaaatagcatcaaaacacaaacagcagcagggcactgcacagcactcagccactgagccatctctccagctctctggggttttctcagtctttaattttattcatgtataaggtgtagcttgatcatatctacttccaactcctttcctgcccaggctgggcagtctctaacccgttcccttcccacacccatgccctccttctgtactgtctattacccgactggttcaggtagtgctgcttgctggaacattgactgatcttgtgcagatagccaccgatcatacagtgacttccagtgtagagagccatgtcatgtgttcacagccctccccacccgctccatctctcacattctctctgcattcccctctgtgatgtcccctgagccatgcagcagtcccatacatgtcccatgtcgcatttaaggcgagcacttgacaggcaggtattctcggtgctttggctggtcgttgttctccgtgtgaactgctgacccctacagaagcatcatctctggcaaagcttgtgcgtgctcttccttcctgttctctggtggtgtaagtgtgcactgggagagtcctgggtgcttaagcataggtccccctgcaccccaccccccctcccctcccttccccttggcgcctctgagcagcctcgtgttcattagaactgctccttagatggctgttaaggataaagcaatttttttgtgaattgcaaaagcttgtgcgtattatgtacatggccaggtgtgtgtgtgtgcatgcacgcacgtgtacacacacgtacataggccacatgttgatatcagctacctccctcagttattctccacattttttttcctttttgccccccgctcttcgtttttgatctatggctccctctgaacctagagctcatagattcatctagactggctgatcttcctgtctctacccccagtgctgggattccaagtgtgtgccacctcgcctggcttttagacgtgggttctggggtgtatccaatccaggtcttgatgcctgtagaagtactttactgactgagctgtgtccccagcccacggttctatttttgtgagaagctttttaggagactgcttgtggaggagcacgtttcctgcgggcacagttagtagtaactgtgacacgtaagagcaccaagcactcaggtactctagcacatcgctgcctccctcttcatcctgacaggtgctccttcatgcaggcggtggtgctcctgtttcgcagatggcagagctgaggcttagagttgaggttacatttagtgctttgaagggctgggcatgagagtgtttgtctcagtcactactctctccgtggcccgcctctctctcactaactgtaagtccctgtcagcattatttgtagaggtcctagctttttcccatgggagattcataagaaaattgagagctggggaaacagctcagttggtaagcagctgccgtgcaagccagaggtactggatttgagtcccaagtagacattttaaaagctaggctatagtaccagcactgtcataaaagctaggtaggtccctagggttcccaggctagccagttttgcttacttggccagcttcaggacagtgagagactatctctggctaatcggcacctgaggaagaacaacttcggttgtcttctcgccactacatgcacgcacacacatgtggacctgcacatgcatgaacatacacgtacctcgacacagacttttaaacagctcctttggacttctttacgcacagcagtgaggaacaactgttggataagggagacctgtgtgtgcagctgacttttttccttagtagaattggctgagtccctgtgttctgtcttgcaggatgatgacttcataaagagaaaagacaaggccgtcaagacggtcgttggcctctcggtaagtccctgtcccagcactgcacggccttcagcctcccctgtagacgtcacgtgtcccccaggagctggcagccaggaatgtgtgctagacatccctgccggctcgacacacttcgtaccaggacacaggagcccgctgctacactccaagtcccgtagtgccagttataagggagaaaaatcagaatacaaagcgcggtccccttcttaaactggtagcgggagtaacggcaccgctctagagaatgaagcacggtagctggcgaaggcaactcactgccctggcccctccccatggtggctctgggaagacagagtagctttgagcttctgcaggaaggccaccgtacgtggtgagttctggccactggattcaatacacatgagacatgtgcccagtgggggtggggagctttgttaagctgcttctggccagagccaggagactgcagccgctggctttgcgctcaagagaatacagcctctatgcctgatgcacagtctctgtcttccagaggcagcatactacagcacactgtgagtctagcttatgacgtcattgtgtcatagtgcatctactcaacctcatttgcaagggctcagccgtagacagatgagaggacaggtctggctgctagacctcacctttcaccttgtttaagatggtgtattttggttattttttgactgtgtacagcaggcctgagagtttctggtgattctgtctacactgccagtctctctgtagcagtgctaagattaaagatgctcaaattatacatctgtttttgatttttgttttttaacgtagcttctaggtccttattcttccatggcgggtaccttttatccacagagcccttaccacaactaagctgcttattttggtttttaagttagtgctcgttaaatagcaagtcagccagcttaaatatcaactgtgcgtttaatgcagacgacagggtggcagtaagattagaagctgagtttgcctgcctcatagagctttgtgagctggctcaggaatctcttcagaacaataattctggacttgaatttgtgttgtcccgcagtgacgacactgaaaaagcaggtcacttgatggtagcagacatgaggagctcaagcacagcagccggcaccccttcctcttcctcctctattctgtcagctctgggagggaaaaaccttgacaagtttgtttttgagacaaagtttcaccatgtagcccttgagtaccttgaaattgtggtagtcctcctgcctcaacctcccgagtgcctggattacaggcgtgcaccaccatacctggctcagctacacaattggtacagattcatggagtctggagatggcgcctgtgctggacccgtgagaagaggatagtgtcccagggacagcgctgctaatgggagagacaggcaggggacaaggttggagctgcgtctggataaacatggatgaatatcgtatgttgtctcaccgtctccatcacttagaacccggggcttcacttggtttgctgttttattactgtgaaatgttagaaaagaaggaacgtggttgtaagtgacaggtgtctgctttggggcggggtgtgacacttggtgtaagcacctgtggagccctggtgggcgggaatcctggattgaagcggctctgtcaaagatgccgcaatggtcagctttgattgtcaatctgacacaatctagaatcacctcggaagacagtctcaatgagggattgtctagaataggttggcctatagggggctgtcttatttattcactgatgtggagacccagcctactgtgggcagcaccgttctctagaagggtttctgagctgtgtaagaatggagaaaatgagctgagcacaagcaagcgaggtgcattgctcctttctctctgctcagacagtggaagtgatgtggtcagctgtctcatacctgctgtgacttccctgtgtggtggactgtaatccagaacaatgagctaaacgatcccttccttccctaagcaccttttctcagagtgttttaatcacagcaacagaaaggaaacgagcccagttatgctgggctgtgagaatgagtgacttcaggccagtggaggcagcttcccccttgagtggggcgtggtgtggcccactggagccttccagtgcagagcgccagattggtagtggcgcttcacttctctggatttcaataaagaagttgtccctggcgattgtgagggcagcgatcagagggttgacacgtccggggtatatgtcagggggtaggcagtgctctccctaccttgccatttcagatgtgggctcagggatcactgtgccatgtgaaagcaattgtgatggtcccttcgaggaaaagtggctgtcaggcacacaggggttctctgtgttagggtcaccttaactctttaatgccattcatgtcattctttatcacttgccaaggcaaagtgtcagaactgatcagagtgagggagaacgtatttgaagagtcctcgtgctgatgtcattccgtcgctgtcacttaatgctttgttagctatgggcaggttgtttaaacccaggaccagtgagatggctctgtggatcaggatgctttccaagctaataacctgaatttgattctcatcccagactccatgtgatggaaggagagaactgactcccacaggttgtcctctggcctctgcatgtgcaccatggcatacgtgtgcgccctccctcagacatacacataagagaaatagtgagatagaaatctaagctccgcaggtctcatctctaaacagaaacaagcatgggaggcagtgcatagggagtagccagtacaggcctggtatgtgctcatagcgagacagcgaggctgggaggtgactccatagggaaagagctggccacataatctcgagggcctgggtttgagtgctggaacccacatgagcttgcagtctagttgccaggagacagcacgagaggatccctggaggatgctggcagccagcctagccacatctgtgaagtttggtaaaagcaagagaccctgtctcataaaacctcctacaagctgtcctctgacctccacacccaggctgtgggcatgtgcctgcgtatgggtgtatgcaggcacatacacacatactgaaaaagggaacaaataaataaaacgtacattttaaaaaacaaaacaaaacaaggtagaaatcaaccgaggaggattcctacagctgacccctcgactccacaaatcatgtgcacccccaaacaaacacaaagagaaaatataagaggttaactctatataatgaacgtctaaagtatttcagttttgatttctctgttgtgtgtgtacatacttgtacatgagtatacatgccacagtgtcctcctgctgccacgtgggtctcagggatgaaacccagtcctaaggctcaccagtatgcagtctgacccactgaggcatgtggctggccctgtgtgacttttcaaaagtgaacatagccaaacagtattgttaatctcagccttgaaattgacacagtcgtgttaacaatgaacaagacactggacgtatcccggaaatttttgtagtttgtggtctgttggaaggagctgcccatcccagaagccgtcagtggcagaaatggggtaagatgcctgttgcttgaagagtgacttagcaggggctctgtacatggcttgcagtagctggtgttaggttttcattgatcaggctaccccatacctcagctacagatggtactgtgagtggtgggagagggtcagctgtagaggcagcccgtgggtgctggagatactggcacatgcaagtaaggagaaaagccaaggcatttggagcctagtgctgttctaggctaaagctatcctaggcccaacactatatcctaggatcttagacaaattatttatttagctgtgggaggagggttgttttggttttttactgaaacaggtctcatgtacccccaattgcctttgacactgtatagctggggatgagggataacagtgaacttgtaatcctcttcctctactcaggagagcgcagcaacaggcatatcctaccataccctggctatgtggtctgaggatggaagccaggactccggatgctaggccagcactccatcagctgagccgcatccctagcccctgcttctttggcattacactgagaagaatagtgtgtgccctgcctttgcctctgcctgagcggtttcagagagccaaaggtaagatgcatatgaaggtgcattcttaaagtgtgcatggagccagcctgaggccgctgtgcagagtgagcactccccttgactctggctttcctcatgctattgttttgaagtcttttcttagaagaatccaatttcctgtcttgagtcattggctctttcactggtaactgaggagaacagcagttaagcgcaattatgcagtgttattataataggcgagcttggtgggaattaaattacacgcagtcccaggttcaggggcccattctccttttcatttctgtataagtctggcttgcattatttatagtttgctgtttgtatagacaatgggggtgaactgggggatatttttggaaggactttatgagagcagccctcaagcatcatgccagatatttgatgcaaaacgtgagatgggctggtgagctgccttagtgggaaagggggcttgctggcaaacctgagagaacccagcccgctcccgcaagttgacctctgacctctacatgcacaagtgtgattacacgtacaataaatacatgtttaaaaagttgagatcatttgtgtgtcacaggtacacttaacttcataaagaaaagtacagtgaggctcaggaagctgggttatctccaaggaaaggtcctaactgagtgaagtgctatgtttgaaggggcttatcctgggccgtgccggctagggacaggcttgtgctgtcacagtgcccattggtccacacacagagccatctcagcagtcaggaaggacatttatgggggcgggggatggagtgacaaatcaggccatcagaaggtggacactagtgattgattattgaacatgtactgcatgccacctactttgatcaagatagatagacagatagatataaatattttacatgtatacatatgtacagatatgtgcacattcaaccagaatgtgtgccttataaaatagacctatatttattgtatgtagtgtgttgattgcatacaatagcaggacagttaactgtagtcctacctgctctttaggctgaagcaagaggatctcttgagacttgagacaaagagttcatctagataataaagcaagacactgtcttagaagagggggaacggacacagggcattttagttttcttaagctttttgatagtgaagcttcggggcacatttatttctgttactgtgacaaaatccaccaacagaaagcaacttaaacaagaaagggtttattttggtttacaattccacagggatagagtccaccatagtggggaattcctgactgccaggaagcagaatgcttgcatctcctccacacacaggaagcagagagaacaggaagtgggcgccaggcacaaagccatcacgaatcatgtactccttccatcaaggctgcacctcctgaactttccatagtctttctaaacagcagcaccagctgggaccaagcctgtggggacagtttacatccaaaccgcaacatccacattgctttcctgttagcctatgaaagaactgtggtctccttcactgtgtagagagaccttttaggacgactgattatcacaatgtctgatagtgagctgctttgtgggaaggtcagcgcatgatggctcttcacttgacaggctgtgttcggttcagaagaccagaggagaccttcctttatttcaaagccagacagcatcataaagagatgctcttctaaagtcatctagacttttggtgtgattttaataaaaacaaagagtttgcataaggaacctaacaggcaggcgctgggatatgaataggcgtgaattcagatagagcagagctgaaggcttcaagcgtgatcttaagacgagaagcactgagcggcggtgggtcattggagcccaggcctgcctgtgtgaggcggctcatggtcagaagtcagacgcccggtgggtaggacggggatgctttgttttccatttgtaaaactatggcctcctacctttcaccacaccacagagattttaaagctaaacataaactataatgtgaatatatttccttagtatgttaacatatgaggtgttttcttccgtgtctgcttgtctcattgttccttgcttaagtaagctacatgtgttggtttcctttgtgttgttacaaaaaacaccctcagaaaaatgtgagagagggtttattaaggctgcagttgcagttaataaggcttccaggtcgcagcccgtcgttatagggaggtcaagacaggaacttcaaacagccagtcacagccacagtcagagcagaggaaatgagcgtgtgcgtgcttagctcacgcgatggtgcttaaccggagggaggtttgtgtgtgtgtgtgtgtgtgtgtgtgtgtgtgtgtgtgtattcctcatggttgtgatcacaggttgaactgatctagacagttccttactgagaatctacccaggtgattctagattgtgtcacactgacagttaaaaccaacaattccagtgtaaactctggaattagaggagcatattgttaaaacgaccttagctaagtccatcagcagctgtgtacagagccggacgtagcagcacgcgcagtgcgtcataatcccagcactctgcagctggaggcaggatctgaagttcagggccatcctcagctgcagaaggaaagggagggagggagggaggaaggaaggaaagggagggagggagggagggagggagggagggagggaggaacgtgaaggaacacgggagggagggaggtgagggacgtgagtggacacgtggagggacgggagggagcggacgggaggaagtgaacggaacacgtggagtggagtggagggagtggagggagggagtggagggagtggacgaactgttgggagcgaaggaggggaaagagaaaaacagtctcgaaggccggtcctgtcagtgagcttctgccctggccgtgagaccttttcccttcttggtacatgaggcttgtggcctccacctcgttacagtggtagaggcagctccagcatggctaaaccttgggctccagcttcctgtgtgttacactgacagaaacacaaatgaggagagtgggggtttatttggctaccatctattggtgaggggcactcagggcatgaactgggccagctgctacctcacagtaagcagagagagggagcgcacgcaagcaagcgtactgcatagtgcccagctggctctctcttctctcttatagtctgggcccacccccagggaatggtaccactgactctcagcctcagtgttctcacagtgattaaggcgatcaggacaatctcccacagacaagttcacaggccagcctcttcctaggtgatcctagcttgccttaagttgaaagttagcattatcacacctagactctgtcctgctgcccctgatgtgagctaaccgggtgggcgcccccatcctttagtaaaggtctactctgctggcatggctggaggcacccagccacaatccaggggagcctctcatgttgcctttctcgtcccctcaggatgcttacaagccccggcgaaagtaccgacggcagcggggagcagaggagctgctggacgaagagtcccgagtccactccacacttctggaatatggcaggtacagagtgggtgctggtcatcgtgtccaaacccagcaccacatgaaaaagtccagagtggcggcacacacttgttatcccagtgaggaggtggagacagggagatagatgctggggctccgtggccagacagcctaaactaagcctgttgagtaagatccaagccactgggagaccctaccttgaaaaccaaggtggaccctgtcctgaaaaggaaggttgttctctggcttccactcccctgtatacacacacaaaagaataggtattgatatatttagtggatggatagatagatagatagatagatagatttatagaatatacatctaaataaaggctttttgagttttcatgtcagcttactagccctctctcatcctcaagggtgctttacccttcttaataaactgtcgaaagaaagaaagaaagaaagaaagaaagaaagaagagagagagaaagaaatgaaaggaaggaaagaaagaaagaagcaagcaagccaacaattaattttttgttaattaaaattggacagctgctggagtggtggggtatggtgttagtctaagactggcaggcagaggcaggtggatctcagtgagtttgagaccagcctggtctacagagtgagagctccaagctagccaaggctacatggtgagatcctgtttcaaaaaagaatggagacagagagagagagagagagagagagagagagagagagagagagagagagagagacaagcaagctggcttctgcctgattgagtccacatttgcagctgtgactttctggtttcgtctctgtgcccacctttgtagttctctggaaatggctgtgaccgtgcatggactccgaccttcttggggagttggtgcagaggccagggctcgaacgcccctctttttaaacagacagtccacagagcacatgcagccatttcgtatgccctgcagtaatcctttagggcaaagattgatctgaatagaaaaatgaaagccttaatagtaagccttattacttcttaaaattatttgtcctggagagagttttactttatagcctcacttctttaaaaacatgcaagcacaggcttcccttggtcaacactggatattaaccttgcccatgtcctgcattgtctatccagggtgactgatcccttgatgtgagtatgtgcctgtgtctcctgcctatgtgtggggatagtgttccaactcttgtgtggctgacgctaactctctcactagcatctccctgtgtgtcttatggtgccttccgctgagaaatagtggtaagcaagaggaaattagacttagctgttctagctttccaaggaaaggcagtgcttattagtgtgcgtgtatgttgtgtgcgtctctctgtgtgtgtgtgtgtgtgtgagagagagagagagagagagacagacagacagacagacagacagagacagagagatgagggctgtgtgcaagccatggcctgttttgccgcagaccttttgggtccctatgtctgtgtggaacggggtctctggacgcgggtgggcaaagggtggatgatgacagacagacacacacgcaggagagtttgtgtggaatctgaatgtaattttacaactcgagcatcagactttttatgcagaggacaataaggaagttgggtgacatattcgcaaggtacaattgaggtaaccggaatcttacataaaacagaggaatgcaaacacaaaaggtctaacgggaaccacccaggatagaatacattgatatcagctgggatcaacgaaggctccacctaaaattcactaatcttagaagccaggtcaagggcttcgcgtccttgccatagttcctattttagtctcttgtatagtccaccttccccttaggccattgtaaatatgtgtatgggtgtaactctgctatagtatctattctggtttctcctttggtctgaaacttccttcttcctaagcgatggtaaattcctgtgtaagggagtgacttagcttttacaatcttgctgaattctaaacccttgatcttggtcaaggatgcccttggactgttggaacactgggggaaggctttagccatgtcagagcacttataggaaaaactgaaagagagcacgtggatccatactctagactagcgtggtactggaactcgggaatgaaaaattaatgtatgggtagagaacactagcctccaggaggagagcttccttgaaactcttttgcctcatgagtgacttttaagcctttcggcttgtccagttgactcgaccagagagcgtagcactgtttgtgtacagggtcagctctttccttccacctccatgtgggctctaggattcgaactcgggtctttgagcttgcatgaaagcacctttacccattgagccatctcacctgcctctggtagtgtggtggtgtttggctttgtttatctgcttgtttggggtgattctctgaggtcatctctctcccacaaatgaaactagtgtttcagaagctaccgagtctgttcagcattccttctgctgctgagaattgaatatggttttccaattcagagaccattcataccagggacattattttgagagggagcaggaactgtataaaattaaagtgcatagccccctgttaaaaattgttaataaaggcctggagaggtggcttgtttggtaaaagtgcttgctttaccatgacgaggactgaaattcagtcccaagagcccacacaaaacacacagtacaaaactgcctgtgattggcattcacttgtaactccagggctagaaaggcaaaggcagaaacaccctgggggctccctgcggccagcctcctctaacgggtgagctgcaggccagtgcaagaccctgccttaaaaatgaggtgggcacactcacacacactcatgaatgataaaggattgtgctgaaagcatggtgtgacctctgtctacactgtggagtagctgggagctcccaggaactgaatcatgggactcagtcactcagactccagactatgacttggaactacagatttaagccaccctaaattctgggttccagtgtggaagcagtttcatatcttaaatccgggcacttttcatatacaccggtggaaacgttaggtaggctcagggttacagcacacttagagaagtcacagccagaggccttggatgccatctcataactcttacccttttggttggtggaaaaaaaattctttaaatagtttattcttgaatcaaatatatgttactaaggccctggaacatgaattcctacatggaaatggtttcctgaaactatagaacaaannnnnnnnnnnnnnnnnnnntacatataataaataaataaatcttttaaaaaaaaaaaaaaaaaaaaaaaaaaaaaaaaaaaaaaaaaaaaaagaaaggcaaaggcagaaacaccctgggggctccctgcggccagcctcgtctaacgggtgagctgcaggccagtgcaagaccctgccttaaaaatgaggtggacacactcacacacactcatgaatgataaaggattgtgctgaatctgtctacactgtggagtagctgggagctctcaggaactgaatcatgggactcagtcactcagactccagactatgacctggaactacagatttaagtcaccctaaattctgggttccagtgtggaagcagtttcgtatcttaaatccgggctcttttcatatacactggtggaaacgttaggtaggctcagggttacagcacacttagagaagtcacagccagaggccttggatgccatctcataactcttacccttttggttggtggaaaaaaaattttttaaatagtttattcttgaatcaaatatatgttactaaggccctggaacatgaattcctacatggaaatggtttcctgaaactacagaacaaaaggcttttttaaaattaaaactacatcaggtagatgtgttaacaaaccaaggagatgtgctatgggcagagatgctgctgtccggtgacattcttagtggaagcaggtggtatgctaaattcatttcatcaggttgtatcggattagaggtgggcagtgaatgactgtgaaaagacttaaggatatcaccaaggtagttcagctctggatcctccacattccaaccctccacaatcctgaacttctaggtctaccttgtaaaaggttagctctgatgtggcttttcctgttaacttggcagcactgactaatctgcagaggctgcagtaaggtcctttacaggactgtgtggagacccaaactttagccttaggttgaattccctgtactttggcccactgtcctgcaacgtctgccatgtctgttttggtcttttccagttctattgcaaagttaggcaatgtttataacatcttacttcctgcattttctttcacttgtatttttttttttttaattcaacaaacgttagaaactcaaactgtaaaagcagcagcatccaccagaagggtacagacacgcgctcaagcaattgaccatgaccaacagagtgggggcttgtgtgggtgctagaaggtcaggtcttgctctgtatgtgtgcacttggacaagtgggagcttttgagacacagagcagagaggcagatgaagggagagaactggtgtgaggctccaggtggacagtagatggagcaggagctgctcggatgagcctgagtggggccttggaggagggagctggccagactgcttaggaacctgcagtgcatcttggaaagtgcggttgggtgggcggtggaagagcaggaggggaggggtgaagctgcagaccctccctagacagtgacagcagcacactgctcccatgggcaaggcgtgtcccaagcagggcagagcaaaaccttaatttgtgtttctcttaagtgcttgcatgcaactttatttgaaactaagatcttagaggctggttgttcacattatatcttttgtttggggttgaatcttttgtgtgtgtgtgttattgtatttgctttaggaaaaaaaaaaaaaagcatagtttttgttttaagccagaaaataaactaactgaagctgaaatgcagccatgcgcctttaaattttagctctgctaaagtgagtccacatgaatgacattatgtttgggttatgtgtgaaaataaaatatgggcgtgacttgaagtcattaaagcaatattaaagtctgcactggctttaaatacattgtctgtttgcacagatgtttttaaggcttttagcttgcagtgtggttttgatttttagcttgcagtgtggttctgagatgcaattcctgattcgaagagtaacgcgtgcccttaaaggatgctctctactgtcttagcattcccgtgtgtagcatctgaacagcaaataccgtgactggccagattcagaatctgataggttatgtttctggggacagcacatggaatattttctctaagcattgaataggctaaatccttttcatagtctgtgaaaagcctaagtgctggggctggggagatggcctttgtggtaaagtgcttgtcacgcaagcctgagggcctgagctcctgagctctgtacccagcactgtgtaaaagccagttggaagggtgtgcacctgaatcctagcgctgggaggcagaaacaggagggtccctgggccttgctggccagcgaagttggtgagctcctagttcattgaaaactaaatgtctcagaaaaatttagaaagtgactgaggaagctatccaatgtttgccagcctctaccctcatgcacacacacacacacacacacacacacacacacacacacacagagcatccaataaaaaatgcacttgttggaatttattgagatttgtgaatagtaattaagttgtttctcatggcttacaggagatacggatttagtcgccagagcaaaacagagaaggtaagacctacctagccaggtggtggcagcaggccctgggcaggcaggggtcctgggaatataccaggcacctttgtcccctgcttgttcgtcttggtatctctagcctgccgcctctgcagtccaggaacagaggcatccgagagctatagagcaaggatggttgaagtccagttgatagatgtgatgctgtgtcaggcacgcctcaccaaccctgactggcctgcatcagaagcaggaacttggcctggaggccctagattatccgatctcttttagttgggccccagatgttttctttcacaggctacccctctgtaagccagtcttgttcccgctgagtctccaactctggtgctcagccgttttctcatcttcccttctaggctgaggacaagaaaacagcacttgctgcagggctgtcagctgcagagaaagtggatgctcacgaggaagatgagcttcaggcagccgaagaggtgtgtggcatgtggtggctcttggaggttcaagtttgggtcacttgagggaagcattagctctcacccacagctctctcaagcagccttccactcacagttcccttttttaaaaatgttatgaggttcgccattacccctcattaaagcagcagctctggggtttcaccacagagacctgggcaggcgctcgctccagtcagtctcacacggttggtcagaactgctcctcactgttctcttcctctttcagcagcgtattcagtcactgatgaccaagatgaccgccatggcaaacgaggaggtgaggacttgtaggggagggggttgtgtagtagagatgcagatagagacttggccccatcctgatctgtcctaggggacctgaggcaggggaataccatcttcagagccctctgtcttcagaaggaagccttttatagtgcttagcactgacatcagggccttctaagaaggaacctgttggtactctgttcccgcaggagtgatgcactgacctttacggaagagcaagggtcagtcctgcttatctgaaaccgtgggagcccgtcttcttctgagcgcagctgtctaggcgatgaaatcctaagttgccagagagccttctcacaggtcaaggcctgcacagaaggagtaactctgccctggatgagaaagacctgtgggaataaagagatagtttagacagatggggcttctgattcctttctcttctcatctgtgagcctcaggtccccaaatgtctggacatgagggtggagatgaagggatcctagaggtaccctggtcttaaagaggaaccagtacctaaggggaagttagaaaggatacccaagacccaagaccagaggggaagctagcatagctactaaatgacttgagagagagtggtcattccaggggcaaaggaagcaaacacagccaactgagtgctggagacaggagaggcagggcagctctgacgcttgtcctgagctttgtgggtgagtcagaggtcaaagccaagtgactttcctggggcagtgctgtgtattttgtatttagacaaagctctgtgatgggcacgtgtccctaagaatatacgtcatgtgattgcagagccgtctcaccgcaagctccgtgggccagatcgtgggtctctgctctgaggagatcaagcagattgtgtctgagtacgcagggaaggtacgtgactgcctgccagcgcctgggccttgggtcacacccatggcttcatcctccccttcccagaagcaccagcaccaggcttgcccatgcacagccatctacgcccgcccatgagctaaattcatttggttccaaggtgctaatttttttctataaatattaagggaaaagtctgtcttgaaatagcagtcacatctaatatgtcgccacctgcaaatccaggcagtcatctttcctgccctgtcaggctgcttataactcaggcttagtttggcttttttgcttttaagaagacaaacttcataactcagccaagcccaaggcagaagtttttcctggacactttattattgagaaatgtgtagattgaacaaaagcctcagtcatatttcaatgttacttctcttcccaccctaaagagaggccagggggccttaaatatttcagagatggagtgatgaccatttttaaaatagctttaattttttattattattgatctattggagggggaggagagttatcacagcatacatgtcgaggtcagagagcaactttatggaatagattttctctttctacctttatgtgggtcccaaggttgaactcccagagcaagcgccttcccctgctgagccaactgggcagcccggtagtgaatcattttgcacataactgagtctagtgtggctgtgctttggcctgggtgagagatgatttacaaggctctcttgggtttttcatttcctgttgtgataaaatgccccatgcaagcaacttctgggggaaagggtttctttggctcacggttctgggttatagtccatctttgctgggaggtggagtcaggaggaatgtgaagcagctgatcccagccacagtgagagcagagggcagtcagttaatgcgagcatgagcatgcgagcggtggctccctctcctgttcctctgcccagggcccagcccatgaaatgttgcctgtgtaccttgcccactccacccaactacacaattctctcacagtcatgcccacaggctaacctgagcctcactgagcctcctcacttccagggtgagtctggactggggctagtttgtgactagagctgacatcagaagggtctgttagctcgtccctcctttctcacctgtgctctgagtgaagggtgcttggggaattgctctcccctagggccaaagtgaggtctccaaggcatggagcttcagagcaggacagtgcgtaggtcgatgtctggggtgggtttcctgtttccctgtcgtccaagggtatgcttctaaacatggctttccctagctctcatggactccaaaaggtctgtctttgcatgtatcacctagaaaggggagcactggcgtgccatctgagactgaaccaagagagattttgcctactgtaaatgtacagtaaactcaaaagattgcaattcatagttgtgaaaggggaataaaaatcactgccccagaagtgtcctggtttcctgtcagtcgatctaagtagcaaggctgtgagtctgacataattctagactgcctgtaaagagctttagtcagcgaagttcaagaggaaggagaactagatgtgtttccactctgcctgtgtataaatgtaattgtgtgtctgtttctgtgtgcatatatgtggatttgtgtgtctctgtatatgtatttatgtatgtgtgtgcattggtatttgtgtatatgtctgtgtgtatatatatttatgtgtatgcatgtgtctgtatctctgtgtatatgtttgtgtgcatatgtgtctgcatgtatgtttgtgtgtatgcttatctatgtatatgtctgtttctgtgtgtgtgtcggggggaggtgttgtttacatgtataatatatgcctgcttgttagcatggggcatgcatgtggaggccaaagtcattgaaaatgacttgtgaggcctggtcctctcctcctaccctgtgggtcccaagaggtgagcttgggctgtcaagcttggcttcaggcatctttacctcctgagccagttctctggccctcagtctcttactgcgattaatgctttcactaggtttcattgattctgctgttcaggtctatcgaggcttttccatttgtatccacttaccctactactgtttgtcagagaacatctttgtttccctgtgacacttgagctttactctgcttttgtgtttcctgtctaatttaaaatacaaaccaacctttgtttcttatccttctgtttgcttcaggttccatcaggaaaccttgctgttgtgtttgcttctttctgtcttgttgttgcatccagccaaagactggttgtgttcaacctggaccccactcgtgggtcgcattgggtttattgctgcatgtcacacctctgtagaggtgcacagcagctagttaagatggtgttgaaaggtttagctctgttttggatgctataaggaagggcctgtgaccttgactctcaacatgggctcccacacaccacacctgttgctttgttgccttcttgtctcagcaccataggttggcttggaactgggctctggtgtcctctgagatgggcattgctgttatcagttttgttaggagtagtaccactgtggtcagagatgaagacaaagtgttccaagcagactccattagtgccatttaagaattgtccaagctggactgttacctgtgtgcatttttctttagtgaggagaaaggacccccccactttcgcagggtagaatgtaaagaagatttttgccaacaagggataaattgaacagcctgcctaaagcaagtgcttgaaagaaaagggctaggctttgggatctaaaagtgaggaagaaataagaaaataagtgtcagactcagctttcagttttaagattcacaggttcttctgacagcgtgatgtgatgagtagcccacgtgtttcaacgcaggctgggagatagctaactcagtttactatggttcttgtaaggctgcaggttggggggtatgacaaagcatttgtagttgtcatccacgagtgaggctctgggcttggtaggtcccatctccctgttcctacctgacactctcagaatgttctagaaggcctcacgaagccttttattgttgatatctaactttctccagagaggagcctctcactgtggtttgcagacaacataacagcctgactgtgcaaactactctgacttcactaatcccaggggcatcctaagaagcagccaggccggggcatatgcagggtccttggaagagccctaatgctgctgctgctgagtcaccacctggcatgttgtcgccttggtgcttagccagctaagtcagccttagctgatatgtctgggggaggtcctgatgggtcttctggggggattctgtgggtctgaaggtgtaggggatctgtgttctgcaaacagagtctgcatgtcctctctgttggcatcttgtacacttttaattcatgactgtttatgtgccggcagtcagtcttcaccttctatgttgtttgaaacctctcttgttctgtgctgagttctacagccttgctgacccatttgcttccagaatattcttctgtctctgcctgtaggaatgctgcaccatctccccagcccagcatttttaatgctaaaagaatatttaactgtttctcttttttacacctttatttacttgggtgtgtgtttgtatgtatgggagcaaggagagtgcgtgctgtgacttatctgtgaaagtcaaagagagctgtctagacttggttctctctcccaccatgtgggtcctagtgttgaactcatgtcgggcatggtggcaagtgcctttactcaatgagcatctcgctggctgagataagttggtttttccaagctgtcttcttgcttaagaccttctgccttcctccctcttcatacatatttgtccttgtctgttgctgtcaaaatggaccacattctattgtttaattgagcaactcacttactaaataccacggttgttggtgccgaggaaataagtctgtaatgttatatacatttgcagatgaagaaagtgcaggttatagaggctcagtcatttcttcattcgtgtgcagctctagtacgttcctggtttgtgcaggaccacctgcctttacagcctgtctgtttagccagctggagggtcatggggggtggggtgaatgtatgtgccctctgtagttcttcttctgagcctgcagcaaccacgtgcttcctcaggcatgcacacctccaccgactgcctttgtactgcattggaaaggatgagtgcactaggtatggacgaaccacagaagtaagagaacctagtacagcctggggcttacacagcacgacaagccttctggctactgaagttccttttaccatcttcatcgttgtcgtcattcttttatcatcatcaccactactaccactgctgtcatcattgtgtgtgtgtgtgtgtgtgtgtgtgtgtgtgtgtgttagacacatgtgcgtgttctatgtgtaaagtcagaagacaaagtcagttggttttctttttcctcctgtagtaagccaaggcatgcactccctttgccctcatatatacgacaagcacataccagtaactaaatggggatcaagctcaggagacaccttctggcctgtggaaactatagacgtttcttctggggtatccagtgactttttttttttttttttttttttttggtttttcgagacagggtttctctgtgtagtcctggctgtcctggaactcactctgtagaccaggctggcctcgaactcagtaatctgcctgcctctgcctcccgagtgctgggattaaaggcgtgctccactacgcccagcttccagtgacttttcatgtcactgtagaacacattataacattttcaaatagctctttctaaagtatagtattttaggcaaaagagatagcttatccaattaaggtacttgctaccaagtctgaggatcatggggggaagagaaaactggctccagcaagttgtctccccatctccatccatgtgtacgcatgcacacacaaaaggagtaggagtcagtatcagttctgaggtaaagtacagcatcccagcccagtgctgtttcctgtgcctcctctgtcatcttatttccatggggacatgtgctcatgtcctcaagagccttatttatggaaggcattcttctcccagctggttctggaaggccccgcccctgaccttctgaggactgcactctggcacccagtttgagagcacctttgtctcagcagataattagacctggggctggtccaagcaagcacatgcagaactgcagaggaaagaaccttccctctggagagctcagatgccgaagcagctcagcctaggtttgcaggtggtacattctcccctccccacacacacatgatgatttttgttttatattttatttccttaaaatacattactcttgtattttatttgacaatatcatacatgtctgtctataatgtatcttggtcatttttgccccaattaccacctctcccattcccactgcgcccttcttcccaaaaaattctcctgattttgtatcttttgtgttttgctgctggtggtggtggtggtggtggtggtggtggtggtggtggtggtggtgtgtgtgtgtctcccactgagtttaattaaggctacttggataagcctaggtgaggactgtttattgtagcatgggcagaccctactaatggctacacaataaagaatgtgattctccttccccacagcaagcagcaacagccagtagttccttgggtcaccaggtgacctcatgccctcctcccactacccctaggatggaaagttggctggtttgatcttacaagtgtctcgtgcaggtaatcacagccatccatgaggtaggtcaccactgtggtgcgcttgtcctgcctaagagacagcgtctcagagcacccctcgccctcatctggcctgtacgttctttccattcctgtccccctgccttcagtgcaccaccgaggactgccccttttagggctgacctgttcacataacagtgtgaactgactggaaaagagtgcctcttcagttctgccacccacgggcctggccagtgtgcgtcccagcaatgctgctgctagagcactcgagggagagctttatgttggccggctcccttctgggcttcctgggaactcagcttttgtcaggaccctttgcctgtgctggccttcttcttccttaaggccttcacttgaaggcctggccaactgttttagtcagacagcctcttctcatatttctatattaaatcctgagagacattcatctcggtgtgacaggctccggtcatttattttcctctcactccattccttgtatccaagttgggatctgtgattggcagtgcctctgtagactggagatagtgatttcccacaggaacatgctggtctcattaaattagcacctagaggccttaaggacgtttatatactaaatctgatagggtgggcccagaagaaaaaaattaatactttatgtgcctacttgaggttctgtcttcatgttatgtaactgccctggttttgtgacttggccactgtttctaggttatgtgtaatggcttctaacaatagttgtaaagacaatggggggcttcggagatggtgccatcacacaggcatgaggaccggagttcagtccctaaaactcacataaaagtgggtgtaggtatggtgggcacatttgtaatctcaatgctgaagaagagagactggaggatccccagggcttgctggccagacagactaccataatcagtgagccccgggttctaatgagagaccctgcttcacaggaaaagagtgaacaacccctgatcgacatttagagttgttctatgactgctactcatgtgcgtacatgtctacccagacacacactcgcactcacacacacacaaacacattaaaaagaagcagaacatggatcagggagagtggatggttggtccatgaggagtgcctcagaaggtcacttgcacactactgtatgtccagaggacagcagacagcagtgagagacagggacatcgtcctgtagactaactgtgggtgcttctctgtaagctgaactgtcacatacaggcgagtgtgtttcggggttagtggccctgattctcttgtctgttcctgctggcttcagtgctttgactgccaggagtttttcgattacatgtacatgctaggagtgtgtgtacacaccgtggcatacacacctgggcgactcccatggagggcagtaagacagcttacagaagtctgttctctcctcccgtcatgtgggtcagaggatcaaactcaggttgtcaggcttggtgacaggcttacctgcttagctacctgtctagcctgcttgtgagttgtgactgtggattcaccatatttcactaaaaactttctgtggaagtttttggaggcagaaggtttcagctctgtccttcctgggaggatctcgtcttgtttcttgggcactcgggtacacctcaacactggtctgttttagagtcctgactggcaggtgttttctgttgggttttgagacagagtctcacggagctcagtctggcttccactcagtctgtatgtgaggatgatctgacctcctgatcttcctgcctgtgcctcccaagtgctggggttgcaggtgtgcacacttgactcctggctggcagttttatgggcatgcagggagcactatggatttagatggcagaactccaagaagctagccaaattttattgtgtaccttttccttttacactgaagccaaggctaatgtggagtctttattgatcaactgtaaaaatcaaagctagacattacaaggttttggaaaataccctgaaggaagtaagccatcttccgtgagggcacgtgcctttggagtcccacattcacttacattttggcctctcggatttgcatcgcgtcttcctagctcatagctgtggtttgttgtctgtttgcttggtttcaattggaggctcacaagatgtcggaaaacctaagttccattgatgactgtggagcgcttcgacccccatgtaaggtgggctgcagggtcctccctttctcatcctggagactagattgtggccggaagggactaatgggggagggggttcctagactagaagaaagttagaagtggggatgtagctgaggggtagagcacttcgctcacactgggtttgatcttcagtgctgaaaaatgggaaacagggatgcaggctagcacataggtaaccttcaggggctccttcgattctgacaggataccaatgtaggaaatgtaatcatttcttatttctcttgggtgtttaatattttgaactagactgctgccatcaagtgacatttaaagccatctcccctaagaacaggtgtcatttctgtctgtcatattagaaaacatgagctctgcagccgagcctgttaatccactctgtggttttacaggcacgttcttaatctgcaattgttgaacaaaatgagatcagcatattaacccttgctcctggtggggacacagggcgtgtttgtcgatgctcagccttttcagaacagatgttgtattttataaacagactgttaagataccaaggacttaaaatgttcccatggagggttggctgtcaagccccatcttgtcttcgccatcttaccaactttgcaccattgttaaaggtgtggtgtatcttggtcctcttcagcctgttctcctgctgtagctttcagtcagccagtgtcagatgagctaggctgttttaagggcctgttttctgccttcagtctgggttctcctggctgttagaaagataatttgggagaaacaaaaatttagagtgtataatacaaagtatgtttgaaaagcaatgagactaggttaagaacatcttcactatagctctaggataaactgctttgttgaaaggcttcccatctggaccagcggcttcctgaagcaccacttcacttagactagagaaaagggtcaacatggagatagaagtcaggatcctgagttagttaacgtgaaggaacactttataaatgaaagtttaagaaactgcaggggctgcagggatggctcggtgggtaaggtgcttaccacacagcatgaagacctgggttcagatccccaccatccatttaaaaagtgggatgcagccgcacatctgtaatcccatccaggaagatggagactgtaagatcctctggggctgcatgtatacgttcacttagtacgagcagaaagattttgaaagcccttgtttcctggaacatattgtaataaagatagaacagatttgaaaagacttaagggttcttcctgtgcgcatgcattttctatttatatgattctcagtgagagagtggattggagagagaaaattttcattcttcctaaaacccttggtggggtctgtcaactcatttgcttcccaaacaataggtccattgttgagttccaggaactgagaagattaccaagtgtaatagtcaaggttgtctaaggagcagaactctgtgtgtgtgtgtgtgtgtgtgtgtgtgtacaagatttgttagagtggcttataggctaccatggctgtcttcaagtggaaagtccaagaatcgaatactgttcagtctatggggataaatgtctcagctggtcttcaacttacatcagaatcccaaagaagtagacttgaataccagtgaaggaatgcctcggcagcaggatagatgaacttgccagcaagagtaaggacaaataggcaaaagctttctttttccatgtcctttatataagctgccaccagaaagtgtgacccccaaattatctaatcaagagaaacccttcacaggtgtgcccagccatttgggttttagttaaatccaaagcaagttgataaccaagaataactgtcacaagtgaactagaagaccctttggatgaagaaatatttctcaacacatttagtttcagcaccctgttcaaagattcctaaaattttctgaagactggggaacttgtggattgatttgtttatggataataatcaatgtattccatgtcaacattagagcaacgatgtcacatgtaacatctagggaattacactgcacagacatgacaaaatgcgtgtggagattgcaggtaccaccttagtgtttatgagtcctataaaaagaagttaagagagcctctccaggcttgctcaaaattcagctatgggtgaggaaaacaagaggagagacagacagacagaaagagacagagagagaccaaatagtttgaaaaatcctttttctggaaatcaaaatatctactggtctccttcaagaaagacttgtaagtaaatattagagatatggcttggaatagctgcatgtgagctgcatgtactaaaaaagaagctgagaaaaaggcagtttttattccagagactgactataaaagctgttgatgggagggagaagggttgtgaatttgagaccagttacctgggttacagagtgggatattgtgcgtgtgtgcatatgcatgcacagacacacacgcacgcgcacacggacagacagacagacagatgtgactcagttggtggaatgcttgcttttgcttggtctccagccctgcatacaccaagcatggttctgcacttttgtgaccccagcacttgagaggtggagccttgagggcatgctcagctgcaatgctagttctagggcagcctgggcaaacagagccacactgtactgagggggtggggggcagggatgggaaatgaattattccaaacaaaacagcaggcttgtgtaattctgatagtgatggcaaacgtcctcgggctgtgcctgtgctgttttggagggcagggtcaggggttaggttggatattaaaatctcattcggaaatgaggtgcaagctacaaacagggccaaatgaatcatactgttgaggatgggccagtcaaagcgggtaaggtacggtgagttcgttgtaactctggctttgaagtgacttggactagggatccctcctacattttttttcttctaccgtcaagtagttcagaaagagtttatccttcaccaggctataggttgtaccttgatgtaggcaaaattaatcttaaaatgttaattcccgttccagaaatccagcaagctgagtgtcttagtgtcggtcttattacatcatttgagccaatcaatcttccccctcacaagtgtgcctgggggttgcctgtgaggtgattccagagcttgccaacttgacagtggatactaaccgtcactcgagcatgttagtgggcggggcgttttctgaagtgctgggttgtgatacctgatgtttagtttctttttttttttttattgtatgtgcatgtacacgcatgtgcatgaaggtgctctcaaaggccagagccatcagagctttccaagtagaagttcacaatggttgttagctgccaggaacaatcgtgctagaaactgaactctggtcctccgaaagcagtgtatatatactcttacctgctgggctgtctatccggctccaagggttttctatttcctttctggcctgtcagcctctagtatacagaatgttaatcttggctcttcactgtggtcttacccagcacactctttccaaactccagagtcattaaacagaaaggcaaatttaaaaaaacaaaacaaaacaaaaaaaaacccaaactcttcattatctcttaatggtgttactagcagaggtgggggagcatgcatgtgagtcagaggacaacatttggggtaggttctctccctccactatgatgggcctgggggttgttctccagcccttgccaccatctttgcatcgttccttagtagtagtcagtacctgttaggaaatgtcagtcctttaccccgtgacactcactacccagaaatctctcctttgcctgcctccagttcttaagcctgtgtgtgcttggccttctcgtccccatctcacgtgtccagctgtagaaatttaccacctgccttctctggcaacttactccttttgggatgaagcaggaaatagttgagagagtggcctgcggaacggggagagataagtgggcggacttgctgcttatcatatatacgtgctcggaaatgactagactttgcaactttatgtttataaaactttaatgaaaatgaatcagtttataggttattccatttttcattacacttatttacatttgggtgtgtgtctgtgtgtatgtacatatctatgttttcacatgtaccatcccatacatgtggcgatcagaggacaacctgtacctataagagtctccttctgcctaagttttgggggattattaggtgtggtggcaagtgcttatatctactcagccatctctctagctccagcttataactgcatgattccaggtgttcttatgaagaaatcgctaagagccctgagtccccctctcaggaccctctgttgcctggataattcatcatgaccttagctgggcagcctgcacccatgctctctcccttcctccaaagcacaggctgcctcagtttctgtcagacttttcctgtctagattttggtcctgagcaggacattgtagataccctggatggctgtgactggctgcccagaactgtcttgcttacactgagtagggatagacaacctgaatagaaatgagttcattgtctgctttgggttttcctacagcagtctgagctgtccgctgaagaaagtccagagaagttaggaacctcccagctgcatcagcggaaagtcatttccttgaataagcagattctgcagaagagcaaacatctggaagaggtgagtgtctttctacttccactccaggtagtgaccgttcttccaagagaggagaagttggtcaggagataccgaatgagagagagccttgtggtaaactggtcaaaggaggctctggtgcaggcatgctacaggcgtcagtccatctagctgcatgtacttttgtaaagtgtgtgtgtgtgtgtgtgtgtgtgtgtgtgtgtgtgtatgtgtgtggcaggtatgtgggggtacttgtgtatgggtgtgcatatgtgaacctgatggatatgtagacgccagccttccttgatcactgtccactttatttactgagacaaggcctctctgaaccgttttgactagtctagcaagctgttgccagggttattccttgtctctgcctcctaagctctggaattaaaggtaagctaccacactgacacctagcttttcacatgggttctagagagccagtcttcagttttcagccttgcatagtaggcgcttttcccctaagctctctgcatccccatgaataaagtttcactggaacagctaagcactcacctacttgcctgtttttctgtgattgctttcaagctactgtagcagagttgaacagtggtaacagagaccaaatggcccacagacataaactaggtactgcttggcccttgataggaaaggcttattaactcggatcacagaagtacagagcaaggcaggaaagatggattagcctccactggctctttttgcacttgcagaggacatgtattctaactcccatcacccacacttgctgctcacagctggctgtaacttcaggggcctgacaccctttattgcctctgcgggaacctgcatgtgtgcacaagcatgctagtgtgcccgtgcatacacacagacacacatgtgaaaatatacaggaccaaaatggtatttctttgctcatgtgtagtattgtgtatgttaaatgctaagcaaaattacagaagtgagtgaacagtgggccagggccttgcctgccaggaccctaaggtgtaatggagacttgcggtgaatgaaacagccatcacactgccactcagttacagttgcggtgacatggtaactgctaaggggaagtctgggatgctgggactaatagagctaatggagcccaaggtcatggctgactgcatctggagagataaatgggcactggctgaatggaaggcctgtgtggagctgttgaggagcctggtggggatgtataaagcaacgctggcaaaggcgaagggagggagagttggccggttcttttctgatggttgagaagttgagtgactgtgcaagcatcaggccctagtaagttcagttccccaggtccagatggaaagcctcggcattgctgtatgcacccataatcctcctcgtgccaaggccatgctccacgctggtttccgggtgtggcttattttctcttctctgcagcctaagacatagctcactggtagactgttggtcatgcatggaaccctagcttaactccctagcactggaataagtaaaagtggataaaaatgaaagtccttctgtgtaagtctgttttaagccgatctgggtttccactttctcattgtaaaagaggggtcccatcgaagtctgtactgagtaaaggactccattcaagcagatgtcctttttctctcactcacagctgcaagcgaatcataccagcctcaaagccaagtacagcgacaggaagaagacactgacagaggtaagcagacctcccccaccacacccccaacacacctgcactgtgacctcagggccctcagtcaccactcacatacatgctgatagcacatgacactcatgaagacagccccaaagccactccaggaaagctggacactagctggctgtcacattagcagcatgggctaccagctctagcgtatataggtgtatcacccacaagcctaccagtcacaactcagactccctagatggaagggtaattccctttgaacgagcactgtctttccagatctctgtgggcggccaaacattgtatctaaagtgtatattgctctgtagtatttctctagtcagaattcatttataaattggttcactgttttttacctgtgctccattgtttgtgtactctgggttttgtgttcatctggtttaatgtttcctctcgctatctctctatactactgtctattcttcccagtttcttggtctgttactgacaaaacccctgacaggaagcagcttgaggaggggaggcgttagtttggctggcagttcgaggatgtaatcagttgtggtagagaagttgagacagcaggaactgtctgagttgagcagctggtcacacctcacccagccaggcgacaggcagatgactgccagtgctcagctcaggttctcctctttctgtagtccaggtcaccagccttgggggtggtgcctcccacgtacagggtaggccttcccagctcagtgaacctcctgagaaactcacaggcttgcccagaggctaacctggcctggctaatccattacacgtgtgcccagagcttgtctcatgagtgattctagatcctggcaagttgacagtcagtattagccatcacgacagcttgcctccattgttctgcagaagggtgctgccttctgtgtggtagatcagctgacggtaagagctactcagagctgggaaacttcccattctctctgctgttgccagcaatctggggctctcagatgctctcctctgggtaacggtctgtcttcggtgctctgtcaacccagcctcgctcccctaatacaggccgtagccctacaagccattcttcccacctgtgctggctagcactccatacctgactcccgtctgttccctgtgagttaagccacctccgggttccagcatcatagcctggattatttggagacttggagtgagagggtttgatgagacacctgaccgcactactgccattttcagctagggatttttttaaacctgtgttttgtttgaatgagtcacatattcacacagttcacaaaaacctcacaaaacacaaaaagtgaatgcctgtaacccaccatctgtctactcactccagggtaataaaagcacagccagtattttctggatctttcaagaactgttttggttttatagcaattataccctacatacttgtgcacggtccctctttataattttgtttgtttgtttgtttgtttgtttagcgtgtgttgggggtgctgttaagtgtgccacagcacttatgtggaggtcagaggacaacttgtgggagttgattctcttccaccatgtggattccaggacctggagtcagattatcgggctgttactgagtcatctcatcagcccacatctgcgtactttatctgctttaggagtttgccatggtcatggttttatactttgctctctagatcattgtaaaaggtgtactttacaatagaaggggcggagagatggctcaggggtcaagtgcctgctgcataaagacctatctatgttcagaacctaattgtccaggtaagagcctggcacattgtggcacctgggaccccagcactggggctcactaggcagcgaggatagcgaaaccatgacttctatttcagtgagatatcaggtctcaaaaattaaggtagagaagcaaaactagacgaagacttctctgcatcagcctctgcctccacgtgcacaccaagcacaggcagtgtatccgtacacactcatataccatacacaaaagtatattgctgtacgttaacatctgcattttcttaaagatttgtttcattagtggattcagaaaaccatttgtcttgttagggtttctgttgctatgacaacactgtgatcaaaaagcaagttggggaggaaagggtttattgattttaatttgccattcatcagtgaaggaaattgggacaggaactcaaacagggcagggacctggaggcaggagctggtgcagaggctgtagaggagggctgcttactggcttgctcatcacagtttgcccagcccactttcttatagaaccatcaggccagagatggagccacccacaatgggcagggccctccctcattggtcactaattaagaaaattccctacaggcctgcttacagcctgatcttacagagacattttctcaactgaggctccttcctctgatgactccagcttgtgtcaagttgacacaaattcagccagtacaccactcaagaggctgggaagtttcagccctgccatactctcccactctctctcattcttcctttccccctctctcttccccctctgtgtgtgtgtgtgtgtgtgtgtttatacccacccgctttcctgctccaaggctgtttgttttccctcctctgtctgctgcactgtgaggtcatcaccagtgtctccaaagccggagcagcatttagtgggttttgactctgacctccctggcaccttccctctaacccatctgtctggcccatctattttctcagtgtgcaaccagatccagtgggctcagtcatctatccaaaatgagcgaggaagccgggtggttcgtggagcacaccctcctgtttgcttttaagtcttcatagctaatggtgaacctgctctctcttgcagttgaaggatcatggtgagaaactagacaaagagcaggcagccctggagaaattagaagccaaagccgacccaaggtaaggctttctgcatgtgccaccatctttttgaggaaactggctgcagtgtctgatgcttgttttgtctgatcaagggacagaatagccagaggtcatgggctggtgctccatttccattcagttaatgtcacgtgaccaacagggaccagcagtcaccttgatggtcactgagctatttgggctgcactgagccacccgcctctcttccagccctccctgtggtcagagctcttctggtgttctgactttaaaaacaatgagacaaggctgggggcttagtaggcaaggtgcttgctttttaagcatgagagtcttaagtttgatgtcccagatccagcctgcaaatgctgggcctggtggtatacccttttgatcctagagccagagaggcaaaggcaaggctcctgacactcgctggccaggcaggcaggctacttggcatgtttcaagccaccgagagcacaggaggaaccagcttctgcatggagaagagtgcttactgtgtatgaagcctgatgggccaggttcactcccacaagttgtcctcagactgccacacatgctgcatgagcacactcactcacacaagataaataattagatgtaaaaacaggtcttagttaaaagaaaatcagaggcttgcacctgaagaacaacagttgagattatcttctagcctacatacatgcatatgcacagacacatgcaattgcatgagcgtgcatgcacgcacacacacacgtgtacacatacatatacacacacaaacacacatttttttggtaccatgtttactctgagtactattaaataagtgatatatgaatacaatcaaagttccttgataattccagaattgacattctcactctagaatcctgtgaggtgtatccgtgtgtatgtgtttgtgtgtgtgtgtgtgtgtgtgtgtgtgtgtgtgtgtgtggcttgtctcctcatgggctctagggcccaagtgcatagtcagaaatggaaagtgtgaccatttgtcacagaaattaagaaggagctctgtgtattctcactgtggcttcagcagtgattcatgaagccacatcctaaaggtctgccctgtgccattgtctggtctctcctcagcatgctgcagaacctgagagcacttgtagccatgaatgaaagtctgaaaagccaggagcaggagtttaaggcacactgccgggtaagtgctgggtggtattggtaacaggcaggagggttcttggtttcccttccctgtgacgctgggacacactagccagtgcagtgtcaaaggctgacgtgggctttggaggtgactctgtagataaagtgatttccactcttgcaagcctgggagagttcttttccagaaaggtatgaacttgcaagtgagagcttttgtcttagcacaaactaatgagagaaatgtctgcaccaaatagttaaattgcacagacaaaatggctcaacaggtaatagtgcttgccaccaaggctaggagcctgacttcagtctctgggatgcacacagtagaaagaaaagaactgaatccataggttttcctctgacccctacacataggctaaggtgtgcaatgtgagcattagcacacacacacacacacgcacagacataaatgtaaaaacaagccgctgtggcttaaacagttaccctccagttggtggcttccctgagctttgtaaaggtttaccttgcttttgcaggaggagatggctcggctacaacaggaaattgagaccctgaaagctgagagagcaccaggtgagaaggtaagccttaaattagccctcagtgccatcagccactttctggctggtgtgtggaaggaacctccattcactccagatagagagggcactgctgggtcaaaggaagggttctaagtctggcgaaccaacacaatacgcttattggggtcagttacaggggcgagggtggctcacaggcaactccaaagggagtcctggtgacttaagggcagctgtgccatggagagccccactttagtcagtggttgacctcttatataacctggggagtgggagggtctcatgctcctcatcccagccactctatttaaagatggcaacagctaaggcaagcctggagtaaacagctctcagcaccaaccattaatccttttccaaaaagcactgccactttcctggagctgggcctataaatgtgtattccccagggttggagagatggctcactgggtgggagcatttgctgcacaagcatgagcacctgagttccaatcccctgcacctgtgtaaaaatccgagcttgaggcgctggagagatggcttcatgattaacagcacctactgcgtctctctgttcccattactgagaaaaggtgctgacctcatttccttactttcagatcatctctggtggagagccgcagggtgccctgacctccaccatgactcacaatgtaagtatctccttatccttgaggctggcattgtcccaagagaatgtgtcagcctcctttctgttcttgctttcccagtatcatctgctctgctgcctcctctgtatagtctgctctgctgcctcctctgtatagtctgctctgctgcctcctctgtatagtctgtgttgctgcctcctctgtatagtctgcgctgctgcctcctctgtatagtctgtgctgctgcctcctctgtatagtctgtgttgctgcctcctctatatagtctgcgctgctgcctcctctgtatagtctatgttgctgcctcctctgtatagtctgtgttgctgcctcctctgtatagtctgtgttgctgcctcctctgtatagtctgctctgctgcctcctctgtatagtctgtgttgctgcctcctctgtatagtctgctctgctccctcctctgtatagtctgcgttgctgcctcctctgtatagtctgcgctgctgcctcctctgtatagtctgtgttgctgcctcctctgtatagtctgtgttgctgcctcctctgtatagtctgtgttgctgcctcctctgtatagtctgcgctgctgcctcctctgtatagtctgcgctgctgcctcctctgtatagtctgcgttgctgcctcctctgtatagtctgtgttgctgcctcctctgtatagtctgtgttgctgcctcctctgtatagtctgcgctgctgcctcctctgtatagtctgtgttgctgcctcctctgtatagtctgtgttgctgcctcctctgtatagtctgcgctgctgcctcctctgtatagtctgtgctgctgcctcctctgtatagtctgtgttgctgcctcctctgtatagtctgtgttgctgcctcctctgtatagtctgctctgctgcttcctctgtatagtctgtgctgctgcctcctctgtatagtctgtgctgctgcctcctctgtatagtctgtgttgctgcctcctctgtatagtctgtgttgctgcctcctctgtatagtctgtgttgctgcctcctctgtatagtctgcgctgctgcctcctctgtatagtctgtgttgctgcctcctctgtatagtctgtgttgctgcctcctctgtatagtctgtgctgctgcctcctctgtatagtctgtgttgctgcctcctctgtatagtctgtgttgctgcctcctctgtatagtctgtgttgctgcctcctctgtatagtctgctctgctgcctcctctgtatagtctgtgttgctgcctcctctgtatactctgtgcagccactgcctcttctgctcggttccattttagacacttcactccttaactagaagacacctatgttgaccacatgagcctcaaagggcgaaagagtgatatagagggaaaactgccttctttgctattttatggcaggccactgctctagttggccatactgactgtatcaggtgtatccaacctacagctcaacagttatcaacttacataaaatattatgagggaattttttttgggggggacttgattgcatgttctcaagcacaaaagttgtaagggattatattgtgtcacatgtattataaataaatagacatatatatatatatatatatatatatatatatatatatattagcacaaccctatttatagaaataggcaaagagtcagacatagctcaaaggttatagactttccatggcatactctaagtttgccgaaccctgttatgggttaaaacagtacttatcacatgtaaagagaaaggaagaggataagcgggggaagcagggggcaccaagcagggccttctttaagggtggtcttcaaaacctgtaggagactggacaagggatataggtgatatctgttatatgtcatctatagctgagtcctgtgtaggaacctggatgcatgtgctctgtgtgttctcgtgcatgcgtgtcccttctgtaattttctctgagacaacagaccatccggccatttttctcgtgccttggtctggtgtagaggcacacctgtacattagctctgtccccaagggactttctgtagtgatgaaaatgcttgcataaggatcttcccacacatactgcatggctattggaattgagagactggtttctcttccttattatacttgatgcaagtttaaatgacacaaagggttaccagttataattttggatacctcaggtccagtcagaaacataaacaaaaaccagtgttagctgaaaacactaagatggagaacagactcttatgggagagttgtctcccttttgtagtagggtgttcgagatatgggggctgcaggagcccagaggaggctctcacttaacattgcatttaggggctggtgaggtggctcagcaggttgagtacttgtcctgcaagcctggtaacatgagttcaatcccctgaacccacataagatggaaggcgagaaccaactttacaaggtggtcatcttccctctacaattccttctgtggcacaaatatgctcccccacagtaacaatagatgattggtttcttctggaaagaagattggattcagccaggatcccaataaagggggaggtattaggatatgatgtggaggtatctctcaggtgtgaagtcctcaagttggtcgtttgagagaaggaactcaggctgagagaatatggttagatgttctcaactttcaaagacttcgtcagagaatggaagttccattctagataactctggctggcctgttgtcacttttaggaggacctggacagacggtacaacatggaaaaagagaagctgtacaagatccggttactacaggtgagtatccacaaggaccagggccgaatagatatgcctggctggtatgcatgtcctgtgactgatggagttataggtgtataagagctagcgtggccaggacctgctcactgctcccattgcaaccagacatgctatgatgtaaggagttgctggcagcaacacaagtgtctgttactttcagcattgctagttggagttgaactttaccctgcattcagagtaagtatgattggcatcacaattacaggagttctgcatgttccaagttctgttcccagaactcatgtcagttgcctcacggcccctgtacctctcatctgcagggcatgtgacaccatcttctgaactccacgggtacccacgcccaggcacacatgccctcacacaaacacatacaaatacagatcattaaaaaggtaaatacattttggtggaagcttaagagatggctcagcagttaggagcactggctgctcctccacgtgacccaggttcgattctcagcacccacgtggcagctcacaactatcagtcccagttctggggggtccagcaccctcttccgccttccaggggcactaggcacccacaggcatacatatacatgcaagcaaaacccccatacagcataaagtgataaaaaacaactttcagtaggttgtttctccaaaggcaagcctcaggtaggtcccagaagcaggattgaagttcaggtctacttactaactagagagttgagagcatagcttcacaaacggggtggggagatggtgaagccagctccaaacctaagcacagtcagtacttcgtttctgagtccgttttgtattgccagtgcctggctcatggagattcaaacccacaaatgacccttggccttgtattacatgtcggtttgggtcactttcttttcttttgtctgtgttcctgggaagctaagctttggtaggaatggccaaagggctccatgggcctatgagaggttattatcatctttctggctcttaattattttgtgagatatccatatcatattcaaatgagtcagatatgtccttgatataagagcactattcttacttttagtgtttcaagtgttatagctcaagctggcctcaaactgtatgtgtagcttgggctggccttgaacttctgataaacctgcctccctctcccaagtgctgggattatagatatgcaccaccatgcatgactacctttcaaatatttaaagatggcttctcagccttcagcaaaaccaagtgcaaatatttaaaggtacatagaattaatacaatctgggccctactgctgtttggagaccctgactgataatgtatcaggtcccagtaacaggaactggaagacttgccctctgggacctggttatttgaggaccaagatctgcacatatatgccaaactacaaggctgtttgtgtggggaatgcactactagggagaggctgagaccaaactagaagatacaaggaaaccaatggcttgctgagggcctggcctgggagaggcagcaggatctgtgagtggagggggcaggggaaagtgagggctgcatctcatggaatttggtgatgctggatgagaggaagagggagatcaaggttatgtggaggtcactgggaaacgggcggggacatgaatggcagtctgaagaaagtgtaagtaaaagctctgctggtctggactgggttctctggaagacagctcagcagtttaaaaagcatttgccttgcaagtgtgcggaccagagatcgcatcccttgaagccccataaattccaagtgcacctagtggcccacctggaattctaccctcagggagacaagaaggtctccagagcaagctggctagcaagagctccaggtgtgactgagagacagacccggcctcagtggatacggtggaagaatgacatagggtgatgcctgccatcaactttaggctgtcatgtgtacatgtgtatgtgtacacaaggccccccccacacacatacacacacatatgaacaccacgttgcacacatgaaaacttgagggggcagtaaccattaggtagcattgtgggaagaatgattggtgtcagctccaactcaaaagagtttgggctggaaaacagtctgtagtggggatggtaactaaggctgtgggcatgtgggcaagaccccaaactaaaccctagtgagcaatcaagcaagaacgagagagagagggtgatgggagaggcgctcaggctgctcacaggtgagcggacagcttgggttgccgtcaaacatcagtatgatagattttgctttattgtatttattgttgtcaggattggctttatctcttagaagcccgtttttttctaaggagagagagaaagggtgggtccagaggggagggggaataatcagtcgggatggattatttaagaaaataatctgagtccaatgtggcaagtggctgagaactgaaggatctagaaactcagattcctccattcacccatgccccagaaagcttccagagtgagacttttcctgtcaagacatgagaagcatactccagtgactgcagttagggaactcacggcgatcaaagtccttggtgaagcagtgagttcttactgcagttatttctgaccctacctttggtgaggactgacttacacagagcaggggtaactcaccaaaaagccctctgtaacacaagtgacaactcatgaaagtgcaaccctgaagcccctgtaccatttgcaggccgctagacaggtggcagtctccttgaagtggttgctaggcagcatcatggctggtcagtggcctctcccagcagttgtttgctgcttccttggggagggacccagtgagccttgtaaatttcccagatcatggtttgttttcttcctgagtctcctgagccctgggccacagtctaccccaattcttcctggcaggagtcttctaactgggagggaactgggatacagcatttgtcaagcagagagaggctgaggcttgaaggacggaggcactaagcaggcctggctgtcagggcaggaggctggaggctgaatggtggggagacagctcagcaaagacttgagcaaatgtaagtgctgatgaacagcgaatgttcacacgttgtccacaggcaccctcacacatgcaggacattctagaaacaaagacacagtcacaaagtatagcatgagtgctggtgtgagacagcccccagggtaaagatgtgtgctgtgcagggcacaggaccaggttcactttctctgcccattaaagaattagaaagcaggagagcaaggtcactagaaggctcggggagtccagcagagccatcgtgtgatgctagggaaaatggagttttctcgtggggtacttggcttcattaataaaagaaattatgaacagactcaaacagaagctcaaggacaatttattaattagagtttaaaaggcaaaccccaaggcaggcgggctgtgaatcagagttgcccaggaggagagtgaagataaacgtggaggcacacagtagggagggagctcagaaaatgagcgaaaggccaagggcattcgtttgcgattttaaaagtgtagtcaggctcttgccagcattacaaaggaaaggacaaagaaaagaaaaccaaccgagtagttaacactcttctgagccttgactcaggaaggcaggcagtcccctggcctggtccctgtcctgtcttgctggactaacccttaagggagcagacaagggcatgtctccacctagaggtggattccgtcctttacagccaagcttgattcctggacccacatggtgggaggggagaacgcccacaaattgtcctctgagttctaccacccattgtggcatatgccaggaagtaagcaagcaagcaagcacatgcagctttacacactttaaacatcagatggttgtaccttaagattcccatgaagaaactcgaggtcagccccgccactcagaaggagagagatgagagagaggctgctgagagagaagcaagaccccggactggtagggcacagacaggaagaacgaaggctcaagaaaatggcagtgctcagcccaggtcctgagatctgcatatagccgtggtgtggaagctaagtggtgtggtcctcatgaaacatcctgctgcctcctaaatacctgacaggacagtctggtccctttgaaaggctttgagaaactagtaggcttctaagtagaggaattcagaatacattttggataggcagcaggatggcacctgtcatctgggactccttacactgcctgtcctctggtcagtcacgattccatgtgaggacctcaggccagtacaggaatgtgtgtctttgtggctggctcagctgtgaggagcagacaaatatagcctttgaccaagtgttctctcctgtccctttgcatttaggcacgaagaaatcgagaaatagcaattttgcatcgcaagattgacgaagtgcccagtcgagcagagctgatacagtatcagaagcgatttattgaactctaccgtcagagtaggtgcattgatcaaacacacagactcttgggctttgtgagggatgggagggaaggggcttcgtgcagtttagcgcaatgtagcattggtcagagcgcagtccacaagggccacattgaaaaggaccttacgggggctggcaagatggctcagcagttaagagcactgactgctcttccagaggtcctgagttcaaatcccagcaaccacatggtggctcacagccatctgtaacgaaatctaatgccctcttctggagtatctgaggacagctacagtgtacttacataattaaatgaataaatctttaaaaaagaaaaaaagaaaaggaccttacttcatctctgggcttgctgaacagccctgggagatgactcgtggtctctgtttgctctgtagatggactcgggaccttgagagccagcactggccagctctcatggtggttagccgcgtgcagtcacctgagccccctcttctttccagcttcttgtgaagcatccccaccccagcatctcctggtggcccgtggtcgtgctccacagagtctcactagcgttgctttagagcatcgtgttctctccataatccaggacctgcctcacctcagcctactgcacagtcactgcagcatatcaggctcaaagcttaaaaaatattaatattctgtatatattaattaatgctggaaattaatacagtggcagttattctgagaccttttaatatttcttagctaggcagactctcgcttagctcatttaagttaacctgaccacctagccccatccagtcacatgactagctatacctttcagacccgtcggcacatgtgactttcttcttcacagagttcctttccccctcccaagaagtcccaccttcctctctctcttctgcccagtcacaggctttagccttttattggccaattaacttagggagcaaggtttacacaacaaaagctggtatacatgagaatttggtcatcttgggggcagccatatcttggggtacagaccaaccccaacagaaagccactctcagggtcaaggaagatggtccctctaattaaagtgctgcttgacaggattgaggccctgaatttgatctcaagcacaagaaacatattgttgttgtttgtttgtctatttttaaaggctggcaatatggctcagttgtttagtgtatatgtttgcagaggacccaggttaaattcctagcagccacatgacagctcacagatgcccataactccagttccaggagatccaacacccaccatgggtcccaggcacacatgttgtgcatatacattcatgctggcaaagcaaccatacatgttttttaataggccaggtgtaggtacacacactggagacagctagatccctgaggcgcactgaacacccagacgagcttagtaagtgagctctgggttcactgaaagagcttgtctcaaaagataaggtgaagagggattcagaaagatagccactgccgacctctgacctctgaatgcacatgtgcacacgtacaagcacacatgcacagagacacaggcttccgtgacgactaagtgtgcatatagccctgggcacatgccgcatggggttgcgatgctgtggttcactgatgctctgacatgatgctgatctctctgtattggcagtttccgcagtgcacaaggaaaccaagcagttcttcactttgtacaataccctggatgacaaaaaggtttacctggagaaggaggtaagagcctttgtctgcttatttctttcttttcgtattccatttaaaattttactgtggaggggaggcgttgtgcatatgtggaggtcagagcacagctagtgggacttggttctctccttacaccgtgtgagctccaggaacagaactcaggtcttcaggcttagcggcaagcacctttgtacttaagacttcacactggcctgaggaagagcctttatggaaagaagataacttagatgagccactgacagcatggtagctccagaagattcagatggacctagagcctgagacggagtgtctagtagaagtagagagtgactgccttcctgtgccaagcactggggactgtcactgcaaagcagtgggagctctctgcagtgaactaaagctggtgtttacccattctgtagtatcatgtgagaaacaccagcttgaggtgctgggaagatggctcagtacgtaaagtgcttgccttccagacacgagggcctgacttcaatggccagaacccacattaaaaaaacaaaacacaacaccaccaaaacctggcatggtactgtgcttgtaatgccaggactgggtgggcagagacagatagaccactggggaccgctgccctaaccccagcctagcctcctggatgagcttggatcagtgatagaccctgtcttaaagagcaaggtggacagcctcatgaggaatggcagctgaggttgtcttctggcttccacacgcaagtgcacattcaaacgcaaagtccagggatagtaactgcttacagatgagccaacaggtatatggagtacagccaggggacctgcagacagagcccttcccagcatgtctcacaaggtcagatggatgctctagctctgagggcaggggcagtttccatggaaacaggaccatgaagattgtgttttatcagaaactctcaggaccactcagcagctggccaagatggtgactcagtgtgggagtggagcagtggagaataggcactatcttctctgtctccaccctactggcccaccctggactgatagcctcaaaagagagtgatgtttgggaagaccaattgatccctgctggcagtttgtccaaaaagtcctgccactagagtcccctttaaaaagccatctttcctcattctcgttgtcatgcattctagggaaaaatgattttctttaagtagatgggtcgattctctgaggaaaactatgcagggaagaacatgctgttctttcctttgttctgtcgagtgtcactttgacctgctcgacaagatgtgtctccccttcagtggcatcgtcccagcccaaggcaaactctcccgcaaggatcagaatagtgcggggaccttttagctttctacttacatggttccttttcactcccccagattagcctgctgaactctattcacgagaacttctcacagtaagtactggctgccctcctccccggctgccctcctggtctggctgaggagtgactgggaatgtggtgtgcacacaaggtctggcactgggacatgagtcttactttccctatccactaagggtaaacatgccttagtggaaaggtctgcaaattgcagtgctacgggtaaagagcctgacttgctccgtcccagagccctcagaaggaaaatcaagtgtagtgtcatgactgtagtcccagagctgggggactggagacaggcggatccctagggttcagggtccagccaacctattctacttggtagcttccaggccattgagatagcctaggggagacttaaggccccagagagtggggaggtctgagggggagggggctgtcctctgggagatgggagaggaggtatgggatgaggaacagtcagagggcagaccaggagggggataaaagcaggactgtgaaaaaggattaaaggggggggggaaaggtaccttctaccttcctgaggaacaattctttaaggtctattttgtcaattaacattcatcctccacactggggatttagctcagaggtgagtgcttgtgtagactcatgaagccctgggctcagttccccagcactgcataaactgacttcttggtgtatgcatgggattccagcacttgggagggaagataggagaatcaagagttgtttaaggtcactttgactacaaaaattttttcaagtctagcctaggctacatgagattctaccataaaataaattgtataggaagaccatctgtataagtcagatagcaagggaaccaagcaatactagctctggagtgtgttcatggtaagctagccttacccaccttgctggcatcccaaggctcgctcccagaatagcatgcttccttttgctagcacaagcctctgctggcccctgacagctgactagaaacattttaaagccaagttcatgggctctagactttttacatctttttttttttttaaacacagtagggctaagccgttctccattgagcctgaagctgaattcaatctgcaagacccatggctcacacacatgcaaacacacacaggcagacagacagacagacagacacacacacacacacacacacacacacacacacacacacacacacacagtgtttgtaaaacaaaattctaaaggtttgaatttaccaaatgaagactcaggagccagacgccatggtgaaagcctgctagcccagagaggcagagaaagcacccagctgaccttcctcctcaactgatagaccagaaggaaaaaacctgttctccatccaactgcatgtccctcctttctacttcctgtgtgtctctctatccatcctcctgacttcctctcactctctatggtttgttttccctttatttactccctgtcagctgggtgcttgctccacctctccacctatggttgacttttttcagtctcatttacagtaaacagaaagctcttggattaacggtgtgtgataggactgagccacaccataacaagaaatagttctttccagtaaacaatctcggggttctcagtatgatcagatatgctgcaacggacatcacacacacacacacacacacacacacacacacacacacacacacacacactcacacacactctctctcacacacacactcactgggaggttcgggggtggcacctgcctttgtgtcctgttgcccctgtcagactggagggctgaattcctgataaccacagcagagttctgctctgtcagcccactctctgaatagttctccacctgtgagtgccaagctctgagccttctggcttccgtccctctgcgaaactgggtatgggtaggaaggtatagcaggcacaccaggaaatctaccccttctactgcccccagcaaagttccggattctcagctcagatctgggagtactcagaacatgtgctctaatcccaggcaatgtccccctgtcctcggagtcttaaaaaacaaaactaagttaatttcttttttttttttaactaagttaatttcttaagtggtacatgccatagtttgtggaaaatggcattcatattctttttattcacatttgatgttgaggaaatatagtttggttgaaagttacaaggaagaagctgagcgatcctcggaaggcagcactttgaagttgcctgtgtgcgtaccgtagcactgctgaaagagtacacacatgcctgtccagattagaggagcagcgtgttctcacctgcgtagttttcctcagaatccctttccgtctagtcagagatgttccttacgcagcccattgccacaggaacgcagagaacaggattcacattcggttatcaatcagatcagaggtttggaatcctgactgcttggtattcttggtggctccctcaacccactgtgccctgcaaaggtctagttgactgttgtgacacattctaggtacagggctgactccttggtgtcccccacccccttcctaactgaacaacgtgctggacctacctctgctgatttttctttcagagccatggcctcccctgctgcccgggaccagtttttaaggcagatggaacagatcgtcgaaggcattaaacaaagcaggatgaaggtcagcaggcttcctttacagcagtacagagagtgtggtgaggagtcctgggcagaggctcttcatccagagagcatcctgcattgccacaccagccatgagacctggtggggtaggcctccacattgctactggttatagctcccaggcaccgagcactcctctgcgtcagatactgtgctgctcccccatattaagtgagcggtactgcccctgccttacagataaagaactgttcctcccagcagccctcctctcttgtctagccacctctccctgggcatttatctcatgacatgtcacagggtgtggtgcttaggatcttgatgctggggagagaacctggcacttagtggccagccagcctaacctgcttagccagttctagaccagatagagaccgggtctcaaaaagacaaggtgaggaataacagccaagtttatcccctggccttacttacacacacgcacatagacacatgcacatatatacatgcaggctgaacctgctctatacatgagcattttctgccttcatctcctggctggctgaccctacatttagcttcagaaaataactgcacatagcacctggttctgtgagttgcccctcctttcagccctctgcatcacagagtccacatgcctttaccatctccaactccattctgttttcctcaacactgatgctgctgatcactctaatgcgcatttgttcactcttcagacacttggctggttagttggttggttggttgactggtttggtttggtactgatctccagggatgtgtcctgtgagaacaaagactttacttgttcactgctaaccttaggtctctgtaggtgttccattactctttaccaagtgtacagaggatccgagcttagtccctagagccctgagaaaatacttagtgtagtggtgctggtgcatgcttgtagtccctgtgctgaggactggaacatagaaacatccctggagcttgatggccagccagtctgggggtatttggcaagtttcaggccagtgagaacccttgtctctataacaggatgggccaactaggtggcttactgggtagaggcactgtaagacccccgaagctggacctcccgggatgagctggccagcaccccaatgactcgagagaaaaccacacctgatgcaaactgcaagaggttttattatcagctagctgaggacgaactccttccaccgtgcagggcaggggagttcgaccccaagcggtgacagtagggggcttttaacagcttgctgaggaattgggaggagttgggaggagtgttcttctctgcctgggtgtccttggtaaaattacaattatctggatgtaaggctcagaaacaaaaaggctttttgctagctatagagaacaaaaagcttctttctggctgtattcttagagatcagggaaaacaagcttgggggaatgtctaggggctttaccttctagggagaaacactctaagtcggggtctcacagcacatgacagaaggagaaaatcagctcccacaggtcttcctccagcttgtggctaccacagaaaatctcttaaagtcaacattttagtgtctgtgtataagatcagtatcctggaaacactctataacagtttagatagctatagatagcttacactatggcacagttaataaatgaaaggtagtaagctatgctattataaacacaatatatacaacagggctactcacacaattgacatcctgggctagatatccctttgccttatggccgtcctgaaccctttagggtggtgagcagcctctccttgccagtgacaccaacaactctccttctttggagttgtgacactccaaaccccttgcagatactcacaagtaccctctagagacaaagtggtccacagtcaagaatcctccccaaaatgcatgctgttcatctggcgttctgtaaatagcgaactgctgattagattatagagcctgcagatgatttcattcagaaaggaaacaggacaacccgaggaaatatgtttagaagaaaccgatacaaacgttaatcatggctgcctgttgtggccctgtcagaatgcctcttcctccaccaccatttcttcaaatgtttccaacagatggaaaagaagaagcaggagaacaagatgaggagggaccagttgaacgatcagtacttggagctcctggaaaagcagaggctctacttcaagactgtgaaagagttcaaagaggtgagcggatgtggtgtgggccgaaatcaaatgcatgttcagctcacctcaaggtgcccctaagcctggagctggggctgctgagatggctttgccaggaaggtcgtgctgtaaaatcgggagtacttgagtttgatcctcagaactaacaagaggaaaataaaaaataaaaaaacaacgggatggtgcccacttgagtcccagctctggggaggagggggaggctggaggacctctgggcttcttggccaacccacccagcctactacagcatgagcaagatggcttagcgagtaaaggtgctttctaccaagcttgatgactgggtccaatacccagtacccacatggtagaaagggagacccaagccccacaagttcccctctgacctctgtggcaggcatatatgtacacacaaagtagataaatagaaatacaattttaaaaagaagcaaggtagagcatgcctgaagaacagcagctaagcctgacttctgccctccataggcacacatgcatatgtgtgcatgagcatacacacacacacacacacacacacacacacacacacacacacacacgaacgaataaaaagagaatgtcccatgccaatggttttgttctgatttagttttgaagattatgctgtcttccaccttctctggctgctctgccctctgttttgtgatctaacatttggcagccatatgcatgcctacaggcatggcagcaagtctcctcttttcaaatgttctcccagctctgactgcctgtggcgtaaaccaggttggaaaacagacccggtctctgtcctcaaggagcttcactgtggtgaaggagacagatgagaagctaagaacaaatgaacagaagaggaaattaaaaaaaagatttaatagtttcaaacttatgtgtagggagacagagcttgtcagatgttgttgtcagagcaggctccacaggctgagccagtctctgctgtggggagagcaagaacacatcagggagcaaccaaggccccgaggcacggggagagcccagcgactgatgtggagtccatatgtaatacacacgtgtgtgtaagtgcgtgcccatgagtgtctttgcagagaccagaggaggatactggtgtctgctctgtcacccctcagctatattctcttgagacgagatcacactgggtttaggctgacagccagaaagtcccaccaacctttctgcctctgtctcgcagcatcagggttacaggcatatgcagaatcatgccaagctttctatgtgggtgatggggattcaaactcaggtccgcatacttgctcagcaggcacctttacccgctgagccacctcccctgcctcagctgtcttttggctagagacattaagatgctttgggaaaggcctggggctgttggaggtttgctaacagacgccgtgtgagctgtcaggtgaggagctctagagtttgccacgggaatgggattcagaaaggtaactggatctcaggacgctgggcaccattggcagggagtggggccagtgacattcctcaatgataaccctcaacaagcttagtcacggagctcaaatacccactattggagaaaggagtacccttcatagacacttctcattgcgccttcttaagactgagactgcttgtcatcttcgctcctagaacctctcaatgtgtcatctaaaactctgtctcaagtctcaaaaagagcaaaaaaaaaaaaacaaaacaaaccaaccacaacaaaaaagcagttaccaagactggggaaaggctgggccccttccgagacccccacatgagtaccagtgactaaccatctttgcgtctctcttactctgcttttctaggagggccgaaagaatgagctattactatctaagatcaaagccaaggcctcctgaaaactccatctccgtttctggatgtccctgatatttttttaatgacgtgtatagactacaggatcttgacatggttctgccggtgatggcagagagacccaggaaaattcatttcagttctctagacggatgttgtctttctcctacttgtttcatttcgtctctcctggctgcggctgatggactcagagccctacaaagaaccgtgggcagtgtggatgacactcagagccccataggcagtgcccactcactctgaccactcaacttccatttcttcagtgacactgcatttatgaaggtaccggatgtgtgcgggccctgagaataaagagcattatgttcagcaagtattgagcaactgctaagaaataagccctgaggtaaatgtagccgaacacggtccctgcccttatggtatctggcagaggcccagagaacaaccctcttggtcccctcccccaaagcttgtcccctgaaatgtttcaaatggctgctggatgagcagccagcccgttcacctaccattgtgccttttgttctggcttgtcacagtacgtaaggactctaggctgggttggggtgcagagcaattagcccagaggtgtaaagacagaagcaggcgaggttcaggttgactagagtccacccatttgtgttgtgaagactgataccaggtgcccatgatggcctttggaaacaggaacccctggtctggagccgtgcttctcaggcatctgctctggtgtggctgtaggtgtgtcctgtcctctggctacatgtggtcaagcctagctgtgagggtgctggaagcatatcccatgttcttgcactgtcagggtttcagtaaagataggatgtatagactgttgagtactatccggtcagacaaggggaaagacttcgggtgctgtgcatggaggaaaagatggtagtaacaggggcaggaagactccacggagtgaacagcacttgggccagagccaaaaggagtaggatgttagctgagatgggaaggagggcctctaataacccctaaatggttggctttagcctctggacatgagcagaccaaagcaatcacagagcactcccagacccccaggtatcggaaacctagcaactgggtcatgctaggtaaaccccagtgtgagatttgtgctcccttctgtataaacttagcatacacatgaacagcaggttgggaccattaagcagaagcaggtgggggcattgggcagtcacagaagaagtgcttctcaactttagtttcctaatgtatgattgagaggcatgaggcatgcatactgataggaaagaaggggtgctgggctcagtgggtagggtgcttgtctaggttccatccctagcatcacataaatagacatggtagcacacacttgtgatagaggcaggaggatcaggactttgagtgtatcctaggctagaatttcttttggtgtggttgtaggcatgatcaactacaggctgcctgtagccaaggatagctgtgaaggtggcccaacatgaaattgtaaagtaatttagaacacagattattttccatctcttctcttaaaactccattacactatgtactccataaactttgtaggtggcggggtcatgttgtaaaagcataacggtgatcactcctgatagagagagattgggttggtaactcttggtagagagaggttggtggctactttgtcccattccttaatccgcaaggcttaatagagatgatgagaggttcctgttcttctgtaccaggtacaaccgccctcctgaggagcaggcaagagatctaaacagaataaggtggttgacctatgcctctctgagtccagtgctctcgtcttgcctggcagattggtattacaggctgcaagtccatagctgggtaaggctgttgctgacactgttaccccagcgtctgtgcagcaacatctgacacagggaaagctaagccatcagaggagaggcttcgagctcagatctaccttgatttctctctcctacattcaaagtacgtgttacctaaagcagtaatgtcttactatctggttctggtaagcaacaatgagcagcggccgacctgtattgtttagagctttgtgggtagactgtgttattctttcaattaaacctgaggaccctacatttgtatcagacatcctaaatcagatagacaacactttcgtgagtaattccagcatgaagtgggctgctcagtctgacttattgttggctgaggagattccctgagatccctggtcagttcagaatccacctggaggctggtggaaggggagggcctctcagggtagtgtcttctgtacccagacatagctgtacccagacatagtatagcattgtatttggagcctactggcttttaccagaattgtaagatggtggggaaacatctgtaggtgagtctttttttttttggtgtgtttgtttgtttgtttgtttcagtgtgtactttaagagaagccagattcagagcagagagcttgttcacggggctggctcccagtgccatgcattcttaggaccagcctctaggtcaggagctacctcccctcccatatgcttttcatgaagttcctgaggatgctctggttgagaccaagctcagagcagctgtgagcaggctgagactgaggtgatggtggaaggcctgggaggatgtagggacgttctctacttctccgtgttcagtggttagtcggccagcaccacaggggcagtggcgagtaccatagaatatctgtcaacctgcatccagaggtactgtaatgaagcagagtccacgctgggcataagctcctgttagtctgatcttctggatcagggtctggtttgtagcacttgattcaagaacagtggagacgcaggcttgtggtggaaccaagccagcattggtctccaggaaaggctttccttctccagactgtttctgggggacccctgaggaccttgaacaaagcacggggcaggccttccaacagctctcttactacctcccaaggtgccagtcctatccttggcactttggcagactcctgtcttttctatcttgaatattgtagtcactacctgaaggggtatctgagagacacccagcctgacctgcaacccctatagtgcatcccttctccatggttctgtcttgcctgctcccaaggtgatggatggctagtttaaaggagctgggcatcctagcaataacttcctacaggaactttggcttgtgaaggttcaggcagttgaactgaattatgctctgagaattaccataaggaagtgttttatgatgtgttcattgccagggttggccactaagacaaagaccttaatacagagcagtataatgaagagcccagtaacatgggtggtattgtctgttgcagctgagcgtggctagaggaagagtcaatgccttctgagatgcatcttagagttttccatgctcttccttctagcagcaggtggcactgggccaaaatagtatgtaaaacataatggagggccagggagatgtcccagtcggtaaagcacgagaacctgagttaggatccccagcatcaaggccacacatagcagtgtgctcttgtattcccagcccgtgagaggaagaccaaaaggacccctggggctcactgaccagccaggccagctgagttagtaagcttcaattcagtgagaaaacctgtctcataaaattaggtggagagcaatgtaggtggcatctgagttgacctctgaccttcatatgcacaggcacatacatatacatgcacacacatccccatacacataaaggaacattcatatacaaaaaatatgcatgtttttcttctcagaataactatgtataagatcatgagcagggctctagtgcctcattggcagtgtgtttgacaccatggggagtcgcagcttctgtatcatcatcggcctgtatcaatttcccagatggccacgctcacccttcattgatactctcttcatgtgtctgtcctctccacgattttggatgatgtcatcacaatgatctcctggtcatatcacagtccactcgtcacattcctgttgtctgtcttaatgacacatgtcactgcttaagtttcctgatccatcacaaggtctacatctcttttctttggaatgtgtaagggcagcggatgcagggaccctacccacctcactgtggctcatcagacagtcagaacattccagttggttaagttggctccccaaactgttatctttgcatcctatagtagcaaaatatagatctaacctaacctatgctcaggtttaaacaggctgccagttctagtcagcagcactagagaagccctcttaagtccattagtcactaaccttgaaggatggaatggaaaaggagtttcccagaagtttccagactttaactacaaggtcaccttttggagatgtgtagtattgcggcagggaaggcacattaatgtcgaatagggtcattagtgtgttcttccttcagatgtggtggacggatcttagctgcgtgattgaagaaaatgggtgttgctgtagaacagcatgccatgcagtgaatggcagagctctaagcttacagccgccttggaggacaattgaatagcatcacgaatccaatgtaccgccttttcaaccagcagtgccacatataggaacttttcttatgtacagaaacttttattaaagtaacgtttgtaataacaaaaggttagaaactaccattaattcagaacagaggtgaaaaaatatcatggcccatatctacaatggggcattttgcagacacttaaaagaatagacctgctctgtgtattgccaaggaacgttcaagggatcttggagccacatggttaagtgggggaagaaaacatgcatgaacatgcatgaagtgctagtgtttggaatagagataaatacatgtaaatgtgtggatgcatatgtgtgtgcgcgcatatactcacacatatgcttgtgatacgtctgcttgcctgttcccagactgtctctgagaagtgacacagcagcctggcagcctcagttgccgcctagaagaaggtggaaatgacttttcaccgtttgccttttgtactctggaattttgtaccgtgtacatgcattatctactcaaataaatagtttttgaagtttaatttggtttcatttaagaataatcatgggagaaaattttacttccactggtctcttttctttctttttttactttgggggaggggggatggatccatggtagtgaatcagggtctcctgtcccaagctggcttcaaactctgcatagcaaggggtgagtttgaccttccccagtgctgggattatgggtgtgtgtcaccacacccagtttatacagaactagaatttaacccagggcttctgcatgataggcaaacagcctaacaattgaactacatccccagcacacacaccccttccatcaacctggttttcccccttttgggggaggggcttattttctttggagatggtgggtttttctgtgacagggtttatctgtgtagccctggaactcactctatagaccataccagctacaactcaaagatccacctgcctctgtctccggagtgccaggattaaaggcatatgccaccacacccagctaatctgttttcttaacaaactcaaagctctggagttagaagtgaagaataaaaaattactggcctcttgtgagaacataaactttttacctcggagcccaccccctcccatctggaaaacatttttgagataaaggcctcctagaacaacctcaaaatgaaccgggtacattgccaaatgataggacatgactccttagttacgtagattcctttggcagaactccctagtgatgtaaacttgtactttccctgcccagttctccccctttgagttttactatataagcctgtgaaaaattttggctgaccgtcgagactcctctaccctgtgcaaaggtgtatgagtttcgaccccagagctctggtctgtgtgctttcatgttgctgctttattaaatcttaccttctacattttttgtatggtctcagtgtcttcttgggtacgcggctgtcccgggacttgagtgtctgagtgagggtctcccttcgggggtctttcattaggtgtggtgggtattcttttattttgggggggggtctataagtagtttattgtcttcaagactacagtgtggattcctctcccagagaagggtcttacagaggcaggggactgtcacccaggtgcaggccgtctacttgtcattatcgtacatggctggattcttccttttggactgctcaaactccgggttgccccatatgtagatcaggtagaacactacaaacggcggtgccaagcgcagggtgctctctccagtgcagcgcagcacgttggagatgcctttgctgaaatagtttgggaaggcacgctgctcaaagggtgacaagctgtaggagatcacgtgccatatctggaagctggctcagcgctgtggtgagtattcttaaatgttaatttgaccacatctgaccggggcacacttgagagataaatcacttgaggtgggaagacccacttctaatctagatctttgaggtggggaaataagccctatccagatcttttgagatggaaaaacccatcattaatttgggcctcaccttctagagttgacatgtaagaaaaaagatctcttcccctccccctgctttttgttcccttgcctgcttgctctcactagcattaattccttcactggcattagaacctacctctgtgggactccattatatatactaaagatcagatgaaacatagagcctcatgggctgaacaactactggattcttgaactttccattcatagtcagccattgttggtttagctggaccatagcctgcagtttattctaatcccctttacataaacatacatacatacacacacacacacacacatatatgtgtgtgtatatatatatatacacatataaagagagagagagagagagagagagagatttattctgtaagtgttgttactctagaaagccctaactaatacaggcagctgggcctctgaagtcaacctttcatagtagcccagggcccgggacccaagcaaatgaagccagctgcctgtattagccactctgaagggttggcctcattggtggaagaacttcgagggaattggggaagctgattctgttctttcgtctatgtaatagggaaatgagctgaatctgctctagggttgtctgtacctcatgagaatcacattatagcctccctgctacagaagataggaacagtacctctaagcaattagcatcctctagcagctgtgcctatttcacctggaactttctgtgtgttgtctctcccaaccctcttccttgccagctcctcttgttagtttttattgtccaacttgacacttacatagagtcacctggaaaggggaagcttcagatagagaattgtctcagattggcctgaggctattgacctgggagggcctggccaactatgggtagcaccatccctaggccagtgtctctggtctgtatataaagctagctgaacataagccaaagaggaaccagtaagctatgttcctctgtggtttctgccctgacttccctcagaaaagcacgttaccaagtataagctgaattaccaagtgaaagccgaactctgcttcctccaactgcagtgcattcattatttttcttgaggctgtgattaaacatctgacaaaagcaactttgggaaggaagggttgattttgtctcacagctccaaggattacagtctattatggtgggaaggcaccataggaaagcagtaggaactttagaagtgtctgatcatactgaacccactgccaggaagcatagaaagagggaccctagcccatgggatgacgccatccatactcagtatgggtttccccacctcagttaaactaatctagaaactccctcagttaaattcctcttt

SEQ ID NO: 74 - DNA, 1959 bp, Mus musculus
ttctctgacctgctgtggtagtgtcagctcctgtgaaggaagtttccgctttgcaccccacccggatcacagttcggttgtagggcccgctctctccggctccacatcagcgcatctggatcatggggttacccaaggggccagagggccagggactcccggaggtggagacgagagaagacgaagaacagaatgtcaagctgactgaaatcctggagctcttggtcgcagctggctatttcagagcaagaattaaaggcttgtctcctttcgacaaggtagtaggaggaatgacgtggtgtatcaccacatgcagctttgatgtggacgtggatttgctctttcaagaaaactctacaatcggtcagaaaattgctctatcggaaaagattgtctccgtcctcccaaggatgaagtgtccccaccagctggagccccaccagatccagggcatggattttatccacatattccctgtcgtgcagtggctggtgaaacgagctatcgaaacaaaggaagagatgggagactacatccgctcctactccatctctcagttccagaagacctacagcctcccggaggatgatgacttcataaagagaaaagacaaggccgtcaagacggtcgttggcctctcggatgcttacaagccccggcgaaagtaccgacggcagcggggagcagaggagctgctggacgaagagtcccgagtccactccacacttctggaatatggcaggagatacggatttagtcgccagagcaaaacagagaaggctgaggacaagaaaacagcacttgctgcagggctgtcagctgcagagaaagtggatgctcacgaggaagatgagcttcaggcagccgaagagcagcgtattcagtcactgatgaccaagatgaccgccatggcaaacgaggagagccgtctcaccgcaagctccgtgggccagatcgtgggtctctgctctgaggagatcaagcagattgtgtctgagtacgcagggaagcagtctgagctgtccgctgaagaaagtccagagaagttaggaacctcccagctgcatcagcggaaagtcatttccttgaataagcagattctgcagaagagcaaacatctggaagagctgcaagcgaatcataccagcctcaaagccaagtacagcgacaggaagaagacactgacagagttgaaggatcatggtgagaaactagacaaagagcaggcagccctggagaaattagaagccaaagccgacccaagcatgctgcagaacctgagagcacttgtagccatgaatgaaagtctgaaaagccaggagcaggagtttaaggcacactgccgggaggagatggctcggctacaacaggaaattgagaccctgaaagctgagagagcaccaggtgagaagatcatctctggtggagagccgcagggtgccctgacctccaccatgactcacaatgaggacctggacagacggtacaacatggaaaaagagaagctgtacaagatccggttactacaggcacgaagaaatcgagaaatagcaattttgcatcgcaagattgacgaagtgcccagtcgagcagagctgatacagtatcagaagcgatttattgaactctaccgtcagatttccgcagtgcacaaggaaaccaagcagttcttcactttgtacaataccctggatgacaaaaaggtttacctggagaaggagattagcctgctgaactctattcacgagaacttctcacaagccatggcctcccctgctgcccgggaccagtttttaaggcagatggaacagatcgtcgaaggcattaaacaaagcaggatgaagatggaaaagaagaagcaggagaacaagatgaggagggaccagttgaacgatcagtacttggagctcctggaaaagcagaggctctacttcaagactgtgaaagagttcaaagagg

SEQ ID NO: 75 - protein, 620 aa, Mus musculus
  VARIANT (1)...(620): Xaa = Any Amino Acid
GPLSPAPHQRIWIMGLPKGPEGQGLPEVETREDEEQNVKLTEILLVAAGYFRARIKGLSPFDKVVGGMTWCITTCSFDVDVDLLFQENSTIGQKIALSEKIVSVLPRMKCPHQLEPHQIQGMDFIHIFPVVQWLVKRAIETKEEMGDYIRSYSISQFQKTYSLPEDDDFIKRKDKAVKTVVGLSDAYKPRRKYRRQRGAEELLDEESRVHSTLLEYGRRYGFSRQSKTEKAEDKKTAAGLSAAEKVDAHEEDELQAAEEQRIQSLMTKMTAMANEESRLTASSVGQIVGLCSEEIKQIVSEYAGKQSELSAEESPEKLGTSQLHQRKVISLNKQILQKSKHLEELQANHTSLKAKYSDRKKTLTELKDHGEKLDKEQAALEKLEAKADPSMLQNLRALVAMNESLKSQEQEFKAHCREEMARLQQEIETLKAERAPGEKIISGGEPQGALTSTMTHNEDLDRRYNMEKEKLYKIRLLQARRNREIAILHRKIDEVPSRAELIQYQKRFIELYRQISAVHKETKQFFTLYNTLDDKKVYLEKEISLLNSIHENFSQAMDAARDQFLRQMEQIVEGIKQSRMKMEKKKQENKMRRDQLNDQYLELLEKQRLYFKTVKEFKEX

SEQ ID NO: 76 - DNA, 118544 bp, Homo sapiens
cttaattaaaactctggttaaaggaataattattgtttcatagtggcctgtgatcctacttttgatcaagtgttttgaaagtttattttcgacaaacttcctaaaatcaaattataaaattaagtccttttgaccttgaaccagctgttggacagcccagagggcccctggaaatgcaaaagagagatattaaacagattaaacagcttatttgattccttaaattacatgagaaactttgtcaaataagaaatggaatttaaccttcttcgagttatatttgtatgtctttaaggaggttcataataaggatagaaagaaccctggcaagtacaggtttctgataactttaaggtttttttttttttttttaataccattggactgggtaagaatttctagaactctaatgagactgatgggtttgtgaaactgctaaccaagatcaaacagaacaaaaatttattacatgagactgaatgaactgacaagaaagaataatggggcttaatggcgttttaaaaagggagtatttctgattcttttaatgtttcattatcccgatttaagggaactttttttctttcttttttttttttttttttttgtgagacggagtctcgctctgtcgcccaggctggagtgcagtggcgctgtctcggctcactgcaagctccgcctcccgggttcacgccattctcctgcctcagcctcccgagtagctgggactacaggcgcccgccaccatacctggctgattttttgtacttctagtagagatggggtttcaccgtgttagccaggatggtctcgatctcctgacctcgcgatccacccgcctcggcctcccaaagtgctgggattacaggcgtcagccaccgcacccagcaagggaactttttttcttttaagctaactataacttatagcaatttgctaatgcatacttttgtaaacaaaaattgaaacatttgcttttgttccctacctgatccctccaaaactcaggaaataattcatgggtatccttatttttgtttatgatgatatggttatttgcataaattcaacaagaatctgttctctttaacatgatacaactgaaaacattgactatattatcaaagctttgactggaatgtcatatttgaaaacatgcatagagagtctggctttaagggcaaagtctgatgtctgcattggtttgacttcctagcatcgagaggttttaaaaagtccagtttaggccgggcgcggtggctcacgcctgtaatcccagcactttgggaggccgaggcgggcggatcacgaggtcaggagatcgagaccatcctggctaacacggtgaaacctcgtctctacaaaaaatgcaaaaaaaaaaaaaaaaaattagccaggcgtggtgacgggcgcctgtagtcccagctactaaggaggctgaggcaagagaatggcgtgaacccaggaggcggagcttgcagtgagccaagatcacgccactgccctccagcctggggtacagagcgagacttcatctcaaaaaaaaaaaaaaaaaaaaaaagtccagcctaagatttcttgtcaaaattatcatcaagcaaatttaaaaggagcctatatggttattcttgctgtacttatacaaataattaggccaagtttgagactaaacttattttagaaacaaattggtgttactgtgattatttttagtagaagtggggatgacaatagagagaaaaattaggtttcagaagaaaaccatagtacacttgttgttagatcatagccctgttcattgttttcaagtttttgttatttatttaggattggatcttaaattcctctagtttacttcaatatcttgctacaactctccaaacaagaacaaaaactgctaagctggacaatttgacataagtttcagggataaagtctcatgcctgatgtgtagatcacatggagagctcaccagaatgcccaatgccacaacccaaggagggaatcatgggaaccctggtttatagtcagtgggccagaagctgaggtcaaaatctgagtttgtaattggcatgtgaaatggggtcaggctcctgggactgagccctcacctatcctgagctctcaacccaactttacctggctgtctccaagtaagtaggatcagaataacaggacacctagctggtgtttgctgcagagttgcttggttggcatgtggagaaaaccccccacacatctggtgtcagaagtactctgtgattgtgagtagagagtagggaaacatgcttaggtttttcccatatatatatccacacaaatatatgtgtgaatcttagtataattcttttcatcttatttgatttcaggataatgaaagttgtattcttattgctatttattaacaggaagtctctgattaatccagaaaacagtattttttggtctctcttctaaagtaattttcattttctctcatttagttttcacatgaaagcttgatagaactataattccaaggatactgttatgtaaatgcaggctatttagaagtgaaattcctgagtcaattgtttcctttcatttctagacagtgtaaggatagtacttgagttggtgctattaaccccctccccaaaatgtgaatggtagtagggattctttgtgggcagtcctgccactggagacatttgaaactcaaattccatttctatagatcaaaggctaaatcacaccagtggtaaaactaatatgtttacaaaacaaattttgatttaaacaaaccaacaaaattccctttgatggctctcattgcacttaggtaaaatccaatcccctcctggtggtccccaaggtcctgatggggccagaccatccagttggcacctagttagtgctcctgctccaacccctcaggtgcaagctcctccctattcatggccccctctctgttggaaacctttatcccgctccaggtctaaccctctttcatctcaagtcttacatgttgtatccctggagaaactttcattaacttcccactcaaaactgttactcctgttcctctttttcatcccacttttcaactcattattaaaggcacttatttcaacatgcgtcatgtcatctgtgctgtgatgattggttgactgtgcatgctcatcccagagctctgttctctttcttttctgtatccagcatttttcagacagagggttgggcatgcttatggcatctgggggaacaattctttgtacagtttataaggttatgcatgataatgatgcttaacaaataacccccaaacctcattggtcacaaccaacactgatatctcactcgtgggcttggtactcggctgggcttggggctcaggtctgctctggtctctcactggtgtttcttgcttgagggcccaggtggagggaggtatggttgcctgagtatgcggtctcctggtgaatggcttgagcttaggagagtgagggaacacagaatggttcttgacacctcacccagaactggcacaatctcctatctgcttacatttctctggtcaaagaaatttttatgacctaaaatcaatgcaggaagtttgatgtctttaacaactgggtgctaaatgttggtaatgcctctgctgtggtgggaatgtttgggttaccccaaaatctatatgttgaaatcctgactcccacaaggtgatagtattagaagatgggaggtgattagggctctaccataatgaataggattgtgctcttataaaagaggccttacagaggctcctcacccttctaccgtgtaaggtgacaatgagaagctgtacatccataagaaatgggacctcgccagacattatatttggcggtgccttgaccttggacttcccagcctccagaagtgaggaaaataaaatttttgtagtttataagccactctatagtattttgttatagcagcctaaaaagactaagacaatctcccatgctctgtgaaaactccagactgctccttggtcctgaatctctaccctcacccacattgagagcccttctctgtacctggcacagaagaggcacagaatgaatatttggtgaaaaattaactttgccaaactgccgtccaagaactgttgtaaaaccttactgactagggaatgctactggcatttgtttagtgtcttttaagcattaattattttttccatgcaaaaagataccacattttaaccttttagaataaggctgagtttttttttttttttcagacatttagtgacaatttcttttagaaattctctattcaagtcttatgctcatttttctgttaaatgtttcttcctcatttggaagaattcttgtcacaggtaacaaatatttttccagtttgccttttaaatgttgtaataattttttgacaggcagacattgttaacatttatacagcctcatctctcactgtttttgttcatggcctgctgaagcacacattttcactatatcaaatggacagactataatgtacctaaccagtcccttattatgggctatttagatggtttataggttttttttctcatcagtaacattgtgatgaagatctgatataagccctgaaagtggaagtatcatatcaaagaaaatttttaagttcttaatatattttgtcaaattactattgaaatcttacttcctagtccctataactcagttcccccaaaccccaggactcacatcccagacaccccttcatcccaagacccacatcccagatcctcataccccaggccctgctgctgaagtccttactggtcagccttgtgctgaaacaaacaaggagaggactgagagcaggactggaagggtaatgggaaactgtccagaacacctcagatgctccttctgccagcaatgctttcccctgaggcccttctatggtgtccttttgggatttaggtctctctcaaatggcactgcaaagcctaatcctggccccttcatctaaaagtgactctgactctagctattctttattgcattacactggttttttttaattgttgttgttgtagttgtcattgcttgttttttggtttttgttttttttgttgttgttgttgttaattgtagagacaggtttttgccatgtttcccaggctggtcttgaactcctgggctcaagcaatctgcctgcctcagcctcccaaagtgctgggattacaggtgtgagccaccacacccaaactacactgtttttcccccctttaatagcacctatttctacctgatattatcttattaattacatgtttaatttctgtcagtaattatcttgtttggtgtgttgactgcagtatctgcagcatcaggaacagtttctggcacagagaaactcttctcaaattgactgcttattggaatcacctgtgaagctttgacaatcccattacctacccccgaccaaaagaaagaattgtttagttattaaatcactttaccaaaaaatgtaaatattattttctccaggagatagagaatgtagcagatattctcaaacatgtttatttactactgtgtagttggccccttgttgaatcctttttaatgtagctaatagagtgtggttgtacaaactatgaaagttattgaaattctttgataaaactatcatttttgggggaaaacgtattggaagaactcatccaagtgtgtgtgtgtacacgctgtgtttttctaaccttcagtccagaagtagaaggggtttaaatctgcttgcactgcctgtgcctccattatgttactgtagaaatgtgacatgctaaatataggatggtgcattataaaattgtaccgcttgagaatagaccagcatgccattaagaatttttaggaagaactcatttaacctaagagctctttgtttatggattttgaattttatatgccactgtgatctataaagaaacaaatccataatgaagtcactattcactactgtgttgtatataaaacaatatgttccaaggcaaaaaattcaatattcatgcctctccctagcccaattaaatcaggattgctaagggtggaatccaggtgattccaatgtgcagccaagtttgagagctactgacatagaagaaactcagcaatatttgttggatggatggatggatggatggatggttggatgggtgagcaaaagaacatggggaatgagaaatttggggctctggttctagcactccctctaatgtgctgtgtgacctcgctgtgtcactctactttactgaacacccattgttgcactacatgtagaaggaatgagagaagcctgaagacagaataattaaagctttatagaaaacttccggctgggagcggtggctcacgcctggaatcctagcactttggaaggccgaggtgggcggatcacgaggtcaggagatcgagaccatcctggctaacacggtgaaaccccgcctctagtagaaatacaaaaaattagccgggcgtggtggtgggcgcctgtagtcccagctactcgggaggctgaggcaggagaatggtgtgaacccgggaggcggagcttgcagtgagccgagatcgcaccactgcactccagcctgggtgacagagcgagactccgtctcaaaaaaaaaaaaaaagaaaaaaaagaaagaaaacttcctccagaacaaagctaagcctaacaggaagctctttactatgtgtattaggccattctcccattgctataaagaaatacctgagactgggtaatttataaagaagaggtttaattaactcacagttctacaggctttacagaaagcatggcgccggcatctgcttggcttctggggaggctttaggaagattacaatcatggtggaaggtgaaaggagagcaggcatgtcacatggtgaaagcaagagctagagaggataagtgccacacttttaaacagccagatctcgtgatgagtgactcagtgtcaggaagacagcaccaagaggatgttgctaaaccattcacgagaaatccaccccaacgagccaatcacctcccaccaggccccacctccaacactggctattacattttgacatgagatctgggtgggacaaatatccaaactatatcactatggtacctctttacccacgaactggaaagtatttgtgaggctccaaagaggaacatcacacaactctgtactcagtgtacagaagagagacagaatgactgatttctagtcctcagatatcacacttgggagacacaatttgtgagggtgtctggagtgaagggaaagggagagagatggattgatctgagagattcctcacaagcctccttgtctgcattggctgttaaaggtcttcttcaagactgtgaagggtttctgctctcaaatatgggctgcttaaactttctttttcttttttaagagacagtgtcttgctatattgcccaggcttaagtgcagtggctattcatggtcatgatcccactagtgatcagcacagaagttttaacctgctctgtttctgacctgggccagttcaccactccttaggcaaccttgctccctggaggtcactgtattgatgccaaacttagtgcagatctctgattggcatagcttactaaagcccagaactcctgggctcaagcgattttcctgcctcagcctcccgagttgctgggacataagcaggtgccacctagccctgttcaaactttcttgacgatattatggctgttttgctgagatttttttttttaagcatgccccatgcccctcaactctgttactgtcactctacacctgttgtaacataggacagtttctttttttttttttagacagagtttcactcttgttgcccaggctggagtgcagtggcacaatctcagctcaccgcaacctccgccttcccagttcaagtgattctcctgcctcagcctaccaagtagctgggattacaggcatgcgctgccacgcccggctaattttgtatttttagtagagacggcatttctccatgttggtcaggctggtctcgaactcccaatctcaggtgatccacccgcctcggcctctcaaagtgctgggattacagacatgagccactgcgctcgggaaggacagtttcttactgaggaagttagctactcatgcttatttaaaacattgcaaaagcattataacagggaactcagggtgtggcctgagtcctgttattctccaggctgctattatatacagctgtttaggcttgcctgctatgtgagatcttactacctgttcctaggcatcagtacctgtctggtcactcaacagtggccacaaattattatcactctccattccccatcaacctataccatttcagtgaatgacagttttaaaactacaaaaacaacacatttgggaagttatgagagtagaaattgaagtttattggcttcacaaaggataagagcaagatataccacacaggagggttcccatctcaataccttaacttgcatattcagattattcaaattattggggaccagggtttggggatcgtgcacagctttgagtaatatttgctagttatatttaagaacaaaatggcatccttagggcagttccaactatttgtgagctctggctccagacaaacctctgtctgtcaggatgaactccaggaggagtacaaaaggtgcaaaaataaaataaaataaaatagaaaactatacatatcatatatacacgtatatatatatacacacatatatatatacacgtatatatatatagtttttagacagggtcttgctctgtcacccaagcaggagtgcagtggtgttatcatagctcactgcaacctcaaccttcctggctcaagcaattctcccacctcagcctaccggctagctgggaccactggcaccgggctaattttcttattttttgtagagatggaggtctcactatgttgcccaggttggtctccaactcctaggttcaagtgatactcccgcctcgacccccaaagtgctgggattacaggcatgtgccaccgcgcctgcctactcttttaaagacgctagggatgcaaagaagagacgaaagcaaacacgaaacctttttgatctcaaggagctaaaggtctgagtctgacacttcccatcccacacacatatacagagggaaggatctcttctccagcaaaagttttcacgaaagtcatctctttcctcattgcttaaaagaaacaaaaagccaagaagccgttatggagcgggtgtgggggcctgtgaccttttgtctagttgccatcctccgggaccaacaaggggtacatcaaataagggacgcggcggctcaaatgacatgaacataggagtccgcattctctgagatgtcattcctccaggaagacccaggaaccgtgaatagggcggggtggtgggcaatatctgaagcgaggtttcctgggaacgcgatgccactggccaggacgctggagagggcagcgggcgtgaagaatcccttctcaaggggtccgttcctgggtcgtatatggagaagtctgtccaagcgtgtgtctgtaaggtctagagccgggcgtgcattcagaatcctcaagctcatctgtacttggactctgaccctgaagcgaggcggtttccgaagtctgattcaccgaggggacaggacctatttggggcatccgatggcagcgagaagagaagggagccgaaatgcaaaatattctcaagatgcaggaggaacccctctcaaggagcgccacggagaaaacttcagagtacgggcgcgatgatccagcacaacgccaggacctgcagcccagcccacctctccccgggctgctgtggcgcaggcgcagtggcgccgcgctccggccccagcgcgcatgctctgcccggctgcggcgcttcgggcaggcggcggcggcggcggcggcggcggcagagggagtttccgctttgcactccaccccggtagcagctccgcggcagggacagcttcctccggacgcttggcgggcttcgctctcgccttacgacagcccggtcggatcatggggttgcccagggggccggagggccagggtctcccggaggtaagaacgcctcctccttccctgacacgtcggggttcctgaagagagggccgagccgcggggcggcgggctgagcgggccctgggtgcgttaggggcgccccgcccccttcctcaggcgtatccacctcagggaagcgccgaccctcttcttggaggcggggagcaggtacccctgcatgggcagggggcggcgggcgggtgaggacaaacttaagccgctcccgggtctcttggggcgcaggtggccttcctagcccgacacctgctctgacgcagccccacgcgccgcggggtcctgggctcccacctttctccctgtccgggacgggctcccccaccccgcgccgcagggctagccccgagggccgaggctgctgggcgctggagtcacgagaccgctctccgaggcggttcgggctcgggtggtgaccttgggacgtctaccgccaccccgcagagtcccggcggcccgccccacccgccttgctgtcgggagggaatgccaccctccttgcgtggacccgggccggggcggcgggaggaagtttgggagacttgcgcgcaccagggaggtgtcccgctgggtcagcgcgccggggcgttcggggtgggacgcactccaggggtgctgtgtggcgggggacccggctctgggcggaaaggctgcggcttctccagaagagggcggggttcttttccaaaggtgtttgttaagtactcacttagtgctagggagagggtcatgagtggtttgcggatttccacgtttgctgggaatacagggaaagtgtattcattttcttttggctgcaaataccacttagcatctcataggtagtttgcatctgtcgtccctttcagttgattttactcaaaggctagtctagtttactggattctggagagaaatggaagccacgccgcacctctgcctttttcctaaggttctggagcaggcattgggcagggtgactgcttgcttgacgtggtgagtcgtcccttcacacttacctgccagtgaccaatgttactcctctgcactcctcccaaatcctcagttctttcatatcacaagtatccactaattgagggatcactgtgttctgtgtccagaagctgggaatatatatagtctgaaaggacagatttgtttgtcagtgtgtgctccccgaatgcaagtccattttgttgtcttaagaaaacctgacaagcataatgttgtcagaacccctgtattaggtaaaatcttacatgcacgttgcctgggatgggacccaggatagtgaacaataggatttgtactgtgacatttgaagttttcttttttgccacttctgtattctaggctctcatcaagtttttgcctggccttttgctgtagacttctgtctggtctcccacgttctactttaaatccgtccaacccaatattccacagtactatcagtggaggtctttctggggggaaaataaataaattaattaatgaagagcaacctgctgctgtatgtccttcgtttaaactttcactgactgctaagaggccacactcaccaggtcaagcaataacttatcatcatttagttcagaagctagtaaatataaatatggatagtctgtgttattaggatgtcactagaccagttaattcattaaattcattctttttttttttttgagacagagtctcactctgtcaccgaggctggagtgcaatggcgtgagctcggttcattgcaacctctgcctcccaggttcaagcaattcttatgcctcaggcttcccagtagctgggattgcagatgtgagccactgccctgcccgaattcattctttttaaccctttacaaagatagctagacttggcctgccttccagcttacaacaactatagtggacggaaattgaaagtttattgggctttgtgtaagagctcattgttgtttgtctttgtcagaaatttagcttcaacaactggatgtattaaccagcctggtggatttttattgcttcaagagagggtctttcattcccagcagatcagacagtggcccttttccatttgatttcagtgttaatctgctaagtgaatttggagtcatacattcccatttagtgtcttgtgccaaaattacttcacaagttatattgcaaaagtaaacttctccatgctaggggtgagtggatggaagcctgggccctgcatctgtggtggggtggccagtgggtgtccattagataggtgttgaggcagtgatgatcctatttttttttgtttttttttgtcttcttctcatgttttcataataaatgattgaacaaatgaagtgttcctgttttacaccccagaagttttaagaaagtacttatattatctcattttctttttctgctgacttgaactacaactactctttagcttctcttttcttagagtgttttcacttgtagatgtttctcaaccatcccagattttttgcagaagggagagaaggtgtgaattatttatattacttaagaaaatttttatgtccactaggaactagtgaatgctgatcttcaggatccttaatggactggaccagggtcatttcagagacggatgtagctcagtgctgtcacctcccccacgccactcctactctattgcaggggattatcagtcactttaataattctgtattaactatattttaatatgtatactccctttcctggcagtttatacatcaaaataaacttctttccattgtcagggatgtgatcactgaaacattttattaatacatgactggtttaggttcacttactttatgtaagcattagtagatcattctttatttaataagtgtgtccttggagcttaatgttgtttggattcagaggagtaaacccaagtatataatatatagtcctctccttaatcaatcagtagtccagttgcaaagacaagcatgtatataacactagatatctcactttgaagaggttgatacttagttatatgtacagtatatagttgatacttagttatatgtacagaaatgctgaggagagtggccatttcaggatagacttgtgagggatggtgttgcatgggagctggaatttgaaagtgatttctcagtggttagagaatatagccatggccttgtcttgattgtttttggggtagttaaaggatgaacctgaaaagatagtttggtggccaaagatctgaatgtgaaaccagacatctggagtttatcttacaggcagtgtgtgtggtgcattgttgataagggctgggagggtgagctaaagagggataacatgaaagctgtgatttaggaagggatgagcaaaacaaattaaaggaagaaagatgaagaagcatttgcaagagtcctggaatgaagtatgaatgaaagggaagggaagataaatgtgagatgcatagtaaaggaagacttaacaggcattgttgggtaagggaggactcagagatgattatgagcatgtgaaccaggatatcttattggtgttttatatagagagatggttttttatttttggtagcaaaggaagagaggaaaggtagttcatgatagtaaatagatgaaagagtattagaatatttagatggatttaagtattagataaagattggggtaaaaggaggatataaattaaaaattttaaatcaaaatgctgagatacggccaggcgcgatggctcatgcctgtaatcccagcactttgggaggctgaggcgggtggatcatgaggtcaggagatcgaaactatcctggctaacacggtgaaaccccatctctactaaaaatacaaaaacaaacaaacaaacaaaaaaacgggcgtggtggcatgtgcctgtagtcccagcaactcgggaagctgaggcaggagaatcgcttgaacctaggaggtggaggttctctctgggatccgagtacagtgagccgagattgcgccaccgtgctccagccagggtgacagagcgagactctgtctcaaaaacaaaaacaaaagcaacaaaaaaacaaaaaaaaagcaaaatactgatatacatatattagatgaatttattatttttaaggcaatcctattatgtggcaataatcaccctttaatgtatctgggttggaagcctttcatatatttgttttcgagatcgaaaagggaagtacagtgagggatgcacttttgaattcccttcttcatttctatgcctgttgtcagtaacttctggatgagtataactttttttgtttgtttgttttttagagatagagtcttgctctgttaccaaggctggagtgcaatggcacagtctcacctcactgcaacccccgcctcctgggttcaagtgattctcgtgcctcagcctcccacgtagctggagttacaggtgtgcaccaccatgctcagctaattttttgtatttttagtagaggtggggttttgccatgttggccaggctggtctcaaactcctgacctcaagtgatcggcacccccacttggcctcctaaatcggtgggattagaagcctgagccactgtgcctggccaagtataaagtttttgagacagagtcttgctctgtcgtccaggctggagtacggtggtacgatcttggctcactgcaacttctgtctcctgggttcaagcgattcttgtgcctcagtctcctgagtatctgggattgcaagcatgggccaccaaacctggctaagttttgtatttttagttgagatagcgtttcaccatgttggccaggctggtcttgaactcctgacctcaagtgatccgcccgcctcagcctcccaaagtgctgggattacaggtgtgagcccccacgccggccctaagtcctaagtgtaaagttttttttagaaaacaccataaaaccttgttcctgtttgtaaggagtcataatccatttgagaagactgtcaaagtaaaccatgggttagagaaaaaggaagtattgtgctctaaccttccttttccctggattccttcagcatgtgatgagtagtatatactacttgggcatgtgtctccctcagctatgaagattaacagcccgttgaggaccgcggacccatttgtgactccaacaacactgtccacatacttctgtgtgacacttgctgaattttcagagaatctattgtggtgatgtagccaatgtcatctactccttggcaatgagcttgtggcatcaggggatatacctggtgttcctttattcagcatatcttttaccagccaaagttttaccttttattttaggtggaaacaagagaagatgaagaacaaaatgtcaagttgactgaaattctggagctcttggttgcagctgggtatttcagggcaagaattaaaggcttatcaccctttgacaaggtaaggggaaatctttctaaccattacactatcttttgtcagaatgacatggttaatcatggcaaagaaaggaggaaaagatgatgttttaacttcctccatgtctgtgtttccatttcttcctaattcagattcattatggaagtgttcaaacttcttttcaaagacagaaatgatgtatcagtgaatacgtcagttccttttctgtgcacaaagctttaggaaatgcaaagaagcaaaataaatagttccttctttcaaggaatttacagtttgggtggggattataaaacttatggaaaataaaataatcagagttaataatgagctatcccaagtcagcgtgctcacagacggttgccagatattctgcggatagtaaatgctctgatttaggatgagagagagatcgctatgcaatgaaatcttttaattcagcagaaccttgaatgatgatgcacaaatcatagtaataggtgttgaggacacagagaaaaaacagaggcacagttctcaaagagcccaatttctgtagagtggggatgagagacaagtgaatcaacatgcacagaataaatggcatgatgcagaaagtgccaccgtggactgtgcacagaaaggacgcattcaaatcagacagggcaggctgtggaagacagtgctgagtgctccacggggtcacagtcctggctgtgcctaacagaattactctgggttattttataatacagaacccaggattcactcattgaaattttggttagctaggtctgggcttgggccctggaatctgcatttttattgggcaactcgtaagagtctaaagcagccaggggtaagatttactgtttttgttgttgttgtttgtttgtttgtttgagatggagtctctctgctgcccaggctggagtgcaatggctcaatcttggctcactgcaacctctgcctccgggatgcaagtgattctcctgcctcagcctcccgagtagctgggattacaggtgcctgccaccatgcccgactaatttttgcatttttagtagagaggggtttcactgcgttggccaggctggtctcaaactcctgacctcgtgatccacccgcctcggcctcccaaagtgctgggattacaggcgtgagccaccgcgcccagccttactgttatttttttctaatatcaagctgtgtctgaaaaggattttgtttcaaaatgggtttttagtcttactctcatttgcatctcagagaattcctgagggaaaagtagagccagggattctcaggtagataagaaaaataagatgtatggaaacaaaatgtcagccttgctgcccatgtgtctggtctataaaacacagaattaatgtctgtccttttgactataaagaggatctatgtacagtatgttcatttaataataaaagtcagctcctcagtcatgccagccacatttcaactgctcagcagccacatgtggctagtagctactgtacttgtccttgcagataacggaatatttctgtcactgcagaaagttttctgtaacggtgccattttagattaattgtacttgatggggtaaggaggacacactctctctctctcaagatatataattttgtatgtttactgagtctattagagctatttataatccatctaccttccacttcttccattctccccaaactaaaaagagaaaacaaatattttctttatgtcttgcaggtagtaggaggaatgacttggtgtatcaccacttgcaactttgatgtagatgttgatttgctctttcaagaaaactctacgataggtcaaaaaatgtaagtttttctatggaaaacctaaaggtggggagaagggaactaacttttgagtgtctactgtgtgccagaagttggttggacactttacatagtttattttaacttttattacaagaggtattatccctgccttacaaatgaaactgagactgaaagaagccaaggtcacacagctagatcaaagtttgtagtgactacttagtttatctttcaaagacagctcatatcagtggaagttgattagaaagaggaaaggagatgctttccttccccattgcctctgtgtaaggcagagtctcactttgcctgtcttcgagagaaagcagcatggtctccttgctagagatctcacctgagcataccctgcccagtcttttgtagcacagcagctcaccaggggcttggccatttcattagaccatttgggatacctggttcttctcccagccttccagtgggtctctgtgtggccttggaacagccactccttctgtgggcctcagttcttttatccgtcagaagagagattcctgacctcagatatgtgtgattctgtgacagtctgtttattcatttttctgaagtattaccttctcccaagagaaaacacttccaaaaggaacaaaggggtcttataaataacaggaagcaataatggtgggaaaatggagcaaagggggaaaaaaaagtggggacaaaaggcagagttggggtaagactgccacagtgatgggtcacaaaatgctttgttttcctactgttggccaaagatttgcccctgtgtttctggcagccaagtggaggtggtatctgtgagtaactgagcatcaggaatgttgcaatttactttatatttatacagcattttccctgtaagtttctaattgcctttgtttttttcttgttgacaaaagaagcatatgcctttagctgtagctcagatcagccagcttttttttttttttttgagacagagtctcactcttatcacccatgctggagtgcagtggtgccaacaccactcactgcagcctcgacttccttaagtgatcctcttacctcagcctcctgtgtagctagagccacaggcatacaccaccacgcccagctaatttttaaattttttgtagggatggtgtctcaccatcttgtccaggctggtcttaaaactcctgggctcaggcaatcctctcgccttggcctcctgggattagaggtgtgagccaccgcacctggcctatgcttcttaatcaggctgttcattagcatgaattctttgtcttcttgaggatgcttttcttggaagcttctgtctttgagctgattgcttcctatacctgtggcacccttgatgtgctggtatttcttttcattgcattttttctgtgctagttttaccatttcttggatcccacgtgtgcttttttcctaaattccccttgagttttccagtggtcgttaggccctgttttcatttcgatatccttagggaatatggtagactcccatcagtggcagcattccattatacttttaatagatatgggaacacagtatttttctatgtcttctcaattccttgtctatatttctgaaatctaaaagacactgaaaactgttttttcttcttttaggtttagatacaaagcttatttgggagcaaaacataacctgaattgactgaatttatagctttattgatcccacttatgtgactatttataagttttgctaaataaatttttttttattatagagtgtgactctagattttcctgggttcttacataatatataatatgtatcccttaggtattctaaggaactaaatctaaaaaattcagaattctgaaacacatctgacccaaagggtttggataagggattgaggatgtgttatattccctggtaagtgcttgatgtgtgtctcttaagtgcagagccatgaactgtaactgtgggcaaagctggagacgggtttacgtgactaaggacccaccagagtcagcagtgcatcaggtagctcattctttattatctgtagaagacatgttacagccacagggtactgagtcatctaaaaatcttttctgtttggttttggaatgtgttctgtttggtgttcccccccaccatagagtttctggttaggtgcagtttagactaaaactgccttatgtttgccgtcttccagtatatctagtcaatttaatgggtgggctggacgtatgtccaaggagcacacttgcctattgacggcatggttgtctctcaagctgtcttctttatgtgcccaattgaggccttgttctctgtcatctttctttgctgagagttccataagcttctatcctctacttctatcttcttctgaagccccattaacagagggtcctatggccagaggcccataaatgggattttacatttataactgagttcatttcaacaacaaacattttattgggcatctgtgttccaagcacttgcatgtgtattttattattttaccttcactaccgctttgagtagggattatccctagttttatgataggagtattggacctggaccaagttacttgccaaaagtttcagagttgtggtggaacttgaatttagacccaggtttaattcactgtctttcaagctgtttgcagtggagaagaaagcagtgcactgaacactcttaaaaactaaaggagtcaaactagtcacagctgggcatgttaaaatcttagtctaggaaaccggcctggtgacctctgcaattgttaatttctgtgatttttaggaaatctgaaggatccacctagagccgcaggtagaagctgaaaggggattgttagatttctggaagaagtctttctcactttctttccctacccccagcctgcctgcattttcctccatgtcctcaccttggctgccaagactgtccagacttggcagtaatttctgagaggtgggtttaagagggttgtaaatcctaggatgacccgtgatagccttctctctggacctttatgaactgggtgagtaggctggctccgaagagtggccaggaaatgccatgtctgaaggcagggggttaggctggatggtggtgtgggtcccagcctcttgtttttaagctattatgtatggttctaggcaattggtaactctatgcaaaccaatatatctgtagccacaagagggagctctcctcctgctgaaccaaaatgtaactaaggaaaggctgtattgatcacgtgcccctgcatagttagttgggacctgcattgagcaaaaccagaactgatattcattttcatttgctaagcttggagtttaggcagcagtaccagttgaacactcatctcttcttacaagtttcaaggaaattaaataagctatgagagtctgatggagatcaaaattttaaaaaaagcttaacagagaaccttagatatgttgccaaatgggtttgttagtgcttcactaccaagctatcccatgtgagtcccaagcagacctggacaaccactggcttcccctgtggggcaggcaacatatcttatggcagaaaagatgcatgtgtcccaaagacaggctgcccagaaaggaagggcaccaggagtggctgagagctgcatgaaaattttcttcttcctctcaggacttttgttttgttttgttttaagagacagagttccactcttgcctggtctagggtgctgtggcgtgatcttagctctctgcagcctcaaacgcctaggcttaagtgatcttcctgccttagtcttttgagtagctgggactgtaggaatgcaccattatgcctggctaatttttaaatttttttatgcagacaaggtcttactatgttgcccaggctggtctcaaactcctggcctcaagtgacctccctccttggccttccaaagcactaggattacatgcatgagctaccatgcctggcccctctcaggacttgtggataaatcactcttcaccccttcctctgttagggaggaagggtgagggggaagaggcagcaaatattctcctatatgcttccctcctaggaggaagatactccctctcttctatgaatgtgtgcagtgagggattaatctccccccttccatatttttttctattaacacattggatctgacatttgatcttatgatcagtggggtattactgttgtcctcagcagttttaaccttggtcccaacttgtgaagctattttccagataccagacactgtttcttaatgtgttctctagtgcccattccctggggggctgttttaactttagttcctaggtcacctagttactgttaatactaagactgaggggtgaaacctactaagtgaatcatagataagacagtaataactctcacccagccctgagtcagatgttcatcttgagggtatctgtctccttggaaggattattgaactgcagaaagataaaggtggacaagacttctctgaacaagaaacacttttgggagacccaaaacttgttgaatttgaagcacctagtaagttctaagtgacccttgtttacctggacctttgtctattagaacatagtactgtatttgtttataaggccacagtagctgctgtgactggctaagattttttttaaagggtcttgtgtggcaatgtaacctattcatgtaggctgagccagaagctcctatttctccagatgtccacaaggccatgcctggtgactgcttctcaatgttcccaggctacataccatggctttggggtcaggcacaccactgaatagtatcttttctctccccttgagtctgatccaattaagatagtataagaaacaggaatcacatagctagagatgaaatgccaactgattcgagaaggaggtttcaggctgcaataaaacagacttgcatacaaatccctccaccagtgctgccataaactgtcctaccccagctcaggctgagctgagaaacctccctagcaggagaggatgctttcctcctgacctacagagaagaaaactctgaggcctcaggaagcctggttcctcccttctcagtcccaccttgtggtcttctataggaggaagactgaggcgaggtgttagagaaaggtcggtgtcccttataagaagcagaaaatatctcttctgtatggaaatgagagtgaggatatacagttccttcaactctagaatttattttagagtatcaaaaaattaaaggctactatttattttaaaaatatccttgtaccagagagtagagaactccaaatctcttttggaaatggggctccatgtttcatgttaatattctgggtacctggtgtaaggtctggtaattatttgttgcctgatatttagaatacttttttcaaactgttagaaagagtagatcagtaaaacgaaatgtaaaaagaatacggggcactaataactttttatcttactacataaggaagttaaaaaatagtaacgactacctctaatgttaccatcatttcacaaaatattttacatcaaaaaaagtaggaagaaaaacattatagaataaaggatgaaggcagttttgtgaccacacacctacacaccaccaaattgtgcttatttttctcattttgcagtcatctaggagaaacttgtcatggtctggactagcctggcatggagaagtcccagatccgtctgtgatgctgcccagactttagagatgccataaaggctacttagtatgcctcactctttgcttgttactttttctgaacagagctctgtcagaaaaaattgtctcggtcctgccaaggatgaaatgcccacaccagctggagccccaccagatccaggggatggattttattcacatatttcctgttgttcaggtgagagcctctgtgtggtttcttgtcctcttaacatcagaattcctgtgatgggcctggcttgtcctgtaatgggtccgtctgtcctggatcctgaatgtaatgggtgtggcttagatttggtacagcagaacatggtggtgttcgttgtcgtcatcttcagaagattgccagtcctgcatataccctagtttcatgctgtcacctgataagatctttgaatgttctcatctgacttttcattgcctttttggtaaaaacagaactctgtagcctggtatgctctgttcccttttgacctatccagcttgatttcattccttgcttttctttgttctttttgttctagcactctctggcattcattcagatttccccaggtttattcttccacctgtcacagtgcttttgcgttgctagttccttgggctggaatgctcttccattctctccttacctgtttaattcatatggcttacttcaacccttcagatctcagttccaccaaacctcttcaagaaagccttccctcatccgctaatccacagcatgttcctttatggtatgcactcctacggccacattcctttccttcaccagaatcttacagcagttcataatcatgtgtatccatgtgtgtgtgattgtttatctgcttctctcattagactcttaagctgcatgagagcaagtctgcatggctgtcttgcttattgctttgtttccagtacctaccagaacatcttacaatttgtagatattcagtccgtatggctaaatgcctaagggagagacttctctttgcctccagctgtttcccaaacccctatgattaagtggctcgtgctgtacagctcccaaacagccggccctccatattcgcagctccacatccataaattcaacaaacaatgcatcaaaaatgtttgggggtgggtggggggaaacacaataaaaaataacaatacaacaataaaaagtaatataaatttagcaagctggaaaaagaaagtaataaaaatttaaaaatacagtataacataactatttacatagcatttacgttgtattaggtattataaccttagagatgatttaaaatataggggaggatgtgtttaggttgtatgcaaatactgtgccattttatatcagggacttgagcatctgtggattaatatctagcgggtcctggaacccatccaccacagattccttgggacaactgcattctgtgcagttcttctcttcccctctaggcatcttagaaagaggaggagcaaagggactcaggtgtgttgcccgctgtgtgaacactacttcccatctgactctattagagttctttgaagcgtttattataatcccttacatttgaggaaagtgagaaatgtaatttccttacatttgggaaaaatgagactgagagaaggtaattgatttgcttaagggcggagagtggacaaacaaaggttccagtctaaactctgtctccaagcctgtgctttttccactccaccattcatgcagctgctgagaaggaagctacacagcccttgaagctagaagttctctagttctgtgttaagattttgaaatatagggtcaagagtatggaccctggagacctcctgggttcaagttggtcgctttctagctgtgtgaccttgggtaaataactttccgtctgttaaatagaaataaataatagcacctacctgataggatgagaattaagttagttgtatgtctaaagcacttagttgaaagactgaccattttagtaagtgctctctaagtgttacatagtttgttactgttatgtgttgagtcttcccctctgctagacttcaaagccgaattccatgaaatttgtaaattcgaggccaagactttaccttaaaatttatttgtatgtttgttagcctttctgtctttcttatgcaaggggacactacctgatcatttttatgaaaataggaagttggggccctgtgttgattattattgaaacctccaatatcatcaaactgtgaagttgttacctttcccccaaaacatggatctctagagattagaccgtttttaactaggactttggaggcaaaaaaatctagtcaggttgtgagaagaattggaagtgatcttctgcagtcagttgggtgttttgaaggtctgaatgttctccattgtgagtggaatgctagagggtctgtctggatgggagggcccaggctagtggttacaatttcttaatttcatggacctgtaaaattttaaagcaaaaatggagattggcctagggttgccacctgtagttttccaggtaaggacactttaaaaaataactacaatcttgctttatcatttcataaaataatggccatttaattctcaaactcaaaaaaaagcagtccttgaaattaaatacatttaactatgatgaaactcaccatgtgcctgtagcttttgcctgtttttgtttgttttgttttccccccgggcactcgtgaaagaataatcactggccagcagttgtaagccattgacctacttctcttatgtgattctagaagcccatcatccgtgttcacaccattttagcaaagctgtagtaactttctctggatgcagccaagaaaaaagcagatctaatttctggcccctggtagttctagatcatatctttttctcctgggttggacatgtgactcctgtgaaggtcaatatttttcttgagtgctagggaacctgtggcagagctaggctgtccaagagtttccctctatagcctttcatgctggaaactccaaaacatctgttaggactcaacaagctttcccttcataatgggatcatgctctccaggatccagccaggcggtaacacagggtagatctgggattaatgggagcagctctgaaagggaagcagatgtgaaaagccagaaactgggtctcccaattcaaaagaaagcagggctgaattgagttgagcaatgagccaactgccttagttggcccttagttgtcctggaccacttagttttactgggatggagtacaggtgagggactacaatcgttctcaatactctctgatcttctgtctctgcttctgcattttagtctttgcctgaggtcactgtttgggggtgaagtggtagaaatatatagaagatactgacagcaaggaatattcctcagagttatttgctctattctgagcagctatttcctaaacatgtgctttacttgagctggctgcgctttgtgaacaaacatctgcgggaacaccgtgcagcacagtgttatgtgccatgtgcctgctttcctaggtagctaaccctcaccaagtgttatatgctgttggcgaaacacagctactatcccaaaactgcttttgagatgcagtagctttctctggagagggagtggcaccccttctgtgatgttcttcagtaataaagggagtgaatgaagagccggggaggagaagcaaaggttctttttacactttacacccttaccctcagagcgggtggatcttctgcaggtttttaccctcagggcgggtggatcttctgcaggtggatcttctgcagggtggtgttttaatgataataactggagttttcagttgggagaagtgaagagcagctgtttctgggtatcagcctaacaaagctgggaaacatttcatgaaaccatttgtccagtcttcggtgtagaatagtctcttgagttgtgactcccagctttgcagctggctagctatggatccatgagtaagttatatagtctcccggcacttcaggttcagtaaaactcagccagtaccatccgacattgtgaggattaagagagaatgttatgaatgtcaggataaaccagtgccttcaactgcgtactcagtatgcaccattgtcaaatctgagtattttggacattttttcacttgtcaaatggggagttacactagcattctctgtggttctctcccttttccctggtctgtcgtgtaaggagcacaagaaaaagagatttacatgaagatctgccagtaggaccaggaagttgggagatagctctgtttgttttgtgcttcaggtgtttacaaatcactctactacttgtgatttcatttactcccatgttagctctgtgaggtgaagggaactgatatacttttacagaaaggaaaactgaggctcaaggatgtgaagtaaggctttaaagctcctgcacggctactcagcactaggtcccattggatcttaacatcttggatacccagctggttgcttttcctatagaacagcatgtgttgatagcttcttatcacctagtcagttcaactatgctgatttgagttcatgagttgggccatgtctgaactggccttcacttcagtgggatgttgtccttagcaactcttgtcttttcactttcttccccagtggctggtgaaacgagctatagaaacaaaagaagagatgggtgactatatccgctcctactctgtatcccagttccagaagacttacagtctccctgaggtcagtattgtgattttattttcttgtcccactgagaaacagagtgcacacttaagagactctctagcaaggagcagagtaagctcaggctcccctacattctcagccccacttggcatcattagtgcttctttacatagccactgagtgcaaagctctataattttgtcatcttctctgaattttagtgtttgatctagagcttttattaacttacaagaataatagttgatttttgtattaagttttttgagaggccacttgcccagaacatcctatagtaacaatttaataataataataataatataattaaaaacaataatagctaatagccatcatgtatttactacatgctagtctcagcacatcttatggcttttattctttaatccttactgcaacctgagatgggcgtttttatctctgtttcatagacagagaaactgaggcttagaggttaagtaacttacctgaggtttcagtgcttaagaggatttgaaatgagaactctcgtcttaagcactattccttatgaccccctttttcttactggctgtgtagggatctatgttggagccatctgcagggtttgtagccttttcccatggagaatatattacaatttgttcgaaaattgagacttcgtcaggcaaagtagtgatgagatgagaagtcaatttataagacagatatctgagtggtccacttgagttttaattttcccttgggatttgtttaatcgctctgttttgtcttgtaggatgatgacttcataaagagaaaagaaaaggccatcaagacagttgtggacctctcagtaagtcccctggccgtattcttctgtcagagtcctgcgtagcctcagatagccctttgttaaatcacaaaagcgctgctcctgaggcttccatctacggggatcgcttaggagctagactcagatggctgtgtgagggaagccccgcctgctttactgctcagggccaggacaccagtatgcacagggagaacctgccacactactgttctgtcccctcacttccacttttaagggaggaatagccaaacacagagcccttcctagtttatcccaatggcaggtataaactttgaatagctctgaagagcagatgatgaatggggatgataacttgaggtttctgtcccccacccccttgatggctttgcatagacagagtagcctctgagctgtgtgcgggaagctctgggatggcgtttgtccccattcacagtacgtcttaatcacaatgagtctgcacatgtgtcccaacttcgccagcacaagggttagtggaacctttgaccctttataaaacactctgggccagagctgtggaaccttgttagctgtaccctccacccccagccttcctacctgagctgaagggaatgaagcctaggtgcctgtgtgcacagtctctctctcctgaaaataatgtgttgtgttgttttgcatgctttttacttcatctaaattatgtcatacatctagttggttttcatagttgcatagtttcttgtattaatatgccacccaaatgaaatatcagatgtacttcttatacagatggcatgggttacataccttgtgtcattgtaaagattggcattgcctggtgtttgtggctttgtgaactgcctacagagtctttccagaaaaagaattccaaactggcttatcttaaaaataaatgtgtggtctaccaaggtgattactctgaaaagaacaatcatttggtaatgaaagacatggaaatctcctatgaaacaaaaaatcttgatcactttatggttgtaatttgttttttttctcaattccattttggaaatgttagaggtggaaaacctttgggaaggtgacactcaaaagccagatactgttttcagatttggtggcagtattaaacaataacaagaaaaaatgatatgacctcagagtaattttctttcctggttgtgaaataggtgttcagtttagagcatcctcaagtttttaaaaagattgatagatgtaggggaattaaagttgatttttcaccttaatttcacaacacggaagcaaccgcttttaatttttggacatatttcttccatgtttttattgtgcatttttaaactgaattggaatcatactttaaagataattttgtggttttttcacttaccaatgtaggggcttttgtatgctgttaaaagattcctgctggcttggcacagtggctcacgcctgtaatcccagcacactggaaggctgagacgggtggatcacgaggtcaggagttcaagaccagcctggccaacatggtgaaaccccatctctacaaaaaatacaaaatttagctggatgtggtggtacacccctgtaatcctagctacttgggaggctgaggcaggagaattgcttgaacccagaaggcagaggtagcagtgagccaagatcgtgccattgcactccagactgggcgacagagcaagactccatctcaaaacaaaaacaaaaacaaaaacacaacaaagattcctgctaactacatttctcatgacaaatagtaaccagttagttggatatgataattgctttcccctgttttaaatgttacttcatctctggaatgatatgaaaacaaggtgataatcatgttacctctgaggcaggaaattgctaggccagcagcaggagagaaggggaaattgtctttttcctataatctctgtactatttgaattttattctaagtctgtgcattacctattcaaaacagtaagtacacattaaggtgttttttgtttttttttttggtaacaaaagccacattcaaacattaatttttttttttttttttgagacggagtctcgctgtctcccaggctgaagtgcagtggcgctgtctcggctcactgcaacctctgcctcccgggttcacgccattctcctgcctcagcctcccgagtagctgggactacaggcgcccgccaccagacctggctcactttttgtttttttagtagagatggggtttcaccgtgttagccaggatggtctcgatctcctgacctcgaggtccgcccacctcggcctcccaaagtgctgggattacaggcgtgagccacagtgcccggcccaaacattaaaaatttttaatgcttaatcgaatatctttatgtgtaaatctcactctgagccctgggtagagaatgagaaaatggtacagttttcggccatagagcaaaagccagcatagctgtcaatcatcctggtaatgaaactgagcctggcatctctatgcctatggattagttaaagcccctagaggcacattattttttcttctcatttttaatggaggtttttttttttaatccacttctgcttggtaatgtggttgcagagaattaaggaatatgagataatgacagatatttacatagtgcccaaacattgttctgggtgttcatctctaactcatctagtcctcacaacaatcccatgaagtagtagtttgttgttgttgttgctttttaataaatcaggaaactgaaacacaggtaggttatatatcagttgcccagtgtcacaatggtgatggtagaggcaggattcaaacccagtcttgtaactgtgctgctgtgagcctctagataaaatggtgttcgcagctgatgagaaaatagtatcagaataaaggaaaacgtgtccggcctggtggttcatgcccgtaatcctagcactttgggaggccgaggtgggcagatcgcttgagcccaggagttcgagaccagcctggccaatatggtgaaaccccatctctacaaaaaatactataattagctaggcatggtggcatgtacctgtagtctcagctcctcaggaggctaaggtgggaggatcacctgagcctggggaggttgaggctgcagtgagctgtgattatgccactatactccaccctgggtggcagagtgagaccctgtctcaaaacaataaataaaaaggggaatggaaaaaaattgtgagtccctggttataatttgtattgtttagtttatttccttttttatgagtgaacttaatcctcagttgattggcaatacattttcagcaggaatgataaagaatcttcatggatggctaaaggttgcctttgggtttttcttttcctcatctgcttaaacacccctcacttccaggagctgtctgcgtaggtttcttagcgagctctgtcaccattaactttcctccctcccttctaccacttctgcaagcccttctttagctgacttgaaatgagagtcccaaaaggtctcagaaactctagggctgtggtgcatatccctgacctattcttgtgagtcagtacaaaaaattaaacagctcaaaactttaattattgtcatgctcctcaaggaaaatccctcctttaataaaggaaaggaaatccttaattttaagttgtgaatggaaaattaaggaataaaataaggtcagacatgtagatgcctagtttttagacccagcgttttataaaataggtgtggagctgctgtgtatttattaagtgcttaccaggtgcttggcatctcaataggcatttaacaagcattagctcctttatccctcgttaacactccaggagttatatgttattatttccattttacaagtcaggaaattgaagcttagaaaggttgataaattccctgtgtagctgcagagctaggaagagggagtcagattttgacattacacctgactctaacacagcaggtgtcggcactcctcctctcttctggcttttcacctgctctctgctttcccacatattcctagcaccagttttgcagtactattactgacttacttcagggccctgggatattgcttctctgggtcccagagactcaaatgcctacagagtggttgggtcctctcctaccacctcttcagttccttacgagaacattggctgatttctcatctgaagacctgttgcccagccaaagaatggatgccaggtgggagctgtcctgttgttatctttttgatcagcatgatgcctttgtgtctcaaccaacaggcttttacttattcttgtttagacataacataaaagtatttaaatattgaatctttagcttattgtctttagccatccttagaagactgtttgaattttttgcattcatctttggttatgtggcccattcatttttttggtgcatgattttttgttttcaaagttttttttttcttttgtactaatgctgttgtaataagaatgaaaaattaggaaatggagaaaaacaaaaactaaatcacccatgataccacgagccagggataaccactgatactgcaagcaggaaataaagagttgtgaatatcagtatggagaatcagagattgcaaaaaaaaaatggcattgtactatatattctgttttgttgcttgctcatttgttgcttgctcattttgctcagtagtatattgaggatatctttccatgccaataaagatacctccatagcatttttagtggctgtagattattaattatgtggaactagttcaactatagtttgtatctctgttttttttttttcttcacttggccattatgtaggacatcctcatagctaaatttattcttttatttctaattatttacttaggatttattccatgaagtggaattggtcaagattatacctaaggcttttaatacttcttgccagattgccaggcagaaaggccgctgtgaactttatcatccgagcttatgatgggcgtgttctgtttttgtcttggctttatttttcttccttcaggagattattcccagtacctgctttcttctttgaagtgcattactttcttctccctatctcctttgcacagaatagctggctgctttgtagaaggcctgcccaacaggaggtggtattttcaaaggacataaggagtggaaactaccaccttccactttcacatcataatcataatcagctcctctgtctcatgtactgtgctgtgacacagcttcctcctctgagatgtcagccctccatagccatgaagtgtctgtcctgtgaagtgaggtcttttactccctcttaaccttgaataacaggtgcccacacagttttatccagacccaaaagatacattcatttactatttgtcagcatttttttggtagtttagacttttgtatgagaatagaggggacagagaaaagacttcttagagcttccagactagttggaaagaagtgcactgtggaacttaccggatcatctaagagactgccatttaaagttaccagtccagtgtgttcttccatagggaatgctgtgaggaagtccttttcattcagcttgtaaaatataaatgtagtgaactaagtaaagcaatgttaataatagtacacatccatatgcatgtaaatatgtatatatcttagcccttactatatgtcaggtactattaaatataccgattagtttattttcgtaacagctctgcttatacctaatatgcagatggaaaaccacagaggttaaagtaacttgcctcaagtcagagaggtatagtaagcaatggagcaagcattaaaactctagcttgtttgactccatgtattcattcagtaatattaattgaacacttactatatgccagaccatgttcaaggagctgaggcaacagtagtgacattccagctagtgaggagtttgaggactgatcaagaagaacgacctgactgcaaggtggcagtagcatatataagctttctttgggtgatgctttgacaggtttgcttgcagggtagaggagtcccttataccatgagaccatccagaagcttgcatgcaagggccacatccagagtaggaggagaggaaaggaactctccaagatcatagaggaggctcatgtgtcttggtgatgttgctcagcatcacacaggggggagtctgtggtcagagacctatgaagagccccagtggcttgaggtctacctagccatagggtttatcctatccgtggttggaaaatgccaacagttttgaagggtttgcaaagtaggcaggctctaaatgacaaaaagtctgattatttaggctatgtataaaacattttgatatgtaaaaatttgagtttgtgctggtcaacttttgagccaataggtgtcagtcttctgtgaagaagtaaacaacccaggagccatctttagctcatttatataaccctcagtgatcttattcttacccaccaagtcatactgtttagtgcagactcaaggagacctgaggtggggcttgtgccatacttcaaagagcagaagatgtatacttacatagcagagctcatgtaaaacaaaatggaagaacaggggtgaggggtgtcactggaggaaattctacagaaatgattgccatccatccatctttcatcatttctttcagtcaatacccaggcacttcatttttgttattttattaatgtgagaatttttaagaagcacttatttgtcccatttatagtaactttttcttatgagatctttcaggacattgcacttggtggtgaaaacatctatggggtccctttaggtgaaaggcagaattactgacgggacacataggctaagtaagatggatctgttggagttgggtttgggctgcaaagatgaactgttaaggtcaatggaaagtatcgcttcctgttgagttgggcatgggctggcccacaggagcttttgagtgtagaatgccagattggcggtggctgtttcactgcctgctccattatttcaataaaaaagttgtctatggtaattgtgagggaagcgatcagggatttgctgcagacactgccatggtactgtgctgttctacctcccttccctgcattgaggaatgtgaacttagagtaattactctgacaggtgaacctgacttgtaacccagacatgcaaagtagagctctgactctcacagtgtaagagttctctgctttacaaaagggtcaccttaatatttaaccctgtgtgtgtgccttttagcatctgcaaaaaaataaaataaaataaatacatatatcatatatatatatatctgatatatatatatgtatcagaacctagataaagggtgatgaaagtacaggtatgagacattttgcagagtgcttaagtgtctcagttctggagtcatcctgtttttatcgcttactgcctttttcaccatcagcaagttttttaacctctttgtgcctaagttcgtctatagaaagataacaaggataactacactcagatgtggggatcaaatggacagcacagatacagcagaatgtgcctggcacatacctactattcaataagtgataactattacaattgctaccactattaatgacagaaggataaattgattttatattcctttttaagagcacatcatggaaagcatggtagattttttattaatctcagactacattttttaaggaattatgttaccaagccagtatctttacaggattaaaataatacaaaggaagagaccctgggagcatccttcaagatctgttagtacaacttcattttatagatacagaaactgaggcccattgaggggaactgcctttctcaaggtcatgcagctgattagtggcagagatagggctagacatcagcattcttgaccctgttgctttaaagggtgacttagcaatagctctttatagttggcctgtaaacccctgatatttaggttgcattacttagcttcagattgtagaatgagtcttgtgagagggctagctgaaatggctggtgggtggctagagtggcagcctggggcaaggtagtgtcagggacaagccttgaaatgagaaaccaggttacctagggctaggccgcgtagtgtcccagggatcttggacaaattattcagtgtctgcttcctcaatagtaaagtaaggttgatggtatgtgccctgtctctacttcacagtgtggtttataaagtgtaaaagaaaggtgagatatatatgaagatttatactttaacatgtaaggaataattcacaaaagccaacattgtcattgtttggcggaataaaaggtccttttagctgttggtgtcagtatgctcttgttttggagtcaatcctttttttttttttttttttaatagaagaatccaatttcttgccttgggttactgactctttcaattgtaactaagtacaatagcagttaagctcaagctgtaatagtagagctcagtggaagctaaaccaggcacagtaactgacaccatgtaggttgattatattttgcatctccctgcaagtctgttttatgttatttatagcttcctattcgtgtagacaccagcagtaaactggggaatatttgtggcaggaatttctaagaacaacctttagcatcatctcaggccctgatccatttccttttccacaaaattgtttgagattatatcgtatgtgttacagaaagaatgtttttctgtatgctcgaaactgtatactaaagtaaaataataaagttaaccagaattatccatggggaacaattccaattaaaataaaatgccagtatctggtaaaacctggtagtaatgctttttgtggtgatatccaggtaatgattagatgcagtaaacccgggtagtagggaagaagagagatgtggggacaagcagcccgaataccttgctggcatagcagctgcctacctgcacccggagacctgagcagatattactagggtattatttgacagccagcttagcagtcaagaaggacattgatttggggtagcatggcagaccacttcattggggctgaagacctgcatttattgatcacttactacatgccacgtatttcgtttaggatatatatgtgtgcatgtgtataattttaaaatataccccacggtagaggcagagctgttggcagtgagccgagatcgcgccactgcattccagcctgagcgacagagcgagactctgtctcaaaaaaaaaaaaaaaaaaaaaagagaatataccccatggctggaggcatccagcagccaattcaggaggagagccttctcacactcagtaacttggctgtctcatccacttaggaagtgtacaagccccgtcggaaatacaaacgccaccagggagcagaggagctacttgatgaagaatctcgaatccatgctacacttttggaatatggcaggtaatgagtgggacccagtctaggtgtctcttttaaaagaaaagctaatttaagttgcttcatttggattaacttgactagcttctacccgattgagtttctgccttcagccatgagatttccaacatcagggacttttctctggtaatgaattacctgtttctgtgggcatcctttgcaattcctctctggaaatgtgcacctggctctgccttcctttgggagttggggtgttccaggcatttacagaggctgaggtactctgtcctgcatgcccctgtttgttaaaatcttcaggtaaatgaaaacagtttcagtgatttcactttaagtgttagaataataatttcaatttcctgtgaatattgtcctaactaggaaaatgaagaacttagaagtagttttgtcacttcttaaaaacatctcgtttaaaaaaaaaaaatcttattttatatccttagtttttactttaaaaaaaagtgcaaggacatgcttctccccattgaattttttgcttgtcactgggtattaaccttttatgtcacgcattctcttctcagggtaactgattccttgatgtgagtaagtctccttgtgcttcctttgtgttgggagaggctcctgtgtgctgctctgcctcacagcccaacccttgtagggtggctggaactaactgcattgccactggcgtttccctaagtgagcatctgatggctttgcctgccctctagggtaccagagagaaccagcaggaaattaggtttaattattctagtttccaaatggaattgcatgcaattgcttatgtttttttttttttgttttgttttgttttttcttcctaagaataaaaactagtctgtttctaaggaaattgaagtagttctggccctaggctgcgtgtgatggctgcccccacagttcactagttgctgctgtgaattgaatgcctcctccaagtcaggcatcaccaggactagctatgtagtgaaaatgccaagtaacttgttagcagttattaatgatgattaattattaagaatttaaagacaacaacaacagccaagtgagaactcttctaagcatggggccctgtgctagtggacgggttgtgtgctcaggaagccagccctgggaatcatgacagagtctgtctagccatgcccagctgtaagtgagcaggtgaggctgcacagctctgggagagccagagctggagagacaatctctgtgggtgtcacgtgtcccagaatgaagaagttcttggcagaatgtagtggattttgtgagtttgtattatttatgcatccatttttccatcatcatggaaaataggattttcctgagggtgaaaaggagttagaaattcagtaaattgcccacctcgctgagaccatgttgacagaattctagatcagtattcttgttctgaaattctcaggttcaaatgggatcttttgtatatatgttgtagatagtagctagtatcaccatctgaaggctgggaaagttcagaacctccctgtctgtcatcaggagtgattgatgcagtttgaggtgagaatctggcttggcctctttaggaaaggaagcaagacagattttgcttgactcttctcaaactctgagagtgagaaagagcagtgtcttgataccaatcctggttcctgttggtatggtcatgctgacttctgctaatttctacggctagggtgggcatttcctgaaggttttaggtttgggggttttttttgggtgggagagagatgttattttgtttttttagcttttttggcaaggagagggtaagtttgtggcaggtggagtagtgggtacttaggacattctgatagtatatttagctcattctcctctttgagactaataatgacaacattcagaaaggttaaaaaatgactttcttaaggtcataaactataaagaggctcagattggcacttcaactaagataccttgaacttcaaaagcatgtcattatcattgtctgcaaatactgtttgagccttcagtgagagtatatttttaggttctgagttttaggaagactgggcatgtctattctttggtctgaaactaaataagaagagaatggttattaaaactgacagagcaaatcagataaaatgtacagccccaacaagtgtgtgttctattccacctccctgggaaggcttctcccttcctttctggcagtctgtttcctctaggttctgttcagcattctccactgcatggagatctttcccattaaatgaggattatatgactatatatataattttgagcagtttgttcaatgtagaaaacagtaaatgttaaccattggctgctgtcatcattctccttattataatcatcattattagcagcaacagttcagttttcaaatgccctcagatatgaccttttccccttacagttctccttgtccttgtgtgtttatgtatgagtgaagaggggaagcttccccttggccctctgaaggttcactgaaaatgaactgacaaaaggcagattaacaggagaaaatggcatacataatttattgtgtggggggaaaaccacagaagtgtgactacccagtaacccagtgatgtccagatgcctatatgtccttcttcacaggggaaggcagatagggaaatacgccaattggaggggtagtaaatgatgtttaggggaaatgaatcagaccatggttaataaatgactttctggaaattgaataggatgggaaacagaccatggtttgggttctaggcgtggtatttaattttcagtctcttgctctgtggtagataatgagatttcagggagtggatggaagacacttgtgttttctttaacgggtccagtctttatatagataagagaaaaaaccctgttctaacatgtgaccttcaagtgcctttaattcaagttattcagcatattagggtgccatatttgggggcaacagcccgtggactccttcacttattacccttcacactagccctccctctagcatgtgtatgggaagtctggccttttctcccctgcccctgtcaaacaaggctggccccctgctggccctgggactcactttgctccatcttccctttccctttaacattgcggcattcctgacttcctcacgcacccccccccccactacactatggcatcacagctttaggagtccagatctctcttccagtgtttctattttctaccttatcttacctcttgtcagggggaaagtattttgacttctagagcaagaaggtctgaaatcagtatttcttccttggggttgaaggtcactcatcagcgttacacccacagtgccctttggcttttaggtccgcattccatctccttcccccattttgactctcagttgcttaaataaaggtgaattatgaaccttgtcaactatgctgaaggccttaaggactgtttatctgttaaaaacatagtttgggtatatttttctaagtgttaatggtgttaggaaaacaagacttatagttttgattttggatgtaaacaaaattgcacacctataatatttcagttttgttatgggttcagtcaattttgagaggctaacttaagcacctaaccgtgctatgaaactgctactctggggaaatgcattttatgtgccatatatttgacttgcaagaggaggtttggagcacagccaccagaatgctggagttagcctattcctcagtattcaaagcctaattttgagttcttgaagtcattctaggcaactcaaagttaggccttgaatactaaggaacaggctaactccagcattctgtagttagtaaataaaacacggcatacctctcccaacctgtttgtgtctcctatgatgataaggcctatgacatgctcataaaagatatttagtaagttcttgtcaaatgaataaagaacaaagttcacagtccttggtatttagggctttttatgtccctattttgttttatattccaaatagataaccatcttagtttggcctgaggtaattgttcttgaaagttagtttgttttctagaattgtggtgtccagtatggtagccactatccatatgtggctattgagcaattgaaatgcgactagtgtggctcaggaacagaattttgattttaattaagttaaatttaaattttaagatttgtgcttgatttagttaatggaaaatgtttatctttggaataacttggtcatatgaacctactaacctagtaattaaaaaattgtatgtgtgtccttctttatatttcttttgtactgtgctgttctaaatgtacatccttgatttaaagactgggtcctatgactaaggtaagaagaagtgaactggatgatgggaggagctctttggtgctaacagtgtaggtagcaagaatcagagctaaagaagaggaatgcaggagcaaatggaagcatgcggcactgcggatcagagctgtcacttgggggaaacgggcagggctgacaggaaaagaggaaagcgaggcagtagttaataggcagttgaggacagagctttgtcatggaaatctcactactttgtgacatggatgaggcctttagaaaaatcatgtggactcttcattcatgcagcaaccattaattgagcacctactatgtgccaggcactgaactgccaggcaatggggatattgaagtgaatgaagctgtacatgaatatttatagtagcactgtaaatatgttgcataatatattgcacaattatgaatttagcaattcataattgctaaaaagtagaaacaacccagatgtctgtcagctgatgaaacaaaatgtggcttactcatataatgggatattattcagccataaaatggaattaagtagtgattcatgcttcaacctggatgaactttgaaaatattctcatgagtcaaagaagccagacacaaaggccacattttgagtgatttcatttctatgaaatctccagaattagcaaatccatagagacagaaggtagatcagtggtagccaagggctgggaagagggaagaattgtgattaactgctaatagtaacagagtttctttttgaggtgatggagcttttcttgatttcgataatagcgatggttgcacaacatagtgaatacactaaaatccagtgagcaatacactttgaaatggtgaattttatattatatgaattatgtcagtttttaaaatatttttttaaagtgaatgaagcaaatttcttcctctccagaggctcaacagaaaggcttagcggattactcatgagggataattatgttcaccatacaatgagtgcgttggctgtcacagaagctcacatctggagggcttactaaaagagtcttcccagagcctctgtctttaaggaggagtagattcgtcctaggaatcaagtcactcagatttggttgttcacttccttatttggaaaatccgtgaagtccctgggccttagataaagggctttatgtcttctgccctaaaagtctccacagactaaaggcataaaaaaggaaagatgaatactcaagatgcaaggacactataggagtgggaaacttgggcaagaccttgtattgttcagggttccctggttgaaaaaacagtaccctcccactagtttcagcagaagggattggttacagggctggatgagaactaggctgagccagggtcagctctcaagcttcacattagaactggagctccaggatactgtttctgcctccaaaatcaggaagctagctagcagcctgtaggattgggaagctggtgctatagcggcttgacaaggaaggaaaccacgctgcttctgtcaaattaggaagctctgaaaaaccaagaagccactgtgatagctgctagccccagaacctggctgtttctactgtgatccacaccaacacaatggatcctttatgcttccctctttcctcctttaactgttccatattgaaaactctagcaaatgcatctgattggtggaacgttaacagtattcagaaccctaggtgcaagggagtatggaaaatagtctcttttccagcctcagcagtactagaagatgcaatagatattaagccagtccacagaatctgccataaggtcctttacagaattcgtgtggatagccaaaatttaaccttggtctgctacactttggacctataggtttatttctaaagggtggacatactgcccagcagtgactttttggtttccccagttatatgacaatctgttgcaaggtcagatgatacttttggcttcttgatttttgcattttttcacttatgtttagtttgtttgttcagtgaatattggaaaaaccagatataaaggtagaatctttgccctcaggagaatgatacagataagtaacagttgcatgtattcaccatctgggaagtgagaggagcatgaacagatgcagggatggataggccaggctgagcacatgtgcatgggggatgcttcacaggggaggagctttagagctgaggagtggagggtgagtagggaagcaggggcgagaggggaacagcttagtttgtgcagagctctctgttcaggtagtaagtgtaataggaacacagaaggtgctgctggtggtgaggtgaaacacttgttaggctgagccatggaagagaggctttataaggctcctgaggaggttctgttttcttctgagggaagaggcctgccattgataaatgtgcatcaggccaatgcagaagttggacaaggaatgggcaggaagagtgtggggagtgaagctggaggaccaagaccaggtgagcacacaacccagaagtgaggcacagagtagccttaaacttgttctttattttcatttatttatttttgagacagagtcttgctctgtcacccaggctggagtccagtgctatgatctcggctcactgcaacctctgcctcctgggttcaagtgattctggtgcttcagcctcccaagtagctgggactacaggcgtgtgccactatgcccagctgctttttgtgtttttagtagagacagggtttcaccatgttggccaggctagtctcaaattcctgacgtcaggtgataggcccgcctcagcctcccaaagtgctgggattacagcactttgcaggcgtgagccagcgcgcctggctcaatttgttcttaaatgtttgcattaactttattttcttacaaatcacttaaaggtgtatgaggctgggtggtttgcattttgctttttgttgagggttgaatggattttgcattgttatacttgctttttaaaaaaacatagattaattagagccagaaaataaactacttgaaactgaattgtgtttttgtgttttttttaatttaaggttgtgtgaagtgagtacacattattggcatcatgcttggattatgtttgggaataaaaagtgtgctagactctaagttatggaagtagccattaaagcgcatatttggcttaaggaaacacatttacatttgtttatatagatatttttaaggcttttagcttaaaccgtggctctgaaatgcagtggctgattcaaaaagtcataattgcacttaaggaaaatgttgcattccatactgtctgagagttccaatttacattatagtatttgcatagcaagtagggtggctggccctttattaaaaagacagtggaatatgtttgtaatttaggcacttgtaacgttttctcaagtcaccaaatggcataaattctcttgatgtttttcatgtaaaaagtcaaccaaaatgcatttcactgaatgtattgtaattttttaagtagtaattaaactccttttttgtggcctgcaggagatatggatttagccgccagagcaaaatggagaaggtaagaaaaacattgatagtaagagagaatacttgagagatggaagtgactcccttcacctctgactaacactcacaagccgggcagcagcttcttgggaaacccagggatgtgtgagctgcctttggcccctgcatctccgtcctggcttttctagctagccacctctacagattggggagcaaagcagcagtctcctcctggggctggaaatgaggggtgattgaaagttgtggcctagggtcagtcacttggggtctagtggctctgcagtatgaaggtgaagtccactgccagggctcccagagcactcctcatctgaggtgagactctaaatagatgtgaacaggatgttaggtagagcacagctgtgaattacaggcctgccctctgctgaaacagccagtcatggaagagccaggtaaatcaggatggcttttctaacttcacaaaggatgcccaaagatttctgttaatttatgtgtttattaatgatgcttcattgtcagcagcaggacaggtacataaatgttatggtgctaaactctttctgtgttccaggctgtatgttaagggctctgtatgttttcacttactgccttgaacaactctatgaggaggatgtttatttctgctttttaggtcagaaagctaacgctcagagaggctcagtgatttttccaaggtcaaatagctctaaagtgaacttaataagaatctgaacctagaggtctgacatcaaacctgtgctcatagccactgccttctaaataataaagtgtcagctatagtggtcagtggcctcttaaaaagttcagttattgtcaggagatcgagaccgtcctggctaacacggtgaaaccccgtctctactaaaaatacaaaaaaacattctccgggagtggtggtgggcgcctgtagtcccagctactcgggaggctgaggcaggagaatggcgtgaacccgggaggcggagcttgcagtgagccaagatcgcgccactgcactccagcctgggtgacagtatgagactccgtctcaaaaaaaaaaaaaaaaaagattggttattaacctcttttcattctccacctgatccccagatttcttgaacaggacacactccccctgctgttcccctgccacccactccattgtacccactccccaggctccccctctgcttcctgtgttgactgttgtctcagtcgctgcaggcaccagcagtgactaggagcactgttctaaagccagactagctggtttaggattccagctcctctattcgctgagtgactctggataatttactgattctttgtacattagttgacagcatctgtaaaatgggggcagtcattgtacctatctcacagcattattgtgaagattgaaatgtaaaggacttagaatgatccaacacatagtaaacatttaataaacattattattaatatcagtattagttattggtacttagtcatgtactgattatgatgtcttcttttttagttttctcattattttttccccatttgtgtttttttagtcaactgaataatgatttcctacagagcagggtgttttctggatttgagtatatcatgttttatctggtatataataagggtttgatgtgtatatttaatttgatatgtaatttaagtctgaaaagattgtctttatatatgactgggcaatttggttatgattggaaaaatcatgagatgtccctgaaatagtattcaaattgtgcttgtcctgtcatttttatgtcagacggcacatttgaattagcagtctcatcccctgtagatgtgtccaagcagttaggagctcggagtgttcccatgggcagtgatagactcgttatagaaaagcatcctagagttgggatggtccaagaagggcatttgagaccaaacctctcttttgaccctggaagtccttaacatgcagggatcagaggtaagcctgaggtcacccagctggtggatggcagggatagaattaaaacctatagcccatgattgaggaggcagcagttaatccagggtgccttgagtttgacctggttcatttagagcctggggctgagtccagagcatgctgcttgatcattagataaggcagttttcatccttcacaccagtggtattcaaactgttttgattactctgagcagtaaacgtataatttttcatcatgattcagtacacacacactaatacccctaaaacaaaagtttcagtaagcagtacctaacccctcactacaaagcactctggcatgttctgttgtgttaatttatacagatgctagttgtacctgccaaattacttttatgtcccactaattggtcttaacaggcagtttgaagaaacactcctttagtagtgatctgctcttgaaagtgttaaagtagggggaagccccagtcaaagtgcaagggtaagtcaggcaaatgtgtgtggcctgaatttaatcagtgagcagctgggacatggaaacaggcatttgccagttcctgaagcttaacctgcccaccctatactctagtggaggttcagccgtttggagtatccactctctcagggtgctgctgctctgcaggtctgtgtttttttcacagactcatgcctcttgtcagtattgtcctttctctactgagtctccatctcccgtgctcagctgttttcacatcttcccttgcaggctgaggacaagaaaacggcacttccagcagggctgtcagctacagaaaaagctgatgcccacgaggaagatgagcttcgagcagctgaagaggtgtgtggtccatgtaggccctctgaggtttctgtgtaagtcattttgggagaaatcgtactcttatccctagcgttcccaaatggccaccacctcccacagccagctgctgtgagcaggtctttcacaccttccagtttcattttatcacctgcctttgaggctcacataagacgagatcaaggaagacacccttggatatcaccgcaaagatccatgtaggcatattgcttctgtcttacatgttcagaaccactcactgctgctcccttccattcctctttcagcagcgtattcagtcgctgatgaccaagatgaccgctatggcaaatgaggaggtgagtgggagtcggggaggtgtggggatggggacttggcaccaccctgctctgctggggtcttctcccagagagcccaccttctccggagctgcctctcaccagcacacagtacctcctcttccccagggagttccttttgttaatctgtttttaatgcctagtgctgccacccatgggaacctctaggagggaggcttgaaggacccttgtgaaagcagaatattcctgctgggaggttcacagggcctctgcggaagagctagagctgacccgtgagttatgcctcatgctgaggcagctcttgtcttctgctttcttcctacactatctaggtaggaagcgggattttgagattatagttggtctttccagagctcaaagcctgtccagaaggtatagccaatgtgaaaggatcattctttttgaggcctgggaagacctgtggtagtaaagagatattttagagttctgagattctttgtcctttcccatgctcttctctattccctgtgtcctaggcctgccaaatcccctgcaggctctgtttggtgactctcaggaggtgagaccttggggtggtacatagaagggaaggaccattttccaggggtgcccagggtccgaggaggatttagcaccatccgctcagtgactcaggaggtagctgcgtgtttgtcctgaggcttcttttctccctttctgttggtaatatgtggcaaagccaaattatttcccctgggaatattatgttttaccataatagagtgttcagacataatagagtgttcagattttccagtgctatggaagacaaggcttggccttgagaacattccctccatatacttgcagagccgtctcaccgcaagctccgtgggccagattgtgggactctgctctgctgagatcaagcagattgtgtccgagtatgcagagaaggtaggtgggggcccagctggagtctgtgccccagataatgctccatggctttgttctcccacttccttaccccactaccccagcagtgccccgtgttctcttgtaactcaccagccacgttagtcagaaacacactgggctttaccatgcacaaccggctatcagcacttgcccgttagttaaattaattttgtcctgcagtgcccacttttctgtaaatataaagagaaaacctgtctcacagagcagttatcacatttgataaattcatgcctgagggtatgggatgagcattttttcttttctatcaggcctcttataacttgggctcagtttgatgattgggctagggaatgaagctttgccacttaggagataaaccccataactcagccaaacccgaggcagaattttttgttctactttattaaaagagtatagaatgaaggaaagcctgaaatcatatttcagagtttgctttttttttttttttccatcctaagaaaaggcaggaagaccttgaatatttcagggagacggtgattaatcattttgcacataactgattctggtgtggctgagatgtggtatcagtaaaatcagatttacaggacattgttgcacatccctcctgccccagccctgtccccctaaaatgttgatgtctgttgaagcatccagctttgctttccttttctcagaatcttttactacaaattagctctgccctgactctctgtgacatattcttctgaagtgattgcacaggtgatacagttagggaaaaattgtccccagtaatctggaggcgttatcagctataacacccccaagacttttggaaaacagttttaaatgcctagtgctgccatccgtgggaacctctgggagggagacttgaaggacccttgtgcaagcgaatatgagtgagtaaaacagcttggaatgtctcagggtgagattcctttgttttccccactcccccaagtaagtgtttcttaacatgggctttctagtccaatctcatagaatccagagtgtcctgtctttccattaccacctaggaaagatgacactgctcaaagtgtcatctgaaatttgaccagaaaaggatgtttgttatcctaaaagtacaaatgaagatgtaattatggaaacagtattaactcactgtctgagaagaaagtgtcttcgtttcctgtcagcacacacatctgaatggcaagagtgtgagtttatacccgcccttatgttgccacatagcattgctgaacccagtttttcagaaaaaaaaaaaaaatgacaactggatagagcacccactgctgtttctacagggagcacgtaggagctctgatgattgtaagaggaaaaagcaggcaggcagagccccctgtggttggcagtgcatctctctttccacacttttccctgcctaggactcctgaagctcacctgacttccccagttattctgcattttgcacgtctccttctggatctctctgtgtctttatctcctaataagctttttcttcctcactcttgaccagtgatctctatccaactctgatggatacattctggtttatctgtcttggaccattctctacctccattccattcttctagaaaagagtgaaattaggagtaatttggacaggaagccgtgccaagattttttctaaggacatatatgctgttgattcttgatcaacacaggtttggactgtgtgggtccacttacatgtggattttttcccaaccagatgtgtatggaaactacagtattcatgggatgcaaaaccagtgtatatggagggccaacttttcatatatgtgggttccgtacagccgactgcagagtatgcacagattttggcataagcaggtggtttttgaaccaatcccccacatatactaagagatgactgtagttaaacttccaatggagaagcggaggtgtcaaacattcattacttaattgtgttgttttcattgggtaggtagtatagcattaaagctgatggtttttcaaaattaaattgcctttaatcctattcccatattgcagttatttcacatttgcatattattttacagtgcttgttcccagatcttcatagttgtgtatagttgtaatcatcatatatgtctaaaagaggtaggacagtgagtgagtgcagtgattaaaaacacaccatttgaagccatatcttggttcatttctgccttttccatttcccagctgtgtgacctcggccatatatttaatctctctttgccctagtatctgctttataaaatgagaataatattacttttctgacaggtgttgggaagattaaatgaaatgtgaccaaaatgcctcaaacggtgcctggcactcttcagctgttgatagctttattttcattactgtagtcttcattctttttggttttgtcagatcacatcctaaatattttctagccttcccgtttatttatttttatttttctaagtgtgtgtttgtgtgtatgggtggctgtgtgtgtttcctgagataggatctcactctgttgcccaggcaaagagtgcagtagtacaatctcagctcactttagccttggtctcccaggctcaggtgatcctgccatctcagcctcccaagtagctgggactgcaggcgcataccaccatgcctggctaagttttgtattttttgtagagatggggttttgtcatgttgcctaggctggtgttgaactcctgggctcaagccatcctcccacctcagcctcccaaagtgctgggattgcaggtctcagccactgtggctggccgttcccatttattttaataactacataatttatgtgttaatacagcgcagttcattaaacttttttttgttagacacaattttaagttgtttctgtttgccattgtggataatattgtgaaatgtgatcagatagtttctgctgagaggttttctaggtgttggatgattggttatcactccctctgtgtgttacaactacgtaaaatactaacagttgtgaagggacttcccagcatatgcccccaatatttccagctttgatttttttgtttgtctaatttgttactgtagcaactataaaatggcagctctgtagaccactgagaggatcgaagatggttctgtgtaagtacaggttacagagaactcatccagtaccatgtaactaataagttccaggtttgaatacaggactgtttactgtgttttcttctctgaattgtctgttatagactatactcgagtaacgttttccttgtgaatttgaataaagtctatacttcagatttaaatatattgtcactgtgatgcaagtatttctcaggcactttattttacttttgtattgtttttcattatatacaaggaatttgtacccaagttggtcagtcttttttttttattcttgtttccaaatgagaggttcattgtttttccatggatctggtaaaatagttaatgcatgtcagctggtcttttattaattatgtttaattctttaacctatgtagaatttattcttctttagcctaaagtggggacctgtcctagttttcctattcatatccacttatcctactactgtttgtcagataatttctttctactcatttggagatacttgattctatttttatgtcttatagctaaactgagtatggcctctttcttgtattattggtttatacttctattttatgcagttctgtggtaaagtcatgcatggtgtttttgttatttgcttgatttgtttttgttttgtcagtgctctccagtcaaagacctagtttgttcaattaggaacatatctgtggttgaacaagttgggtatattgctgcttgtagtgagggagaacacataccaatgggaatcatggggcctttcagtaagaatgtgtcagaaaggacttagtataggatttggacttatgtaaggtgacttgaaggagggttcaaggaagtggggctttgctttgggttcgatgctgtaaggaagggtgagtctgtcaatgagtatcttaataaatcttatctctaagacatggggaaaatgaatcaaggttaaagctatgtatgtgtaatagctagtataggggatatttggtcatttttgtgattcggacaatgtttatgttttcgtccatgttcggacatactcatagtcatagggtggccttgtctggtattggtgttctttgaaattgtttatgttttgcaacaaggcctggttatgagtgcaagtcagcctcccaccaacatcaatgccttgctaatagtaccaggctagctttcagacgtcaggggctgcttttctcattctcacgttgtttgtgtggttatctgctattgtgtggcagtactgccacaaatgtagtcacttaaaataacacacatttattgtctcactgtttctgtggggcagcagttgggcacagcttagcagcaccctctgtgactcttacaaggctgcagtctcatctgaggctctactggggaaggattcgcttccaagcttacatggttgttggcagcattcagttccttgcaacctgctcactgaggtcaccagtttttgctggccgttagctggaggctacccgcagttccttgtcacatgagcctctcctacattgccacttatttcatcaaagctagcaagggagggcatctccctgcagggcaggcattatagacttacataacgtaattacatatatgtaatcaaaagactgccttttctctgtggtgtattctgttggttagaagcaaggcacagcttccgtccacacccaaaagaaaggggttacacaaaggcaggtgtgaacatcagcaggtgggaatcatggggccattgtagagttgtctaccatggtttgcttattggtcttttaatcatactgccacagattgggctgaaactggacactggcaatgctgccaccttcagggtctcagtaatataccttggaaatagagatgggattgaggaatgcccaggagggaagctgttggtagtatctgagaaaaactcacttaggctgagatcaggattttttttttctttatgaagagagggaaaaggataatttgcggggaggatcaagtgtaaaaatgattttgtgaccagggaataaattgaatagcctgccagatgtgagtgtttggaaacttcacaggcactgggatataaaaacaaggtaaaaaacatgtgcagtattctcttttactggtaaagttcacaagtttcttataagagtgtaacataacatgtatctcaaagttcctgagacatgtaactcaatatggttcttgtagagcagcagaaagaggaatgtgaagaagcttccagatacataattcatgagtgtccgtagactctaggctgagtagctccatctgccattgtttccaaagggtaacacccttccctgaatgtgctacaagaagtaccagtgtgcttttggtgttcatgtctaatattctcactgcatcatagcatttatttttacagggaagaagaatctattactctgatttacagaaaactgaaatgcctgactgtccaaaatatatttccgccctgcaaccccctaagcttgataggagccagaagaaagaaaaggaagctgggccagggaagttgcaaggtccctgggagggcaggaagggactttccctaatgctgcatactaactaaccatacaccgttttgaccgctttaatacttagtctgccaactaaatcattcattggttgacttctccctaagacaggatattggaacattttgtagctctaaaggatctgaatattttatagctctagaggcacagatttgtcttggtgaatctgaatctaccctgagtgcctctccatgcagattctttgtgtaccattatctcatttagttcttattttttaattctaaaaaattatctcatttaattcgtataggctgccttcctgcttataatcctctgccttcctccatcattatacttatatgcagttgaaactatctgtttatgtggctgtggaccacctttactcttgtctgtaatctgagagtctcgctaagggcccaccagtgttggtgctctataaatgagtacgtgatattatatccattttgcaggcaaagaaacgagattatgtgacttgtccagtgccatacagctaataagttccaggtttgagtgcaggactgttttgactttgcaatctttctccttggctaggtggagcttccttagggagaagcagggacagcctcctttaccatccttagtgtctgccttccaggcttggctgtggctgtgcctccttagactgtcccactattcaactgcctaccttgggctattggtagctagggcataccgggaactaaccacggaaacaagagaaagtgaaaatggtgcagctcagcccaggcactcacacaccataaacctaagctgctgaaagccgtggaagtttgtatttggagtatctaagtgactcttcatgtttctggagaataccacattaatgtggtctcatgcagttctttaaagggtaatatctggctaggcatggtggctcacgcctgtaatcccagcactttggaaggctgaggcaggcagatcacttgaggtcaggagtttgagaccagcctggccaacatggtgaaaccctgtctctactaaaatacaaaaattagctgggtgtggtggcacatgcttgtaatcccagctacttgggaggctgaggtgggattggtagcttgaacctgggaggcggaggttgcagtgagctgagatcgcgccactgcactccagcctgggcgacagagagagactttgtttcagaaaaaaaaggcagtgggaggtaatatcctagcccgaagaatgtcaacatcttgatctcatttccatagcaaggtgtattttagatcatcaagggacttatttgtggaaggaatttttccttaatgggttttggaaattttcctgtccagcaattaagaaattctggcaccattgcctctgaccttttgattctgagaatcattctctggcagttagaagcctttgctctatcttgaagtcatatctttccagagcacctggggaatctcgccagataattagagcttgggtatggtcaaggatgtacttatgaaaaaacacaaaggaaagtgtctcttctagaaaaagcagacagccacatttgattagagcagatcttgtccccatctatcatgatgatttttattccactttatgatgcaatcagcagagaagactgcctcttcagttctgtcactcactaagttggaccctttgccttttaagccttttgggtgcaagtaataggaattctacccagcatgttgctataagcaaaagggagcctttatcagctctcagaactggaagtatttagtgggggactcaaatggccctgccatatccctttacccttgcttcactttgtctctgtcttggcttcatcaccttggaggcctgactgtagacagtttctgtcttactgcccccttcctccatcagtgtataaaatcctaaggaaggactgtcctctgtctgtcatggcttaggtcacagatttctccccaggcccattgttgccaggagttgggtgtgactggcagcccctctgaactagaaagagtaggagacagggattacttttctaccaacagatatggggcacacatggtggctagcacccccataaggccttcgtttccactaggccctcaggaaatttattcaacaaagttggagggaattgacccaaaagaatcaattgttaatatatcgtttgtcctcttagtagttgccttcacgttgttatttctccaccctgggtttgtaactcttacactttttccaaacgtatgaagtcttctgaaaatatatttttaaattaatacaatctttttatattttaagtctttgtttttttttttctgccagagaactgatggaattgacctcataatcactgtcatgtgaaagagtgattagatatatttcttctttcagcaaacacctgttgagtagatctgcatccaggcagtgtcaggtgtagggggcagggattgcgttacgcgtgagtcagggttgcggccctgaggggcttccagtaaggagtcagtcaacctgtgaaaacataaattacagaataatacaatttgtatgcctataaagtggctgccgggtgctactaggtttgtgttatcatttgaagtgacagtatctgcccaaagaaaagttgttgatatttttgttgatattaaaatatttttgcctgataataaccaggcagaatggatgacttttaaaattataccatggggttagaaatggaaaagggaagggcttaggactgagtgaagataccacaccccagggacattgcctgggccagaaagtaacaggaagcttagcagcccggggaccctgactgctttgttagaaaatcagcctgatctgccacctgtgtgatttctaataagcttagatgtgagtgtttccaatcctatcatcctgcccaactcaaaaaatgttaccacttgctagcagcatcggtttgtggagttggggagaagtgtagtatgagtcaggaaaggggtgggggtgttcctctcttggaaacctcctattgtggccacagatagaaaaacccaggagggtttgggggtctaaaatcaggaggggtgggggtctaggtagatttttaaaccccttcattctagatactatttcctcacataacataataggtgttgcataaatcatattcctaacctctgaagttttagagggccaatatttcattttttatctttgtattcctgttgcttcattcataataaatactcagtagaagataatggatcacttgaagactttgtggagactcacctgatagccattagcaatgattctgggccaggcacagaggctcacgcctgtaatccaagcattttgggagcctgaggcgagaggatcgcttgaggccaggagtttgagatcagcctgggcaacatggtgagacccctatctctacaaaatatttttttaaaattacttgggtatagtgacatgtacctccagtcccagctccttgggaggcagaggcaggaggattgcttgagctcaggagtttgaggttgcagtgagctatgatcatgccactgcattccagcctgggcaacagagtgagaccctcttaaaaaaaaaaaaattctacttcttaaaagaggctcttcagtgatgttgtagagatcagctctttatctcctttgtagcacttccctcaagcactgtttcgtttgtttctttgcttgtctcccaggactagaatgtttgctttccaggagggctaggattatagtatactctcagtgcccaacacaattgggttttcacagatatttgctgaaggaaagaagaaaggaagagagggagaggaaggaacaacagcagctttcaaaacccttttcctctgtgacacaatttaggcattgaggagaatgcagaggatgcaacacctttacttacgaattagctggttttgtctggctagattatgaagggccagaggtacagtctttgtcttttcccacttccccagtgcataccaccgtgcccccacacaataagatctgagtaaagattagctgaaataagccaaggaaggtggggagagagatttaaaattttaatcagagttaagagagtaaggaaccctgtaaatctggagagaacaatgctaaatatgtttctgtttaaaaacggctctaagatttcctgaattcggatcgactcttacgtaattagtatacaatacctaactgcaaggataatggtatcaactaatgaattgtcagcctggtaaaatgatctcaagccacacagcacaacttatacatttcagagtccgtatcaatttgcataaagacttggactttagccttgccagatttgagcatcacttaaagcatcacttgcaaagataattggaacatcacttaagaaaaatgaaaaaactgttgaatttcagaaaagtgagttgtaccaattcatgatttggtgaggatgccatctgacctgacagtagtgtatggggattaaagaggaggttttggattttgttcacacctcctaaatgttaagtgcattctgagcaggcacaccgcattactcacagtgggacccaaagcaaagccttagactcaacaaggttacataactatgggtttttgaaattcatggaatttcattagtgggttttaaaaatattgaaaagagcattcatgtattgagtttcatttttggaagcagaatatagatcagggaaagtggatgattccctcctatctgcagtggtcacacatcatcaggagtgctttagaagttcacttacaaactaggataacatccaaggtggtgaaaggtgtcagcatcttgttatagaaaggacaggtggaagagctgtagacacttagttgaactgttatctgaaagagtgattagatttaatctgttgctttagggaggaatgggcatgcttgtatgtatatggtgtgtgcattgggagggggtgtatttgaataagtctttacagatgcagttctgctgtctgttttcactggcttttgtttatggtagtttgacttcttgtctgcttttgatttttgactgtgagccccatattccttagaagtttatctgtaggaactatttgaggcctaggattgaagctctgttctttcagggaagatctgcttttgcttctgccaagcacctggggatacttcagcccaagtgcattttatacctagtccttacttatgggttttttgccccaaagtagtgtgtgaattaggattgcagaactgcatgaggtccaatctgttgttacaaaatctcattgtggattttttccctcttacagctgtatcaagatttatgtggtaaaaagttgttactgaattgtaaaaatcaaagcttgtgatcatcaggttttggcaaatactctcaggaaaaaaagccaacttcagtgggtacatatacattcctggattcccactttcagttactttttggccttccgaaatttaacattcttgctagttcttagatttaaaaacatttttaaataaatatttcacatagtctgtttacttgtctttatttatttatttgaggcagagtcccactctgccgcccaggctggagtgtagtggtgtgacctcggctcactgcaacctccacctcctgggtttaagcaattctcatgcctcagcctcccaagtagctgggattacaggcgtatgccactatgcctggctaatttttgtatttttagtagagatagggtttcaccatgttggctaggctggtcttgaactcctgacctcaagtgatccactcaccttggcctctggaggtgctgggattacaggcgcgagccactgcgcccagcctacttgtccttaattggtcagtcagggtaccaaaaattgaagtccatctatttagtgtagagaactcctggtaccttgtaagataggaattctttattattgtcagcttagtgaccatattttggtggggtagggagatgatataggagagaaccctgtattagaaggttgatgtgtaaataaccttttgggtttctttcaattataaaagtatatagttttagctaaagtaatcattttttgcttctcttgggaatttaccattttgaactagactaatattattcggtgacatttaaatctgtttcctctaaaaatagaagttgtgaatatctgtcagttattagaaaacactaaatttacactagaagtcatcttaatccacaatgtggttttgaaagcacgttcttaatctgaaaatgttgaacaaattagattggcactttagccctcactgcaatgtaaacacaaatggaatatttgtagatggttgatgttctttgacagatgttgcattttggcagcagaaatctgttaagatgctctacggtttaaattttttctgtcaaggatttagtataaagccccttttcctcttctccttctgtctgactttgtctcatcattcaaaatccaccttggtcatctagttttctttctcatcgtatctctcagtgaatgaaccattagatgagacctgctggtttacggacctgttcctgtcttcatcagtctgagttctcttggctttgagaaacaaaaaatttagattgcttaataaaaagtgtgtttgaaaaacagagcggtcagctttctgtttactaggttaggaactctcatttcagctcagtaataaactgttttatctgactaaaaataacttcccattaaacaaagcagcttcccatagcactgtctctaaactcagaggcaaacagaggaacttacaagtttataagtactgtgcgccagtaaatgtacatttacaggactccacacaggactaagaattattacctaccaataaaagagagcagtttgaaagctcatgtttccttggaacatatactactataacagatatggtagaggtacctatagagatttcaagatatttttctgtgcattgcgagcattttctctctgtatggttgtctgaatcacgggtctagtaaaagagcagaatgagaaagaacttttccctctcggtgttacataaacgatggctggccagttggtgagcccaccccattgactgtcccagcccatgggtgggttaccaagtgaaccaggctccttagattaaagtagcagttctcaacattttataatactttcaggacccagttaaagactcttaaaaataactgaggactcaatagcttgtgtattttaattcatttacagtagcttacgtattcattgacagtaacatgtattaattcatacccaatagcttatgtatttacttacaaattataatgagcacattaatattaacatcagatcagtgatatcacatgtcatgtaacatctggaagatgtcactgtataatcacgagaatgagagtgaaaaggcaaataacatattattatgaaaaggtatttggcctctgagaccttctgacagggttttgagggagcatgtggctcaaaattgagacttagatagctatcaacaggaataatctttccacatatcaagatggctgctggttttcctgcaagaagaattcttgtaagtgaagtctgaaggtcataattttaaaacaaagctgtatgtgtgccacatacactaatacgagagcatggaagctgggtgggggaatgcagtttttattttcttaggactttggccataaaagcagtttatgagcaagaaagcttgctaacagtcagagacatcacccaatccatgccaaagctgcagaacagaattgaatgagtttactcagcccccacacactggaggaagtctggaaggtgagtgatacgtggatccactggagcctgcctgcccacgtctcagtctcgaagcctgacaggcatctggaggaggtcaggatactgaagcataatcctcacaccaaacatagagacatactgtatgggaaattagttctgtttcaggtatcagaaaagcatgaatagaaggcttatgtaattcggctagtaaagcacaatgctctgagaatatgcttatgacactttggaagtcaaagtcaaggaatctaagctggatattaaaactcaaagctaaaattaactataaaaaagctattaaatacataacatacaaaagtggccaaattaatagcatagttcaggtcaatccaatcaaagtagaggagatgtagttaattgtaattctgtttttgtaagtgatttagagtggggctggtctttcctcttccaccacccttttttaatactctcaaataattttcagaaatagtttgtccttctccatactacaagttgtgaatatcttggtgcgtccaaaattaattttaaaaagttaattccaattcccagaaatcctaaaagctaaaataatgttgacattttacacagtcccaggtttcaaggctaaatgtgttgtaataataaatgcttagtttttctgtttcctttatggcctaccagcccatgagacagaaagtgatgtttcttaccattttatgcagctgtatcctgctggttgttttgtaactccaaaattgttaagtagcagaagaactcatcatccattaataatacctgctgaattattcagagaaatccttaaccagaataaatggttatggccatccaatttctcctcattctcactttcccatttctttttcctgtgggtaaatatcttagactttcaagcctaggacactgttaaaacattcagggaaagttgaatatccaaatggtttttgttgcatgtgagtttagaatcaatgattagcttggaattggggtacttactataagaaaggagatgttttattgttggtgtttgactgtttaataaaactataatcatccaagaagtattataattgcacttattgcaaaaaggtctaccttttaatttctttttcctggggcttctcacaggagtcttgaggcggtgtttgtattcagtatctacactaagctgcttacttctttgtgtggtttttcaggaatggccatttgccctcctggaaaatgttatcacattcacctcatcatcttgttcagagatctctctcacactcactcctggtcctgaggatccttctccaccccctcctcccttatagagttgcagaacttttcctacctgacctctctcagcacctttaatccctttccaatcaatcccctgttaactccagaacatcagaaataggaaatgattaaattggagtgggccaagtgatggaaaatgtgttgggagactcttcattataagtgctgctgaatggctagacttttttaaccatttgcttataatacttcgatcacagtgaatcaattcattattcttgataactccagaatggtcttatgaagatattactatggccatgttattcccctatttaagactttttgatgatacctgttgcctatatgatattgacataaccacagttatgtccctgtacttttttacacatgctgttccctcagcccagaatgcaggttctgttgatagggattttggtcattgtgtcagaatctcttctgtacgccaggttttgaacaggcctctgtaaatgccctggcttgatgtgactggctgcccagtactgctttgcccacattgaacagggcttgattacatgaaccaaggtcaactaactaaatcctttggatttgccatcccttttttccacagcagtctgagctatcagctgaagaaagtccagaaaaattaggaacctcccagctacatcgccggaaagtcatttccttgaacaaacagattgcgcaaaagaccaaacatcttgaagaggtcagtgttttcttttcgtaagtttattcaagatcttcatggtagattggttaaaggagattccagaacgggggttggcatactgtggtgcttgggccagtccagttgccacttgtttttgtaaattaagttttattacaacataacacatccatttgtttacacattttctgtggctgctttcaggctacagtggcagagttgagtagttgcagaagaccataagacctacaaagcctaaaatatttactatccagccctttgcagaaaaaatttgctaacttctgtcataggaaaagatcacagggcaagaataaatagcattagttaacaaatatctaccgagcactactgtgtgctaggcactgaactagctattgggatgaatgaagaacaagttatgatccttgctgtcaaggatcttaacttctaatgagaagttaccacactcatcgtcatttaattacaggtgtgttaaatgcttgaaggagaagtctaggaagctgggagagtgactaatagggagacctgacctagcctcaggtcacagagttctgagactggaaagatgagtgggtatttccaggcaggaagtctgtatgggctatatggacttacagaacaacatgaacaaagaccagaggaggaagggtcttagccagtctgttttgtggccagggagtcatgaatgaagacagttggttggcagtgtctgatcaacaggaccatccaagccatgttaaggacaacagaagccattgacgtgtttaaataggggagtggcatgatcagaattgcatattgtaaagaccattctgtttgctgcaggagcatgaattaactggacttgggtgagaaggaattcagggacaacaggtaggaggctgatgcaatagtctagacgtggactgctactattgatggcagggaaatggaggaaacttgatcatttttaaaagagctgtaggagatggtgttctgtaatacctggtgatatgagactgttttagaaagaccttcatatatttgccctgaaaagtagacctaagaggaagctgggaagtttgactcagcaacagtcattggacaataaaaaagttatatgcttcagttgcattagcaatagattagattagaagaatacacgtagaagaagattaagagaatgaatatgggccaggtgtggtggctcacgcctgtaatcccagcactttgggaggctgaggaggggcagatcacttgaggtcgggagttcaagagcagcctaaccaacttggagactccctgtctctactaaaaatacaaaattagctgggcatggtggcgcctgcttgtaatcccagctactcaggaggctgaggcaggagaatcgcttgaaaccaggaggcggaggttgcggtgagccgagatcatgctgttgcactctagcctgggcaacaagagcgaaactccatctcaaaaaaaaaaaaaatgggtaccagttggcattttgagcttgttagtttttagttagtcccacatatttaaaaggtattaacctatcaaatggtcctgcccaatcatttctttatttgaatttgttctattagaatttgttctaccatagctgaacaaataataggttggtttgctaaatgctctggatcaaagaaggatgaaaagatagcctatgatttggtttctgttcagttatttgtttagacattttaatgagttgtcaactcagacagtatcatccctactcctgacccctgctggtgataagaatggttcaaaaagaactcatcacagaatcaggagcaggagacaaggatgagtcttccttattatgttgtctttatctctgagggaagatagttttgagattattgtggactccaggagccagagtatcccagcaggaacggacatttgcttctaccttctgtctaaacctggggagaagcaatactaagcctcaacacaaatggcagtcttgactcattcttggtccagctgacagggcaatcctccctgactcttgagtctgttttgcagttggttcagaacacttttacccagagtctgttatttttcaagcatactgcttaacatagcaggctgtcatttttcaagcatactgcttaacatagcaggctgtcattaaaagacaacaatcattattgcaatgtttaatgtaattagagatgatgaccagcacatggagtaatccctgaccatgtagctaggccaactggatgaggaaaatgaggtagggaagggagagacttgctcagagtctgtgttccatgtttctgtgtgtgtgcagatatactaaacacattttccttttgtttctgtcagttttcaaatgtttcaagtgctttttttaaattgtagggataagctgaatataaattaaatagtatagaagtatataaagataagaataaatagagcaagctactatttgtgtctgctgtgtttcctggcaaacctgtttttaggcctttgcaaaaatgtatgccccttcacctggggagagtgacttgtatggttacaaaattgagtttttatttcacttattgtatcacagacgtctctctgtcagtaatagtaattgctaataagtgctttgttactgcttagtaattactatgtgctttataaaattaactcattcagttcacacagcatccttatgaatgggaggtactgttattttcctcactttacaaataaggatactgagacacagaaattaagcaggctgtctatagtcacatagcttgttagtggttgaaccaaaatttaagcaaataaatctacctcattctttttagtgactggatagtgtgacatagtatatatgtaacacaatttatttaacttgttccctaacttctcaaaaaatgcgtttttgattttgctagaaactattgagttgttcatcaattattttatcaatttatacttctacctgtagtatgtgagggattccaaactctttacatcccacagcctcttttacaaggtcatacaggcagaaggcatctgagatgcatccttttttaggcttttacagacacgtatgccctcacctggggagagtgagttgtatggttacaaaattgagtttttatttcacgtattctatcacagacatctatctgtcagtaatagtaatggctaataagtgctttgttattgcttactaattactaagcactttgcaaaattgactcagttcgcacaacatccttatgaaggggaggtactattattatcctcattatacaaataaggaaatattagtccattctcaccctgctgataaagacatacctgagactgggtaatttataaaggaaagaggtttaattgactcacagttttgcatgggtagggaggcctcagggtaaatttagaatcatggcggaaggggaagcaaacatgtccttcttcacatgatgactggaaggagaagtacaagcaggggaaatgccagatgcctataaaaccatcagttctcctgagaactcactatcacgagaacaccatggggtaaaccacccccatcatccaattacctccacctgatccctcccacgacacgtggggattatgggaaccacaattcaagatgagatttgggtggggactcagccaaatcatatcatggtccaatgagggaatatgcaaaggaatagaatggagtacaggtggtaggtagctaagaggaaacctgagagtgatgaaagaaagagaaatccagagaggtggtgttaaccagcagctgaatttttagagtaagtgtaggggttaatgatgaagaagaaaatagaggtaagagaatcctggaggactccagcaagataaaaactaagctaagctactgggacacttcctatttaagaaaagatgatcagatgaagaatttaattgttagttaaattaattaaagaaaagaaaagagatgagccttttcttcttagaaagctcttacttccctgccaagatccatctggggtaagtctttgttggtgaaggtttcctgaaccccctggtgagggagctaactctctttccttgggcctggctctgccccatctcttctcatattttaatcccacagttacaatgtcatgttcttttctttctcccatacacctcatttgagcagagcattgggtaaatgtcagatgagtaggtgggtgcaggggtgagaggctacacaagaaggtgggtgaagcaggtgggaagatcccggggacctttcctagagccttgtcttagtccatttaggctgctctatcaaaataccttagacgtggtaatttgttgcttacagttctgaaggttgggaagtccaagatcgaggcaccaacagatctggtgtctgatgtccatagatgatgccttgttgctgcttcctcacatggtggaaggaggcaagggagcccactcaagcctcttttattttcatttttttgagacagggtctcactccatcatctacgctagagtccagtggcatgatcataactcactgcagcctcagcctcctgggatgaagcaatccttccacctcagccttccacatagtcgggaccacaggaacaccaccatgccgggctaattttttttttttttttttggagacagcagagtctcactttgttgcccagactgagcctcttttataagggcactcatctcattcacaaggctggagccctcatgacttaatcacttcccaaagaccccacctcttgaaactgtcatattgggtattaggttctaagatacaaatttggggcagacactaacattcagaccatagcaaacatcaacagttaaaacactgggatttaaagagaaaactaaactttttcccagagtacccttatctcccagttacacaaacagactaataaaagttgtcattgcacagatggctctctttgaaaaggggggcaccagaacccacctgcttctctctcctttatcacattgctctcagcttgagttggcttcttgataggccttgttggaattataactatttatcagtcatgaagactagtagctagattggagtaatgatttctgaaggtgacataactcttaataagctgcttacaggcccaaggatggggcatgttactttgaaataaccattgagatataggttaaaatttctcattgttaacttgaacccagttaataacaagtttgaaggtggttttctgccttgtatccttcttaaaagtgaaaatacacaatccttttgagcatttaaaggaatgttttcaaatttctaaaagttgatagacacaaggatatactgttttagcaagagaaagggaattgactttttcaagatgtgagtttacagttatgtaagttggaacagtaaaagtaatttattttcattctcttggtgttgaagtcctgaatcctatcttctatgtgtcatcatttgccaaccagtcttatgctgggatctcaagtgctgaaatgctgtttgtattctgcaaacaggcaagtgggttaactgcattgattgtagccccactgaaaagtcagagggacttgaatttggatctgggcctcatcagttatcagctatgggactttagtcaaataaacttgactgctctgagtctttatttcctcatctgtaaaataagaaaagtgtcttttttcactgaatataaagattcagtgatataatttatgcaaaattcctagtacatcagctgacatgtacttggtgctaattaaatatgaggtttttttcttcatttgttgttggcaacccttttaaaattttcacatttgctcagtttaaatctttctgagctttcattttctcatctgtgaaattcacatctgtgttgtcataaggatcaaatgagagcatatgtcttttatctttcatttacagctgcgagcaagtcacaccagcctacaagccagatataatgaagccaagaaaacgctgacagaggtgagcagatagattctccttcttctgtgggcccttgtcaagaattgtttttgacctgaaccactaatggaatgatgtgtttcatcggtctgtgtgtgggagacacgatcctgttctcagaggctgcagtcattttgaggacataggacagttacatggtagtgcgtgacccatgtcatcagtttgcccacactgcacattctagtcccttagtggtcttggtgggaggggtctctgtgggctgcgagggtcaggaaaggcttcctgggaaggtgagcctgataggctgggtggggcacagagaagaactcacagtgtcactcagtaaatagctcctgcccctcaaacagcagcttgtatagtaactctaagatcctgaattccttgagagtgagatgtcttttgaaagatgagagaacctcagagtgatataattgttcagaatttccagttatctcctaggcagagtgggggaagggctgcaggaggagaaggagggctgggagtgcatttgaaccctgcgattcaatctgtagtccaggttgcaagtgtgctacttcacatcagcattgtcgctgctcacttcccacttgtgattgctgaacagacacctctgctgccacctctgtcatgagcagtgtgtagatatttctgttccttggtttccacagagaactatcctcatccagacttgaaaagctgtcttccttgtgattttggtgcttggactatagccgtactatggaaggacctcgctgcaaggtccctacctcgtacttcctggacgatttggaagctaggatcttcaaagacgtctccgaaaccaccccagtatccctacttttctagaattcacatgacatttaccaatttaaaattcttactctgtagcgatatgtagcacttaatttgccaccttgatgtaaacctgacaaagcttttcaattctggtctggactaacctcttcagttattgtcagaatatttcaaaagggcaggcacatgaatgtcaattagaataatttttttctcattgttcataaagacgcctgccttgcctttggacagattagcttcctttacattgctctgtgactgcgttccttacggattagatggcaagctctgcgggttgggagccctctgtgatattttaatgccgcagagcccctggcatgaagtttgccaattcgtggatctgtctttgtataataatctgaaagagattaaaggcaaaatatcttgatatcagctttctaagacatttatatgccttaggatataaactatcagtgacttataaaggagctttttatactaaatactaaatcaagtatttgttgagcccttttcatgttatagaaaggtggagggtgtgatttaagtcagtaataagactatcctcaaatgaaaacagcagccaacattgctctgggcatatcattcctgcagtcgtcgttcctttttgcagatgggaaagctaaggcagagaggccatgcagccgggtgtcaggattcaaatacaggcagcctggcatcagagccctctctgggagcttactatctaataggaaaatcagactaattcccatctagaaaaatgggaagctgtataaaacctagtactgaacaacttctgaagaagcttgatttggtcagcctgtgcataattaatgtttttcacctctgggcctggttctccttacctatcaaggttaggagtaagcagaatgagcgctctgaaccctttcattccaggcttcccagatttgacctcttcagcaaaacctgcccttccaggataacctagtggcactgaaaagcagagaggacttgtgtctttccagtaaatctgggaaaagtagagctgggcatggagggttgcagacagcagtggtgcctgacacctgtgggggaggctgcatgactgcttcagaaaggccaggagattggctgctttgtaacttcagcagtcacaactctaatttcgtgtgtgtgaggctgattgtttttatgcagtattcttttatgtctaagtacattaattgtatctagttttgcttgctctgtaactattaagatcagaattgacttgttgaattgatacatcttttttaaggttatgtctgtcttcagctctttgatgatccttggttatatgttcatctttaattttaaaatttcgggttaccacctctgtggatccatgcattttatgcagcccacttcctgtgtttattctggaagggatctacctactgtttgctgagatcagccggtagtaactgatgttctgggtcggggaactccccatttctgctgggtatcaccaactatgtgggaccccgccctgcctctgagacttaagcaccagctcttgtgtttaagagagtcaggtttcattgcctagcctatgtggctattcctaatgcagatccccaacactgcacaccagtccttcctacgtctgctaactccacacagcttcttcctgaggccattcctgtctgttaaccatcctttttggcctgtgaggttaaactcttgtgttctaatgtaatagtctggatgtttgggggtcttagggcaagaaggggtggctgcaagttgtgcttagtctactattttcaactagaactcttggaacttttttaaaactttttttttttaatttttgaataagtaacacattcacatcgtacaaaattcaaaaagtacaaagggtgtaggtttggagaaacggtgttttcttcactgaacagtagatactagagatcattgtaaaagagctactttattcttttttaaaatattggcttagtattctgttgtatgatgtaattacctactttacacattaaaatccaagtttaagtttcttctttaaaaagtgtcattatctgcctcacaaaaagaaggtgaagttgttcacctctgctaccaaggctccagcaaccatgtcttcattctctcttgcagctgaagacttacagtgagaaactggacaaagagcaagcagccctcgagaagatagaatccaaagctgatccaaggtaagaggtttcagcatgcgcttatttttgctttgatgaaagtgactttgctgatacttgttggcttaatttgtttaaacacagaacaaagcagccaaaggctattggtctggcccctgcaggtcagatcattttactgttcatccagaaagtggtgactctgccatgctgagatgtgcctgggctgccctgggttagtcacctttttcccaataccccttgtgtacagaagcagcatagttttttgtttttctatttttcaaaatggtcataccttcatagtacagaaaagggcatatggtgaaaaatcttcctcccactcctgtccccagccacccaattctcttccctagagttcactattgttacaagtttttaaacagctcgtgcctccttggtagaaaaggtgcagtcttttctgtcaagacacagctgctgctgtagttgtttgttctttcatgtagaattaattgtcattagagcattagaggagagaaagcacttaacatttgacctttttagcttcagactatttgggtggtaaagtctcctgggagctgcttatttgaatgagactatgaaatcaaaaagttgcaggcacagaatgagcagtacttgtttgatgaacatttttagcaaaaagtacccacaggtaacttgactctataattagaaacctttgtttcatgaaatggagcaaagcactgtcagatagttgatatttttattgtcaaattagtgcttttaatgaccttaagcaacttgtttccttttcagaatggattttaaaaatagttttcaatactgtatatgccccgaatacagttgaataattggtatcattaaatatacctggtactattgaaactcattgatgtttctatagttgacattttaattgtggaatctgtaatgttttcttggatccggcattgatggtcttgggtttataaatgaataataatgtcagttaaatggaagtcattatcatttgtgcagaatctgtgagacactcttagagctgagaaaggaaattaaaaggagagtccttttttagctgcggacctgcttttagctgcgattcataaaatcataatggcctgccatatgtcatttttttgtcttttctcttcagtatcctacagaacctgagagcacttgtagccatgaatgaaaatctgaaaagtcaagaacaggaatttaaagcacattgtcgagtaagtgttgtttggtgtcagcaaataaaccaggacgcttattgaatctcttggtttacctccgttgtcctgttgtggcatcctatccagtgcagtttaaaaagcagattcggccaggcgcagtggctcatgcctgtaatcccagcactttgggaagccaaggcaggcggatcacgaggtcaggagatcgagaccatcctggctaacactgtgaaaccccgtctctactaaaaatacaaaaaaattagctgggcgtggtggctggcgcctgtagtcccagctactcgggaggctgaggcaggagaatggcgtgaacctgggaggcagagcttgcagtgagccaagatcacgccactgcactccagcctgggtgacagagcgagactccatctcaaaaaaaaaaaaaaaaaagcagattcatccagcagttatttgtcagttgtataagctgaatagagcaccatggttagtaactttgtgccaaaccccaaaacaaacaatgtcacctaactttggtatttgaaagaaaagtcttatgaagtttttgcaaaaatatattttgttgacagacggcctttgtgaaaagagtaacatcatacaaaaccagggctgtcctgaaaacctgggatgtctatgtcctatgtgtaagtcctggctgtcatcttctggaaacttgtagtctagtcgtgggggtgatgcgtgttctggcaactctagtgtgagataggaaatgaggcctggcaagttctgtgtgagctccaggggaggaaaaggcacttcagcacaggagccaccaaaaagctagatcttacttaagggccaaggaggacagcaagtggaggaggtacttgatgaggcagagctccaggctggaagatggacagctgaataaggttgaggcctgctggagagaggaaacagacaagactaactggaactaggctctagatcacttgttcatttcaatgcccagtgattactgtatacctcaccagcccttcagaaagaaggacctcttttgatggaggaatagctgcctgtagcctcctgaaaagaactttcccaggctgataattggagatcagggcagctacctcattagcttttcgtcccagaataaactcatgaaatgtgaaaataagacttgtggaccaaatagttgaataattgcgtctaattactccttgtctgaattttgtaaacgttcatgtcacttttaaaggaggagatgacacgactacagcaagaaattgaaaacctgaaagctgagagagcaccacgtggagatgaaaaggtaaaggctctgaattagtccttgagactctcaggtgctattacgggaaaaagatagttctagaggaccaaagagcagaccgctgttgctaacttatcctgtaaatagacattcctcaactgttttccttctgtgaccttcttagatttgtatccatctcttctctctttcctctgggagtagaaggcagcagagggtgtggaaggcagcaacccagacacgaattaccagattacacaattctggcctccctctgtttagggagatgtttctgggaaaagtctgagctctatttcctgctcacccgttccttaaattttctgccagtttactcatttcacctttctcctttcctgctcagggataatgccccactcccaaaaggcagcaacaaacatgaagaaggagagagcagtgttggatttaacagaagaaccctaggcttgcaggagcagtctgggtttagggaacacacctggacagctggttctctgaacagaggacttgatcttccaaggagctagcatgaattttcactgaaccttaaattgtaagaaacagggaacttgaggcttagggaggacaagagtgtccagccaccccacgccagaccgcatgccctgctgcctggcccagaactctgcactggacagtgcccatggctgtacaggacactgccatgcccagcggggagacgaagatcttgcagggccgttatcactctcctgagtggttgcattatttcacccgagccatacaactcttcacatctgtgaggggactggcatgggtgaataggagagcctaggaggcagtggtatcccaggctcatcgtcgcacagtccacctctcctgttgtttctaaaactttaaacctttaaagctcaaatcatcagtttgagttttgagcctctgcacaaattagactcttaagatctcatttctcttttcagcacatcttgttagcgagattcttacattcaaaaagagctatacggtttactgtgttagtgtgtaactgacagacacctaagaacaatttaaaatctgctgctcatctaagggcagttccctttctgctctcttcagacatgctcgggggacatcaacacatttctcagctgcacccttatgcccctgcctggccccttcctacatctagatccttggcttctgtcttattcccgaatgctcaggagaggtgtttattatgttttcattgtttcagaccctctccagtggagagccgcctggtaccttgacctctgcaatgactcatgacgtaagtacctgcctgctcaggactggcattgtctcctgagggcaggcggccagctttccactctcctgtgatggcttctcatgcctactttaatgtgctctatggccaactccacatctaggcgttccagggcattgtcctgtttgatacagctaggcctcagatggaggcagggtctcaccaggaatggccctgaaggtcacctttctgatgggttttcttccagttctgtgtacaagcatgttgttttcatgctggcttctcagctgggaaggggagaggcctgcgttggccgcatatgctggtcaccactcgggctctgagggatggggtggtacagaggggaaaaccttctctctctgttgtactatataccagactcagcagactgtttctataaaggtgcacatagtaactctttttggctttgtgagccagctctgctgtagtgaccatagttgatctgtaaatgaatggacatggctgtgttccaataaaactttatttacaaaaatgggccacaaggcatatttggcccaaaggttgtaggatttagctcacaggctgtagtttgccacccacttctgagttaaaccagtgctctccgcattccaaaaccctccagaagaaagagataggaaaggaagtggaggaaaggaaaagcaggaaaactgtaagcatctgccttctttaagggttcctcttccctttgtaccctcgtaatctcccaggagaatgagcttcagcactcttccagtgaagtctgttggattttgcctgcagctgagccccttgggtgcgttgggtaggggggtgtgtttatattccctatgctgaggaaggaggcactcctttgaccccttttgtaactttctctgaggcgacaaaccatccagccatgtctcttaccatgtctcatccagccatgtctcattgctgggttcaatgagggactagtttctattttctatatcaatgctgtccaaaagaactttttgcagtgatagaaatgttctgttccgcactgtctgctgtggctagtggctatcacattggataacacagctctaagtagaaacatagaaaactagcatcatctccaaacacaggcatagtacaacacattctttaactaatgatttgtctctacatcatcataggtttttgcaggggaagggcatatacatttggaggttacttcacttaagaatactggatttgccctgggtcccagaaggaagagttgttataacatgatatgagagggtatcaagggtctcatatgagacaggacccagacagtaaacttgggcatttaagaagagaaatttaaggccttaggatgggggagatatgataaaaacatattcaactttcaaagactccattaaagagtgaaagttttctattcccagataattacagccttttccaatttttaggaagacctagacagacggtataatatggagaaagagaaactttacaagatacgtttactacaggtgagtaaaagaaggacaaaaatatgcataaatgcttctaactaggtataaatgtcctatgacataactagaaagtctcaatatctaagaactagagaaaataagtaatgaggctgctgttccccagtcttctttctatctggagtgtaactcagtgatttaagatgttggtattaacatctcacattgttggtatattactttcacaaccactcctttgagttaatcctaaccccaggtggagagtggatattacatcccattttctttatgaagaaattggcttgtttgtttggataaccggcagtttgtgagagtgacatcaaatatgggggagataggtttcaaaattagctctaaaatttaattcatgcagagtcaaaattacatttaaaatcccctacattgctgggatctggctcatggaagctcaaaagccaaaaattccttgtgtcacactttggttcaagccaaccttctgttccctgggagggaaaggccgggctcgggtaggagtggccaaaaggctgcagaggccagtgagagcccctttcccctctctctggcacctacttactttgctgagctgagagggttaaattagagtgagtcaaatttgtccttgttacagactactaatctttaaagaggcacagaactaaataaaatcgggacagtacagctgcatatttggaaactttttgactgagtgctttatatgtattcagcattggatcaggtcccagaactaataaataggatgacccatctcctggacatgctggctatttgagaaccaagacatgtctatatatacatcaaagttcaagggagattatgtgcaaattgctttctaagggcagcttcagactggctaggggaaagcttcagtaaagccagtggcttgctgagggcaagggcctgagttaggcagtggctgtagaatgcatggaaatgaactgatgggacagattgcagggctgtagctgatggaacttagtatcatctgagataaaaagaggagtcaaggatgatgctggaatttctgacacaagggtgaataatatttgtgttattcatagaggagaagcataaaagagaattaatggactagggttaagggcgagaggagtataataaataggagtgttaatgagatctgtttggggcttttcaaagttgggatactcaaccacattgaaatgtccaaggagtgctttgttgtcagctctgactcccagaatagtatggcctggagatttgggtgtctgcagtgttgatgaggactggggctgtggaatgtggaagaggccctgagactacaccctggtgagcacatgtgaggataggcagagcaaaacaagggatctcccagtgaagatgcgcctgagcagccagaagggaaaacaagtgcatgaggcttgtgggagccgagcagagagctcagctgagaggaggggaagtgccactagaaatcaagaaggctaggagctgagaattgtccattagatgtgtccctgagaaggtgtgcagtgactttggcaaaagcagttcagtggggcactggggagagcctagttgcagtgggttgaagagggactggcatggacagaggctcccatgtgcgtggctctcagtacatttctcttccctgtaaaagggaagagagaggctggtagctgaaaggtgatggcgattaaagaagggctttttaaggagtgaggacatgaatgtatttaaatgctgatgagaagggtcagtagccagtgaaaagttacagatgcagtaaaagactgaagagttgtatcttaagactcctgaaagaaaaccaggagtcagagcctgagcacccatggggagcgtagccttggcctaagggagaaatacatccttccctctccctggagctgcagagacccagttttggattaggtcaccagagctgaatgtgggtttcccaccaggaggctcctatttccccagtgaattagagattcacatctgctgctgcaggcgaagcaggcaggagagtgggaggatatggtggacaaagggatgcaggcacagaagaaaggcagcactcagagcccgcttggtctggagtctacacgtgttcagtgggagccatgcacaagtgagcggcttgctctccctgcagctgcccctgcaccatgccacaccacacagcagtgccatgcctcccagacccggtcagtagggcagtttcctgagtctgtggaagggagaaaatgctagaaagtatttgaggagtaggttgcaggagctttttaaccaggatgaggaatttgggatgtatgtggaggcggcaaggtggcatagcttcccatcatctgaagcattccttttgttgcctgtccctgcctggcagggtggagctggctattctagactccttgggggcctggtgggtagctgcaggctctgtccatagaagcccttcccattcagtatcttccctcctggtccactcatttggtgccttctgtgattcagttcacagtcacaccacctcccactcctaggaaagcgggaaagtcaatccaaatctgagatggggacctttaagcccatggcaggagtttgtgcctgcattgtagggcgcatggttgggctcaggtcggggtgcaggcaatattttggctccctagagaacatgtaaggccttttaccaaatagtactgtctctgtctcccttttgcatttaggctcgaagaaatcgagaaatagcaattttgcaccgcaagattgatgaagtccctagccgtgccgagctaatacagtatcagaagagatttattgaactctaccgccagagtaggtgcattgaccacagacaagctcttgaggctgggaagggacaggcgaggggtctgttccactttagcatgggggagcatgcaccagagcacagtccacaaaggccaccaccggaaagctccgtttcatcagcaggcccacttggcagtcccgggagcagcactgtggtgctctcactgccctctccgtggacagatagttgaaccagttgagctcttagactaaagcttcaaagcagccctcatcctggtcagccacacagccttcccctgagctcccacaccactttccaacttcacacggaacatcgtgaccctggtgtctagagatcagtcctcattcattgttcttctctacagactttgttgctgatgtggtccttaacccttaacagcatcatattcacccagtaacccaggaccatgaccccctcagcctgaataagagatcatgtctcatgaggctcagaatggccctcaaggctgccattgcctttttcttcctaacattcctgccacatctgctcttgcatcatatctcagctaaatgaccattagctgcagtgcctccaagtcccctagccacacatctgattctgtcacttctctctctgctaacaaatcttcaggaactcctcaggccttactgaatagagcctctttctttaccatgcctgggttcctccccagtctgagtggcctgcctggaggcccctttcctgatctgaaccctcactctggccttgccagtccacacactgcctctgaacaaaccatgagctttgacgtcttagccttgactcctcctgttcctggtgcctggatcctttttcttctgtcaggctaaattcttcaatacccaattcagatcctgtaaacctattctaggcaccccaccccaggcaagaagtgaccacctcttctccaggctcctactcttgtatgtccccatgatacctgaaactcaacaggtacaaaattgaattcggccctcctactccgtattcctcttaggcaaactggacccctctttcttctctgactcaagctgctcgccaattctgtgtcttagtaattttcaagtctatttcttctggactgcgctgtagccaccttcctttgctgcccagagtctaattagatctctttcaacatatatttgatcattttactctaaaagctgtaatacttaggctccctgcaacttcttgggtaatctttagaatcctaaatacacaatactaagtcctgcatcgtcttggcccacttcacccagcttcacccctcttgcacatctgcatcttggcctgtgagctggtacctgagtccatagtgccattatcctacaattcccacttggtatttcaaaatccacctaagattttgccttgaggacttggcctctccagcatccttcctggtagagcactggctctattggaggagatcagatcacacttccttcatgtgcccggccccactaggctgggatttcatccagtcctcacactggactcaaatgatcagaggcagggatcagcagtgacagttttcagcagaaagtagtttctgctttaagttaaatctttccctttacttttctattcctgcttgtttcaaagcttttagcaataataatacctgcatctatttatttcacagaacaaatttcacacaggttaaaatcatctgataaagacatgtttacactaaggacattttcaagcagttacatcaaaatacctgtatcaatgtgttattatcaaatatctacaacccccacccagttctttggctggatgaggtaagggtggctggttcatttatgggagtaattctcaactttgggtactcactgtcaccacctgggtcccaccttcaacattctcctttcattggtcctgagacttgttaaaagcttcccaggcaattcagtttgcacgctgtggggtttctgcagagtgagctcccaggcctgacaaagttgtcctggcagtgcattcatggaggagaggggcaggtagggtgttctgatacctgttcttattcgtgtgctgatttctttacttttacagtttcagcagtgcacaaagaaaccaagcagttcttcactttatataataccctggatgataaaaaggtttatttggaaaaagaggtaagaacatttataaaaagaaaatggctaagcagctaacagtgcagttgactccaggaagtcaaatgaacttgatgtttgggacaggtatgttcagcattagcagaaagagtgcctattttatatgctaagtgctggcatacccagtcagaaagtgcaagattccttgggaacccagactgtctgctgtgaagtgagactggtagacagccattctagagtgctgtgggggaaatgccattgttaaaaggaacacaatggaagctctggagttggtgagactagtttgagatttaaaggaagggaggaaccagctgaatgaaatgggggtggtgggcttgttatagtttacagggagaaaatacctgtttaatcatcagtggccgacaaaggcgtgaactaaaaggtttgtaaaattcaaagcaggggtgaaagggtcactgtcactcccttcgtcttttttttttttttttcttgtcttttttttcttttattattatactttaagttttagggtacatgtgcacatttgcaggttagttacatatgtatacatgtgccatgctggtgcgctgcacccactaactcgtcatctagcattaggtatatctctttttaacatttaaaaactcaggttaaattaatggctcagggctttcccaagttgatgacaaacggttggagcacagtatgcagatatgtcttaatttaaaaaagagaacagtcctggtcttcaccatggcagcatagtgtcctgaagagaacacgggctttggcgtcagtcagatttgggtttatttgggttttaatgtggcctcttttttctcacctgtaaaatggggatgacacctaattgcattgatgatgattataatgcggacagaatgagaaaatgtaaagttccttacacatggtggattctcagtacatacttgttcctaccctccccctcaccttgaggttgatagaatgtgttttcattttgtcaccttgtagtctacactaattaccactttaataaggataatattacaaatgtatcttttacctgaacccaaattgaggcatctgtaattactgtcacctttactgcctgctgtcagacaaaccaggtagatctctgtcatcctagagggtgctccttgggaagctgttttatttttttctgtatccggggcttacacagtggtaggcgtataacagacatttgataaatgtttgaatagatgaatgcatttcatgggatttgcatcagacctggggaatagctctgtcccacatcctggccttggggccctcctacctggcaaaggaaagatttgccaaccctgacttagggataggccagccccttcccaaagaccttaaaccccattgaccttccttcatcagcagtgtttaaagttgttccactgtttaaaaactaggaatattgcgaggcagactggggagctgggctttctaattccaagccatgttaccagttagaatgttacatttgaataaatttggtattttattttaaatggatttatgcctgtgatagtttaaaaccttcctgtggagtactaaggacaagaaatattctacattgctgactgtgaacctaaagttcacatatggtaattacttagttctgaggccccaaattgagtagttttatggccagaaagatgacccaggtttccttactcctgcctcagagcccttcccaggactgtatcattggggcagataagaggatttgctgcggggctaaggcagtgtccacggggccttgaacagtgcatccccttggaggcactcagccacccagcagcttagcttgctgcattggcgagaagattctgtgggaaggaatagggtgtaaacgactctcactttccacactgtctgactcccgtaagctgttatccttgaaaataaagtgcagtgtttggcaagatagaaagggctgtggtggcagtttgcctagagagccctagtgttagcttagtgtcctctcagctgggatccagttcccttcaaagcaccttctccctacattcctgtgggaatgccctgtaggaagagggaattttctgtgagaagaaggtggattccctgaggaaatctgtgagacagaacatgtggctaatttttttttcatatgttactttaatcttcataaacaaggcatgtgttccttgcagaagcagtatgtggagacagccaagcttgcagcagttgcagtagtgtggaaatctttttgcctgtcttataatttcgtttgtttttttacttccccagattagtctgctgaactcaattcatgagaacttctcacagtaagtactgtcagtcctccttcccactaataccctgccggcctgcgctttgaattcagcccacctcacattgctataatgtgcttgacaaaggtacatgcaagacttaacactgggtatgtgattcttactcttttagcccttctgctaagtatcttgtttacactctccttgagtacctgcaaaactataatgatagtagagtgaaggaagagctgacgaaaaaagttaactttcaaatactttgactgtacccacctactaaaatctctctgtatgttatcaaattaatatttgttaatgaacacatagagatgctttaaaatttacataatggaatttatataattttttagattttttaaatctcatggtagattttttttggttaatgtgtacattgttctctaaaaactagatgtcaaggcccacctgttcccaaatcaagccctcaagcatgtccatttgcccacccaccatccagcagccccaggacttgctccttggagagcatgcttcccttctctctggcacaaatctctgctgtcctctggcaggcccttctctctggcacaaatctctgctgtcctctggcagatgacaggggacacattgtgactgacatcttattgagttacaggttctagattttaagcttcttttcttaaaaaaaaaaacaaaaaaccacagcttcccctggttttaggaaatctcagaatatgtctcccagtttcaagtatctgccaatcctcaaattttgtaaaccaaatgaaattcattacttatgcagtacatgccgtatttcaaataaataatgtttttgttaattttagtcacattttactgcaagaaaatacatattagttatgaaagttacagggaaagtatgacaaaaaagattaacatgcaattataagaccaggctaatttccatgccttctcagaggtttagcatccttaattgcctgggatcccaggggcccccgtggctccactgtgcgttacaaagacctgattgcctctcctaagagtcataatctggatacagagctgactgcttggcatttccccctgcctcagagtcctgtgtgccggtcataactctactggtttttctttcagggccatggcctcccctgctgcccgggaccagtttttacgtcagatggaacagattgtggaaggaattaagcaaagtagaatgaaggtcagatggcttcttttctgtaatgcagcccaggttttatagtggtgacagggaaggtcctgggaagaaaaggcctcttctggtagttggggagtgtgccctcaatcctgaaaagacacatttctacagaggtattcccactatgcgtcttactctgtaatgggcagggcctgtctcatgagctgcctacacccaggggttccaaagttgctgttagcagtagctcccaggtattgaacacctattgtgtaccaagcattgtgctgacattcctaaaagacctctgaagtgaacagtatcacacccattttacagatgaggagaccacctttcaccagcaggcttccgctcttgactagattcacttcctcggtggatctgtggtacctgacattccgccacaagagattcattccttaggaatcttaggatctcgagagcattttggttttcaggaaccctctaaaaaagagaaatcattgctgaactgagttctgccaaattgagaggaaattgagtctcagaagtctgaagagaacagagaggccccactcagtcagggtgcagcatgggattttcctacagagacagctgcagtttcctaccaccattctcagatgaatcctaaacagtacctccaaatatctcttgcttatggtcctgttttaaaaatgtatcacaccagagtggttctccgacatggcagtaaaatcttccggggacgttgggtttctcctcttacgatcttggggcagagggctccagtgagtgatgccagaatgtaaacacatgagaaagaaagaattgtccataggtcctgtcatcataaaaaaccctgttacagaagacaaacattcaagttgcctgtaatctcatctcacaagagatgagctaagggcagaagtgctccatatccctttccctgtagaaaaatatcattaatctctctgtgaatgacttcaataaaacgatgtcaaaggaggagaaaaaaagtatcactagtaacaagcacgatttctcaagactattcagccgtaaaaatgagaacgacataagtcagtgtttgcctatatatgcacactcacccaagccaggataggctgtcttgcagagggagaatgcagtcccctctcagtgacctggggtatgagtaggtggagggcagagaacctggctgaccaaaagcctctgacaacccaggtgtcagtgtgttagacgcttccaccttgccattgctctgcaggaagctgctctggttcatagtcaagaacaacaggaattcatggggttttttcctttgacttctgcttcgtgtttacagagagcagtgtaaacaggaagtggaggccaaaggaaaaaactccatgaattcctgttgttgactatgagccaaagcaggggaagaaatgggcctcaccccttcactctcttcactctccccgaggaggcttcatgctcttggcccctcagtgctgaccagtgtggaaaggcgctgctgtatctgtctctcccctccatggtgggtgccaaatgggtcaatggcacccagggcagagtgggctctctttctctggtctgcatccctggtggctgatgtagcacctaacccatggttaggccctcaaggactatttgctgaatgagtgaattctttcaacagagtcaaagagcagttctcagagagggctccagatacgctttgaatgttgaatgttgatagacactgtgaatggaacagcagtcacttggatggatgtgttttattgtgtttgtttaaaaaaaaaaaaaagctttccctgtaacagtgccttaatgggtcctgctctcatagatgtggcaggggagtctgtcctctcaagcacaggtttctcagaaccagcaggttcagagtgttacatagtagaccagcgctgggtaacaatgaccgaataggtgtttatgccccgtctgagggtttctgagtaaagaagaggtcacatatcagtcagcattttgacctcactcagaggagttaaggtctctggatctctggaatactgtgagcaagtgcttggcacaagcacttcacagacctagggtgtgaagaggtgataaggagggaataacaatggtacgtctgagtaaggggacactgagaagagtgtgaaaatgaagcttaaatcaaagagtcaactcctgcttctcatagtgagttggcattctaggatgtgaaatgttgagaagaaaaatggtctttattgagcagctactatagaccaggtgatggatcattcacttaccatttcatgtcccaagcttcttgtaacaaaactggttatctaggtgatattcttattttagctaaaggacgtagcattcaaaaaagttaaattagctgtccaaggatacacagtgagtggcagaactaggatttgaacccagcctttctggcctcaagctcatactatttctaggttgccacactaactcccacagtggatcctggataaattcataattcaagcgcattgctacctcactaggacataatcagtcacggtgaagtgttttgctaaagtgcagagcagagaggaaaggcctgagatagagctgctggctgtcctaataagagagagggacctagctgtgaggtcctagccagtgcagcagaaaagatgtctgctgctttgagagttggagcccacgaaggaacagtagtgggaactgcggtgggctggtgtgtcactgtgacaggatcatgagtgggtgtcagagacccatgcaggcagcattaggggttccatcgacagggatcaggacttgctgctgagccagggctccaagtgtggtaggacaccccagaggggactggccactctgggagacctaggcacaagggagggcaccaaactggagacctagcatgggtgtgcaccaggcatccgtatgcagacctgtggaaagagcagggcacagggtcttgggactcaggaactgaatgcaaggtcaggatttgactaggcaaatcagtccccatatgtggtgggtctttctctgaacagcattgggataggccttggggacaccaagttgcatttgtcctgtgtagtcaacagaagcctatagtgtggagggaactactgaataaaatgcagtcaattttacctatagcttgtgtttaccaaatccctcccaaagtgtaacacagaaatcatggtcaggcatcagcaaagccacagcaaagcatctctcagaatttgattcaacaagcttttgagcaccggccatgagtcaggcacccggtctgtaccgtaactcttactgccctcatttcctggctgattctctgggtttaccttccagacatacagcacatagcattgccagccctgctctagtgtcctcagagagcctctctgagcttccaggctgaggaggccatgcacccaccctcctctccgtcacctccccccgtgtcattttcctcacaggaccgatcagtgttgcgaatattttgtgtgtctgtttgtcagggtgcttgcttaatgtgaatctctagaatgtatgctctgtgagagcagtgactttgccatgttcaccactacacgtagctactcagtaggttctaagtcaatgtttgttgaatgaataagcttttggataccttagaaaagtctctttaaatcaaagcctagcatctatttatgagatcaaaatcctgaaaatatcctaaattgtctaccagcaggaagatgggtaagttagcaatcagcaggaatattgtattgtttttaaaatgataatttgtagaaaatttataatgacatggaaatacttacattaaatcaaaagaggatacacggttttattatatgagcacagtttttaaatcagggtttctcagcctcagcacagttaacatttcgggctagataattctttgctgtgggggtgtcctgtgcaatgtaggatgtttagcagcattgctggcctctacccagtgattccagtagcacccacttctcgcagttgtgacaatcaaaactgtctccagacactgccgggtgggggatggggggcaaaatagctcctagttgagaatcaccaacctgtccattgtgaaattgtagtgagaaaaaaaaatggaaacagttaatactcagtgatagaaaaattgctgaataaattgtagagcctccatgtaatatgcaaataaattaaccaacctcaaaaattatatattgaagcttcctctactgtaaggaaatccatgaaactgttaacaactgttgccttttggatgttgccagtagcccttgggcagaacatgtcttttcgtcaccatttcccacaatgtttcaacagatggaaaagaaaaagcaagagaacaaaatgagaagagaccagttgaacgaccagtacttggagctgttagaaaagcagaggctatactttaagactgtgaaagagttcaaggaggtaagaggaaggctgggtagcacattaaggctaacgtgagatatatgttcacctcaaaagtagccactaaaaaacagcagttttttggttttcctctggtctgtgaagggaaataacaagacagagtgtgatctggcagtgaagtgtggcgtctaggtagctgaagattgcgtttttctgtggcccatcttgaggtctaattaaatgttttaagacatcacatcactttagttttcctaacacttagtaagcacattaactcacaaaatgactccatcagtccgtatcaagggccacttggaaacagcatttgttgtggattcagatatagaatcttctttcctgccaatcttagggtggggagggacctcaagaagctgtgtgggaagagagaactttgaagtgtcacaggcttggattcgaatcctacatttaccacttaccagctgtattttttggcaatgacctaatccctcccagcctcagtttcctcattggtgaattccgttgcgtcaggtgagaaatttgaaacatccagcaccaggcctggcacctcctaacacccaacactcaactgaatttcggttttccctgtttttccttcctgcatttgggcagttactcttcattgttccagaaagaaaagtgcctgcccttaagagattttccaaaaagacttcatttggtcccttgctagggtctcagcagctttattttaaggaattccttctccctaacctaaatccatgtggtttcagtgagtttagagactgctgaaaatacagcagagttaaaggtagattgtatcctggtgtttggtctgcagaataaaaaatgtagtctttccatgctcataattttgttcttaatttaagacttttcttccttcctcatctttcccttgtcttctacgtatttccttatctgtgatttaacttctagaagccacatcccataggcatttcaaaatctcatcttttccagtgttccagctcctactatacccctgggcagatgccaggttgtaacgcagacctcctcctccttaaggagcatacgctgtggtgggagagacggatggcaagctaagaacaagtcataacaaataagtagtaacaattccagactttgccatgtgaggagactggtttaggtagtgtggtctaggagggccctctagggtgagcaggacctagccatcggaagaaagagttcttcagccacagcagtgcaggaatggggagcggagggtctgcggctcagtctgggactcctttgaggctagcacaggctgcagctgaggtcccagaagggccagtgagtgaactggcagggaacaattaggaatttgctgccctactcagagctcctcgttccctttaatcaaaactaacaaaaggagaagaactgcatctcaaatgctgcttggagacacccttttgacagtgtagaaacaaaaagcaagttgaggaggataagtataagctgtcaaagcaattgaaaatgaaatggaaaagctcattcttgccctgcaggctctcagatgagagcttaggatgacctccaaggcaccagttccttcagaggtgttaagtggcttgggtctgggttcccacctgtgctggcagtcattgtcacaccagacacagagggtggttccttcagatccagctaagacacctagaccagattcttgccaggcctctttccttcagtccaaagcaagtcagaagagggggaggggatgaaatatgtttttgcatatttcttttttttattatactttaagttttagggtacatgtgcacaacgtgcaggttagttacatatatgtacatgtgccatgttggtgtgctgcacccattaactcgtcatttaacattaggtatatcttctaatgctatccctcccacctccccccaccccacaacaggccctggtgtgtgatgttccccttcctgtgtccatgtgttttcattgttcaattcccaactatgagtgaaaacatgtggtgtttagttttttgtccttgcaatagtttgctgagaatgatggtttccagcttcatccatgtccctacaaaggacatgaactcatccttttttatggctgcatagtattccgtggtgtatatgtgccacattttcttaatccagtctatcattgttggacatttggcttggttccaagtatttgctattgggaatagtgctgcaataaacatacgtgtgcatgtgtctttattgcagcatgatttataatcctttgggtatgtacccagtaatgggatggctgggtcaaatggtatttctagttctagatgcctgaggaatcgccacactgacttccacaatggttgaactagtttacagtcccaccaacagtgtaaaagtgttcctatttctccacatactctccagcacctgttatttcctgactttttaatgattgccattctaactggtgtgagatggtatctcattgtggttttgatttgcatttctctgatggccagtgatgatgagcactttttcatgtgtcttttggctgcataaatgtcttcttttgagaagtgtctgttcatgtcctttgccccctttttgatggggttgttttttttcttgtgaatttgttttgagttcattgtagattctggatattagccctttgtcagatgagtagattgcaaaaattttctcccattctttaggttgcctgttcactcctatggtagtttattttgctgtgcagaagctctttagtttaatgagatcccacttgtcaattttggcttttgttgccattgctgttggtgtgttagacatgaagtccttgcccatgcctatgtcctgaatggtgttgcctaggttttcttctagggtttttatggttttaggtctcacatttaagtctttaatccgtcttgaattaatttttgtataaggtgtaacgaagggatccagtttcagctttctacataatggctagccagttttcccagcaccatttattaaatagggaatcctttccccatttcttgtttttgtcaggtttgtcaaagatcagatggttgtagatgtgcggcattatttctgagggctctgttctgttccattggtctatatctctgttttggtaccagtaccatgctgttttggttactgtagccttgtagtatagtttgaagtcaggtagcatgatgcctccagctttgttcttttggcttaggattgacttggcattgggggctgttttttggttccatatgaactttaaagtagttttttccaattctgtgaagaaagtcattggtagcttgatggggatggcattgaatctataaattaccttgggcagtatggccattttcacgatattgattcttcctacccataagaatggaatgttcttccatttgtttgtatcctattttatttcatcgagcagtggtttgtagttcttgaagaggtccttcatgtcccttgtaatttggattcctagatattttattctctttgaagcagttgtgagtgggagttcactcatgatttggctctctgtctgttattggtgtataagaatgcttgtgatttttgcacactgattttgtatcctgagactttgctgaatctatcagcttaaggagattttgggctgagacagtggggttttctagatatacaatcatgtcatctccaaacagggacaatttgacttcttcttttcctaattgaataccctttatttccttctcctgcttgattgccctgaccagaacttccaacactatgttgaataggagtggtgagagagggaatccctgtcttgtgccagttttcaaagggaatgcttccagtttttgcccattcagtatgatattgactgtgggtttgtcatagatagctcttattattttgagatatatcccatcaatacctagtttattgagagtttttagcatgaagtgttgttgagttttgtcaaaggccttttctgcatctattgagataatcatgtggtttttgtctttggttctgtttatatgctggattatgtttattgatttgcatatgttgtaccagccttgcatcccagggatgaagcccacttgatcatggtggataagctttttgatgtgctgctggattcggtttgccagtattttattgaggatttttgcatcaatgttcatcagggatattggtctaaaattctcttttttggttgtgtctctgccaggctttggtatcaggatgatgctggcctcataaaatgagttagggaggattctctatttttctattgattggaatagtttcagaaggaatggtaccagctcctccttgtacctctggtagaatttggctgtgaatccatctggtcctggactttttttggttggtaagctattaattattgcctcaatttcagagcctgttattggtatattcagaaattcaacttcttcctcgtttagtcttgggagggtgtatgtgtccaggaatttatccatttcttctagattttctagtttatttgcgtagaggtgtttatagtattctctgatggtagtttgtatttctgtggtattggtggtgatatcccctttattattttttattgcgtctatttgattcttctctcttttcttctttattagtcttgctagcagtctatcaattttgttgatcttttcaaaaaaccagctcctggattcattgattttttgaagggttttttatgtctctatttccttcagttctgctctgatcttagttatttcttgccttctgctagcttttgaatgtgtttgctcttgcttctctagttcttttcattgtgatgttagggtgtcaattttagatctttcctgctttctcttgtgggcatttagtgctataaatttccctctacacactgctttgaatgtgtcccagagattctggtatgttgtgtctttgttctcgttggtttcaaagaacatctttatctctaccttcatgtcgttatgtaccctgtagtcattcaggagcaggttgttcagtttccatgtagttgagtggttttgagtgaggttcttaatcctgagttctagtttgattgcactgtggtctgagagacagtttgttataatttctgttgttttacatttgctgaggagtgctttacttccatctatgtggtcaattttggaataggtgtggtgtggtgctgagaagaatgtatattctgttgatttggggtggagagttctgtagatgtctattaggtctgcttggtgcagagctgagttcaattcctggatatccttgttatctttctgtcttgttgatctaatgttgacagtggggtgttaaagtctcccattattattgtgtggtagtctaagtctctttgtaggtctctaaggacttgctttatgaatctgggtgctcctgtattgggtgcatatatattcaggatagttagctcttcttgttgaattgatccctttaccattatgtaatagccttctttgtgtcttttgatctttgtcggtttaaagtctgttttatcagagactaggattgcaacccctgcctttttttgttttccatttgcttggtagatcttcctccatccctttattttgagcctatgtgtgtctctgcatatgagatgggtttcctaaatacagcacactgatgggtcttgactctttatccagtttgccagtctgtgtcttttaattgaagcatttagcccatttacatttaaggttaatattgttatgtgtgaatttgatcctgtcattatgatggtagctggttattttgctcattagttgatgcagtttcttcctagcctcaatggtctttacaatttggcatgtttttgcagtggctggtaccagttgtttctttccatgtttagtgcttccttcaggagctcttttagggcaggcctggtggtgacaaaatctctcagcatttgtttttctgtattttatttctccttcacttatgaagcttagtttggctggatatgaaattctgggttgaaaattcttttctttaggaatgttgaatattggcccccactctcttctggcttgtagagtttctgccaggagatcagctgttagtctgatgggcttccctttgtgggtaacctgagctttctctctgtctgcccttaacattttttccatttcaactttggtgaatctgacaattatgtgtcttggagttgctcttctagaggagtatctttgtggcattctctgtatttcctaaatttgaatgttggcctgccttgctagattgaggaagttctcctggatattatcctgcagagtgttttccaacttggttccattctccccatcactttcaggtacaccaatcagatgtagatttggtcttttcacatagtcccatatttcttggagactttggtcatttctttttattcttttttctccaaacccctcttctcgcttgattttattcatttgatcttccatcactgataccctttcttccagttgatcaaatcggctactgaggcttgtgcattcatcatgtagttctcatgccatggttttcagctccatcacgtcctttaaggacttctctgcattggttattctagttagccatttgtctaattttttttcaaggtttttaacttctttgccatgggttcgaacttcctcctttagctcagagtagtttgatcgtctgaagcgttcttctctcaactcatcaaagtcattctctgtccagctttgttccattgctggtgaggagctgcgttcctttggaggaggagaggcactctgatttttacagtttccagtttttctgctctggtttttccccatctttgtggttttatctacctttggtctttgatgatggtgatgtacagatggggttttggtgtggatgtcctttctgtttgttagttttccttctaacagacaggaccctcagctgcaggtctgttggagtttgctggaggtccactccagaccttgtttaccttggtatcagcagcagaggctgcagaacagcggatattggtgaacagcaaatgttgttgcctgatcattcctctggaagttttgtctcagaggagtacccagctgtgtgatgtgtcaatgtgcccctactggggtgtgcctcccagtttggctactcgggggtcagggacccacatgaggaagcagtctgcccattctcagatctccagctgcgtgctgggagaaacactgttctcttctaagctgtcagacagggacttttaagtctgcagaggattctgctgccttttgtttggctatgccctgcccccagaggtggactctatagagggaggcaggcaggcaggcaggcaggcaggcctccttgtgctgcggtgagctccacccagtttgagcttctcggctgctttgtttacctactcaagcctcagaaatggcgggtgcccctcccccagcctcactgccgccttgcagtttgatctcagactgctgtggtagcaatgagtgaagctccatgggcgtaggatcctctgaggcaggcgcgggatataatctgctggtgtgccatttgctaagaccgttggaaaagcacagtattagggtgggagtgacccaattttccaggtgccatctgtcacccctttctttgactaggaaagggaattccctgaccccttgtgcttcctgggtgaggcgatgcctcgccctgcctcggctaacgctgagtgcactgcacgcgctgtcttgcacccactttctgacactccccagtgaggtgaacccggtacctcagttggaaatgcagacatcacccgtcttctgcctcgcttacactgggagctgtagactggagctgttcctattcggccatcttggttccaccccctgaaaatcctgcatatttcatttaaatatatttcacctcacatttagcatgtccttttattttttggtgttaaaattgtcttagaaaataattgtgatggtgggtagtccttttttttttttgaacatattacttggcaaaaatttaaaactggcacccacatgtcagtgttccagcatctttctcccacaagctcttttgaggtaatttggggccaccacaggtgttgaggaggaggtgacgatagggacttgcttgctactccacagcctctaccccatatcttcagccagactagttctgctgcttttctgttttatatattacagtttaatttggactttcatccagggtggagccttctccagcaccctctattttgccttctcaccatcccctcactggccctctacttctgcgttctgaattctcactgcatcctgggcccaagcacttgtagtgtgcaataattattcttcatggaaaacacaacattgttgtctaccatatggttttttgccaccttagcggttgcctttgttgggtttgatttaccccacgttaaatgggcaacagttatgcaccgtgggcgccatcaggtcatgatactaagatttaaattcaatagcactgatgaattcaaaccctacatttttgtgaagctggctttcggtacataaccttgagtgaacttagctctctgtctggcacctagtgggcatggatagagttttcagcaggaaagagactgaggtgatgagacattttcccttttcttctagaaacaaacacccaaagcgcctcttttgtatttgctttgaagagacggagaatatgattctgtaggctcacatactaggtgacattgcaggctgtctctaccgaaaagtacaagcatcgcctagggttctgtgacacacacagttccccacggtagagttctgatgctgtttttgcctcatttaaacggtgaggtgggtgacagtttaaacttatttactgtttcatatttttgttatggaaatcttaaaaaatatacaagtagagagtgtagtataacaatataatagtgtagctctctgttcttgttccatctcttcccctccatttgttttaagctggagtcttttttccccccaagtacatctcaagccatttttaaaaggaacccagcatcaccttatttctgtccccccactgccctgcccatgaactgcccctctctccccaaaaaggtgctcaaaagtgtcagagcaccttgcttctgacagcctcaaagtattcagccttaccaccaagacaagcacccacctgtttccttgctccctgagtgaaggacacatctgaatcctgtagatgagccagcactagtcttagcaaaaccaaggtcgttgtggtcatgctgccatcacactgccaaaagatcagggcctccagagagctgggagcacctgaccctggcccagggagctggaaaaattgaccgtgggggttttgagtgcagaaggttcaagggtaaaagtttttctcccacaataaatgcacctccaggaaaacacagcccctggaggcctgaccactgccaagcctgtgagctctacctctccgggccctttctgctaccacttttatctcccaatttaaaagcaggactccttgtgaccctgcccagagaatggggtcagagttattggaggtttgctagcagatggaggtatcatgagctactaaggccagtggaacaagggcaggaggcgcagttagaagcttttgaagatgatcccagagggaacatgaaatgatgcagaggtgacttgtgccactggatgtcagattctacaggcagaggatgggacagtgacctccttcagtgataacctgtagcacgtgccattgatttcatacagttcagttttaaggaagggcaggttatctttttttttttttttttttgagacagagccttgctctgtcacccaggctggagtgcagtggcacaatctcggctcactgcaagctccgcctcctgggttcatgccattgtcctgcctcagcctcctgagtagctgggactacaggcgcctgccaccacgcctggctaataatttatatttttagtagagacggggtttagtagtagccaggatggtctcgctctcctgacctcgtgatccgcctgcctcggcctcccaaagtgctgggattacaggcatgagccactgcgcccggccccattatctcttgatgaatatctcttatcctattttctgagtttcttaaagacaagaatattcttaactttcactgttagaactctatgtgttttgcctgctatgtaaactagggctcccttttatctctttttaggctgctgtctccaaagcctttccccactccctcaccatagtaggccaagactggcagataagtgtgctttctgcttctatccccttgaagtttcacagacttcatgaagtcttttggaatgacagtgcctatcctctcatcctattttcagtctgacagcccagaaatggagcatcattatagttatattggtgttgatgtcagtaggtcatcaggaagcttcaccatcctggcggcagcatgccaagagactgggttggccaggagatgtctcccatagggatatgggaagggctttgagaccatcttggcctcacatgggtgctaatgtagtcaccactctctctatactctctgctttccctccaggagggccgcaagaacgagatgctgctgtccaaggtgaaagcgaaggcctcctgaacatccccagccgtggctgtatgtcattgattttacttttaagcaccgtatatcacctacaagatcatgaaatggttctgaaagcgacagtagagagatgcagttgtgatgatttcaacaacctggatgttttctttctcctctttgcttccattcatctctgttggctgctgttgatggagtcagacagtaaacacgtggcttggataacacccatcatcctatgaagaatatagggagtacttgttctctgttgattcaacttttatgtctccagtaacattgcgcttatgaaggtacctgtatttgtatggactctgaataaagaagaattcatttgtttagcaagtattagttcagcaaccactgagaaataagcactgaggaagattcagagacgtgtaaaacacagttcctactgcacaagtacccagcaggtggcccagggaggcagatacagcacacttgaccgcagaactgggctatccaagatgtttttcagtaaacagaaggcatttagctgaaatgatcagcccatgtagtgttggtcacttgggcctttcacctgccatggtaccttttgttcccagctcctccaggtgccagccagcaggcttggtggtgacagcaactggaacgaaagttcagtgttgttttaatttttatacgttactcaagttgatttctcagaaaattgaaaacagaccttgtgctgaggacacgtcaataaaaattataccttcccctgccccaatgttcatgtgagtcacagcatgcagaggggctgtgcatccccctcattgaaggcacatttgatgaggctacgctgcagatgggtcatggtctgagccaggagagagatagacactgttccctgcactcaaggcaagtagggtgtcaggaggaagagcagtagggtttgcagagatccagggaaacttcctggaggaggcagcatttgagccctatctaaagggagaatcggatgttgataggaagactgttttaaatgaaaatacactatgattaaaaacccaagagagtgcagaggagtacaaggcatgcatgttgggaaaggagggaataagctagtctctgcaggaggcttcagagacccgtctgggaagtagggctgagactaggctttggagggccttgaagggcagctgagggttgattttaatccttggaaatgaccagtgcagatcaaacatggagctcctgctgccctggtcctcaggagtctggtaactcagtcatgttctgtaggtttgtgctccattttgcataaatcttgcaaacataccaggtggcaggtttgcacagtaacacaaaagcttaaacatgtcaagcaagtggggcattcagcagccacagaaatgtgttcatttttagtccctaatggatgtgattaagcagggctgatgtgtacagatttaaaaacacacacacgtgctggattaaaaacagccactggtttcagtgccagggccagcaaggcctacctgagccaggcggaagcagcagcttgcaaatagaaactgccacctgcgagcgcttcttgggtcatgtgcagctccacctcagctggtccctgagccgtggtcatgtgggggttttgaagggctaagttgaagcaagtaattgcaaaagaacaggtggcactctgagggcaggggaaggagacagaagtttgactgcgtttgaaattatttcagtcagggaaacatctgcgttgtcttgttaagcagcttgtaggcccacccctggctaactgaactttgtgagcagttggggcagttatttggatatttgtccaaaggtggtagggaggcagatgacattctggggttactggagtccacctctgtgctgatggggaaagtatggcatgatgaatccaaagcaaccagtaattctttttgaaagtgcaggcatttattttgagctgtatttcataggagtttcatttggtttggttttggtatagagaggtgtccatagatctctattccctttttttttttatcgacaaggcctactacggataaatcagtttttgttgcctgaatacactttgaattagactacagaagccagtttgagctcaaatttcacacttgctgcagacaactctcagtgtggacagtgcctttctgagtaattaggatgttatatgactttttggtgaagccgtatagggtaaggagatgccccaaggcccctgatcatttcagaagccacctggagcaccagaaggggtcatcttcccagggctatggctctgtgtgcttagacatagtatggaattgtgctctaagcccacaggcttctccagagttaaaaggaagcaagaacatccttaagttactttttcaaaatatgcgcttcaggaggaaccaggtttccccaggagagagaggctccctgctcaatcagcacagggagttgctagcgggcaggctgcccagtgctgtggaatctccgccagcctctgggttgggggctccctcccacttcttgcttcttatggagtacatgggactgctctgctttaagccgcgatcagagctgttgtgagcaggacaagattgcgtgatcacgaggtgcgtggggagatgctaggacatttgttgatgtctttgacctgtgctccgtctctgttggatgactgggttagctaacaccactagagggaggtacagaatgttaaacagtcgtcagagtcacactgagggttgttttaacagagggcaaattcccagtttgtcaagcatatctctgttagagtccgaagttcatggttttaatggttctagctcgtagcccttaatattttcaggatagctgggtcctgccagtgtccgctgagtccatcagcacaaccagaaggtccagggtccaggcatgggaagcattctctgacaataccgagccctcgggacctcctgaaaccttgagcagaggctggagaagaccttcagacagtccttttactacctcacaaagtgccatgcccgggacctcagacctcagggttgtgacgttgttgatgttgtcaggccccagtacgtctctagtgaccgaagcagacctgcctgaaagggcactccggacagtgagccctggctctaacctgtgccctcatatttctgctgcctcatatggtcttgtttgcccactctgtaggtgactgatcaccctaaaagggaggtaggtatctagcagtagcacagttactttgagcctgaccacttgttctgaagtgcagatgttgaaacatgcattgaggaagaacactttaaggaagcactttatgatttactcatggctggtgttggcctcaaagtaaaagaacatcttaatgcagaacagtacaataaagagccccataggatggatgccatcatctgtccccatggttgggattgccaaggaaagtgccttgttctgtgcatcttcagaatcccccaggccctctcttgatccttttcatgaagtccagagcattccttctattacaggctgaagatgcattgtaaaaggtaatgctataatagtattccctcttctcaataaatgtgcaaaactggagaatctggtgctgatctgcagcatacttgacaacacagggaataccgtggatgttccacgccagccttacatccgtccccattgcctgcccatgtccagtggccctgcgcaacaaaagtaagggcttgtcttaccacactctccccagcatctagctcaaggtagatgactgactgggaaattccggttggataaaatggcttttccacattgcaactttgcatctctattaggaaaatttagattgaacctttcctctacttgatgcttagtttgagaacagttttcacaactttagagggtctctctcagagtatgttatactgtaaccttgaagtttgagatgaaacaaggtgtcagaggttttgaatctttcaaaggaattgccttttacagattttttttttattccctaagaagggaaaaagagagggaagaactacactaatgttagagataaggtatgttttggctcaaaatgtgtcatgaacctaaaggtaacttgatgggcagaaatgtctcagccatgtgaaccaagaagtgggaccacagtgcaaggctgtgggtggcagcactagatatggtggtggcaggagtgtgacatgtaggcactccatgggggacagctggacggtgtctatcaaaagtgcaaatgcgtaagctctttgaactagcaatgctactcctaagaattgtacctgtgtacaaggtacttgtgtacaagagtttttgttgaaacattgtaatagcaaaaagttggagagtgccaccaatacaggggaatggttaaatacattatggccagcttaaacaatggaatagtttgtagaaatttaaaacaatggatcctgtgtgtgtgtactaccatagaatgggccccaagatgcatgattaagtgaggaaaaaagcccatggtatcctaatgtttggaatggagaaagtgtgtagatgtatgtgtgtgcatatgttttcacacagacgtatacacgtgtatatcatatgtccacctgcatatgcctaggatgtctctgggaggatatctagcagcccggcagcctgaattgcctctgggaagaggggtgggaatgacttttcaatgtacaccttttgtaccttttgaattttgtaccatgtacatgtattatctattaaaaaatagttcttaatttttaatttggtatacttttcttaatagaaccaaaatggaagaaaattctgattctctaaatctgctttcttaaagataaagcctttgattcaaaagtagtgagactctttcttgggtcttgaggcaatgggccatgcaaagggaggtgtccttttctggtggaatagaatgcggcagtgaagcagaggctggctcttctcacactctgggagcatgttgggctggcagagggagggatggggatggggaaatggatggtgatgtgactaatcactgggacagacgggctgctgcagggttccgtccatcttacaaaaatcacagtgcaaccctggtcctctgacttttggggtacaaaagataggcatacctctgagtcatgattcaaggggggctgttaacatcctccagaagccgtgcccatcttgtgtagaaacctgctgtgggtgagccttccccacccctgccttcttttaaaaaccaacacaactctgattttgtccagctccgaggtggccgtgtgtcagccccaagagaggaacatgacagcttttccagtcaggggaatctcactttttttggccaactgctggtttgcggatggatgtctaacccagttatggccagttttggggagactgctgaacttctggcaaagactttcctgatgatcagtgagagatgcactaggagagcttcaccctttcttcctgtgataagttatggaggggggacagggtttgagcaacttcagccatcttgagaccatgaaaagagacatcacaacacactgaggttggcagagggaaaaggtggaaagagccttggctctctgaaggcatgatgagcctctcaaccacactgaggcccacctgcttccatattcttgttccatgagaaaaatgaacctctgttagcttgtgcattcaaccaacaaatacttgagtttcttctatgtgtcaggccctgagaatatagcagtaaaaaaagcagacaagagaacctgctttcctggagctactctccagtgggaaaaaacacacaaacaagagaaatacgtaaatattgtcatgtggtatttcaacatgctgattaaagcacggaaggtatcaggagtgtctggtttggtggcggctgcaattttatattgagaagtgaaggaaggcctcactcactgactagtgagggagtgagtatatagatacctgtgtaaagaacagtccaggcacaggggatagcaagtgtaaaggccctaaggtaggagcatacccagcaggtgagtttgaggaacatgaaggagacctgtgtggggagccactggagggtttttgagaaggaaagcaatgtgatctgggttcatttttgtttgtttgtttgtttgtttgtttgttttgagatggtgtttcgctcttgttgcccaggctggagtgcagtggcacgatcttggctcactgcaacctccacctcccgggctcaagtgattctcctgcctcagcctcccgagtaactgggattacaggcatgtgccaccacacctggctaattttatatttttagtagagatggggtttctccacagtggtcaggctggtctcaaactcctgagctcagctgatccacccacctcagcctcccaaagtgctgggattataggcgtgagccaccatacccggccaatctggcttcattttaataggcatccctacactggtgcagtggctcatgcctgtcgtcccagcactttgggaggctgaggaggggagatcgcttgagcccaggagttcaagaccagcctgggcaatatggcgaaaccccgtctttactataaatacaaaaaattagccaggcatggtggagcacacctgtagtcccagctactcgggaggcagaggtgggaggatgggttgagcctgggaagtcgaggctgcagggagccatgttcacgccaccacactccagcctgggtgacagagtgagactgtctcaaaaaataaaaataaataaaaaataaggatccctctggaggctgtgttgactatagggagggcagaagcagggagcccagttaagagacccctgaaatagtccagatttaaatataactgaaaggaaagttttataagacaatacttagccttttaatactacactctgattttttttcctgttttgaaaatgctgagcattgaagtgctgctttccatcatcccatcatagcagatgccttttcatggcaggtggaatgtacttccccttgactctgggcttttgcttgtcctatgggttagctgacttgacacaagttttgaaagtatgcttgcatggttgggtttaccttcttgcccttctctcttgagaagaacgtaccctgttggcccaaggacaggatgaaggacaaacagagcaggcctagacgcaacctaaagcttgaagccaagcctagatgagccctgcctagatcagtgaaatcccagccaactcaggcatataagcaagaaataaagacttgctatatgtcacagagacttcgtagtaattgcacatgactattgagaatgtcgctgattgagtcaactaccaaattggtttcatgatagggtgtgacctggagttgaaaagatacctctcaacaccactcaggtgacaggccagaagagcagcctctggggatgggacctacatgtggaatagacactcacagagcacagccatcatgataagaatccacagtccctcagacaagaccaggcatggtagctcatgcctgtaattccagcagtttgggaagctaaagtgggaggattgcttgaggccaggggttcaagggaccagcctgggcaacacaggaagatcctgtctctatacaaaaaataaactttctacatatggctagccagttttcccagcaccatttattaaatagggaatcctttccccaatgcttgtttttctcaggtttgtcaaagatcagatggttgtagatatgcggtgttatttctgagggctctgttctattccattgatctatatctctgttttggtaccagtaccatgctgttttggttactgtagccttgtagtatagtttgaagtcaggtagtgtgatgcctccagctttgttcttttggattaggattgacttggcgatgtgggctcttttttggttccatatgaaatttaaagtagttttttccaattctgtgaagaaagtcattgctaccttgatggggatggcattgaatctataaattaccttgggcagtatggccattttcatgatactgattcttcctacccgtgagcatggaatgttcttccatttgtttgtatcctcttttatttcattgagcagtggtttgtagttctccttgtagaggtccttcatgtcccttgtaagtggattcctaggtattttattctctttgaagcaattgtgaatgggagttcactcatgatttggctctctgtctgttattctgtataagaatgcttgtgatttttgcacattgattttgtatcctgagactttgctgaagttgcttatcagcttaaggagattttgggctgagacaatggggttttctagatatacaatcatgtcgtctgcaaacggggacaatttgacttcctcttttcctaattgaataccctttatttccttctcctgactaattgccctggccagaacttccaacactatgttgaataggagtggtgagagagggcatccctgtcttgtgccagttttcaaagggaatgcttccagtttttgcccattcagtatgatattggctgtgggtttgtcatagatagctcttattattttgagatacgtcccatcaacacctaatttattgagagtttttagcatgaagggttgttgaattttgtcaaaggccttttctgcatctattgagataatcatgtggtttttgcctttggttctgtttatatgctggattacatttattgatttgcgtatattgaaccagccttgcatcccagggatgaagcccacttgatcatggtggataagctttttgatgtgctgctggattcgttttgccagtattttattgaggattttcacatcaatgttcatcaaggatattggtctaaaattctcttttttggttgtgtctctgccaggctttggtatcaggatgatgctggcctcataaaatgagttagggaggattccctctttttctattgattggaatagtttcagaaggaatggtagccatatgtagaaagctgaaactggatcccttccttacaccttatacaaaaatcaattcaagatggattaaagacttaaacgttagacctaaaaccataaaaaccctagaaaaaaacctaggcattaccattcaggacataggcatgggcaaggacttcatatctaaaacaccaaaagcaatggcaacaaaagacaaaattgacaaatgggatctcattaaactaaagagcttctgcacagcaaaagaaactaccatcagagtgaacaggcaacccacaaaatgggagaagattttcacaacctactcatctgacaaagggctaatatccagaatctacaatgaactcaaacaaatttacaagaaaaaaacaaacgaccccatcacaaagtgggtgaaggacatgaacagacacttctcaaaagaagacatttatgcagccaaaaaacacatgaaaaaatgctcaccatcactggccatcagagaaatgcaaatccaaaccacaacgagatatcatctcacaccagttaaaatggcaatcattaaaaagtcaggaaacaacaggtgctggagaggatgtggagaaataggaacacttttacacagttggtgggactgtaaactagttcaaccattgtggaagtcagtgtggcaattcctcagggatctagaactacaaataccatttgacccagccatcccattactaggtatatacccaaaggactataaatcatgctgctataaagacacatgcacacgtatgtttattgtggcattattcccaatagcaaagacttggaaccaacccgaatgtccaacaatgatagactggattaagaaaatgtggcacatatacaccatggaatactatgcagccataaaaaatgatgagttcatgtcctttgtagggacatggatgaaactggaaaccatcattctcagtaaactatcacaagaacaaaaaaccaaacactgcatattctcactcatatatgggaattgaacaatgagaacacatggacacaggaaggggaacatcacactctgggaactgttgtggggtggggggagcggggagggatagcactgggagatatacctaatgctagatgacaagttagtgggtgcagcgcaccagcatgtcacatgtatacatatgtaactaaactgcacattttgcacatgtaccctaaaacttaaaagtataaaaataaaaagaaaaattaaaaaaaatgtttaaaaattaaaaaataaattccctcagacatgcctaaagaaacatggagggcacctgttgtttcctgactttttaatgattgccattctaactggtgtgagatgatatacaccatggaatactatgcagccataaaaaatgatgagttcatatcctttgtagggacatggatgaaattggaaaccatcattctcagtaaactatcgcaagaacaaaaaaccaaacaccgcatattctcactcataggtgggaattgaacaatgagatcacatggacacaggaaggggaatatcacactctggggactgtggtggggtcgggggaggggggagggatagcattgggagatatacctaatgctagatgacacattagtgggtgcagcgcaccagcatggcacatgtatacatatgtaactaacctgcacaatgtgcacatgtaccctaaaacttagagtataataaaaaaaaaaaaaaaaaaaacatggagggcatattcaaagggagaaaagtagcatactttatacattatacatgaccaaattaataaaactcttccattagccacatccatcctacagacctggaactttgtgaaattaaattgtgataccttagaaaataaatccacacaggaaagagatgaattcctctaacagcctcccaactccatcttagtcatgttctataggcaaaggagacagagataggacagagacattacacttaccaaggatgttcctagaatgttaactggaaatcagatgtgtttttgtcaatagaattccattctgaatactctgaattaaaaggaatcataagtgcatccttgcataaagtcaatcatcaactgatccgtttcaggaattcaacattttgtaattattgtgagcagttgaagaaggctttactaactgaagaaaagtttgaagcctaaaatgtccagcagaagttgccaccaacttagcaagcaaatagttttcttttaaggaaatctaaacatacatgtgattccgtctgcctgagatgcttccacaatgagagcacgttaagtcaaacccctgccaaataaacattaaaagcacactatccaatagcaagagtaaaccaaaaaattctataggtgcctacccaacgatacccagactctccttgaaaccttcttcctggaatccaactagaatcatgcaagaggattcactatatcaggtgtagtctgcaaaggttcatgcagatctcatgctgcaaaatgcaagccaaagttgaaacatggagtctagtcaggtttctattaggttcctttcatctttctcatgtttggaaacaggcagacttgagtccaaatacctgcctgctatgtactcactatgtgaccatgggcagcctactcaccctcttagaatatagttaagtgaggactatatttaccttacagagtgaatgcaggagtaagtgatcatttgtatataaaacccagtacaacagctgtgcatgatgggggctcaataaacactacttttaaaaatgtattcctgaatgtgcattttatgaagggagaggtggggagattattaataccccctattatctttcagtcaatgagggaaaatcctcagtagacccaagattgagctctgacccttaaaagacaacaatgatggatgactgaatatataatttgactcgtaactacataccttacctgttccacctcctacaggttgtcagtcacctgcttattactttcttccctgccttaattcacgagatttgaggtggcttgtaggaaacatgcagaataacagtaaactataaactgaacataaaacactaggatagggaaatctaaaattggaattatagactggctggaaacattatacacaaataagcaggctactgggttttatataaattccagagttaagccaacaatttggttctgtgcttcttcttcctcaaaatgaaaacataaacacagtcaattaataatcctcattatcatgaaaagaaaacatgtcttcacaaagaatgcaataggataattaactgcatccttatatgaaatgcactgatgagttttataagaactattccaattgatagaaaaaagagggaatcctccctaactcattttatgaggccagcatcatcctgataccaaagcctggcagagacacaacaaaaaaagagaattttagaccaatatccctgatgaacatcgatgcaaaaatcctcaataaaatgctggcaaaccaaatccagcagcacttcaataagcttatccaccatgatcaagtgggcttcatccctgggatgcaaggctggttcaacatatgcaaatcaatataatccagcatgtaaacagaaccaaagacaaaaaccacatgattatctcaatagatgcagaaaaggcctttgacaaaattcaacaacacttcatgctaaaaactctcagtaaattaggtattgatgggacgtatctcaaaataatgagagttatttatgacaaattcacagccaatatcatactaaatgggcaaaaactggaagcattccctttgaaaactggcacaagacaggggtgccctctctcaccactccaacatagtgttggaagttctggccagggcaatcaggcaggagaaagaaataaagggtattcaattaggaaaagaggaagtcaaattgtccctgtttgcagatgacatgattgtatatctagaaaaccccatcatctctgcccaaaatctccttaagctggtaagcgacttcagcaaagtctcaggatacaacatcaatgtgcaaaaatcacaaacattcttatacaccaataacagacaaacagagagccaaatcatgagtgaactcccattcacagttgcttcaaagagaataaaatgcctaggaatccaacttacaagggagatgaaggacctcttcaaggagaactacaaaccactgctcaatgaaataaaagaggatacaaacaaatggaacaacattccatgctcatgggtaggaagaatcagtatcgtgaaaatggccatactgcccaaggtagtttatagattcaatgccatccccatcaagctaccaatgactttctccacagaattgcataaagctactttaaagctcatatggaaccaaaaaagagcccacattgccaagacagtcctaagctaaaagaacaaagctggaggcatcatgctacctgacttcaaactatactacaaggctacagtatccaaaacagcatggtactggtaccaaaacagagatatagaccaatggaaccgaacagagccctcagaaataataccacacatctacaacaatctgatctttgacaaacctgacaaaaacaagaaatggggaaaggagtccctatttaataaatgatgctgggaaaaccggctagccatatgtagaaagctgaaactggatcccttccttataccttatacaaaaattaattcagggccaggctcagtggttcacgcctctaatcccagcactttgggaggctgaggcaagcggatcacaaggtcaggagattgagaccatcctggctaacacggtgaaacgctgcctctactaaaaatacaaaaaattagccagacgtggtggcgggcacctgtagtcccagctgcttgggaggctgaggcaggagaatggcttgaacccggaaggcgtagcttgcagtgagccaagatcgcaccattgcactccagcatgggcaacagagtgagactccatctcaaaaataaataaataaataaatatattaattcaagatggattaaagacttaaatgttagacctaaaaccataaaatcccttgaagaaaacctaggtaataccattcaggacacaggcatgggcaaggacttcatgtctcaaacaccaaaagcaatggcaacaaaagccaaaattgacaaatgggatctcattaaactgaagagcttctgcacagcaaaagaaactaccatcagagtgaacaggcaacctaaagaatgggagaaaatttttgcactctactcatctgacaaagggctaatatccagaatctacaatgaactcaaacaaatttacaagaaaaaagcaaccccatcaaaaagtgggcaaaggatatgaacagacacttctcaaaagaagacatttatgcagccaaaaaacacatgaaaaaatgctcaccatcactggccatcagagaaatgcaaatcaaaaccacaatgagataccatctcacaccagttagaatggcaatcattaaaaagtcaggaaacaacaggtgctggagaggatatggagaaataggaacacttttacactgttggtgggactgtaaactagttcaaccattgtggaagacagtgtggcgactcctcaaggatctagaactacaaataccatttgacccagccatcccattactgggtatatacccaaaggattataaatcatggctgctataaagacacatgcacacgtatgtttattgcggcactattcacaatagcaaagacttggaaccaagccaaatgtccaacaatgatagactggattaagaaa

SEQ ID NO: 77 - DNA, 6821 bp, Homo sapiens
agtttccgctttgcactccaccccggtagcagctccgcggcagggacagcttcctccggacgcttggcgggcttcgctctcgccttacgacagcccggtcggatcatggggttgcccagggggccggagggccagggtctcccggaggtggaaacaagagaagatgaagaacaaaatgtcaagttgactgaaattctggagctcttggttgcagctgggtatttcagggcaagaattaaaggcttatcaccctttgacaaggtagtaggaggaatgacttggtgtatcaccacttgcaactttgatgtagatgttgatttgctctttcaagaaaactctacgataggtcaaaaaatagctctgtcagaaaaaattgtctcggtcctgccaaggatgaaatgcccacaccagctggagccccaccagatccaggggatggattttattcacatatttcctgttgttcagtggctggtgaaacgagctatagaaacaaaagaagagatgggtgactatatccgctcctactctgtatcccagttccagaagacttacagtctccctgaggatgatgacttcataaagagaaaagaaaaggccatcaagacagttgtggacctctcagtaatgtacaagccccgtcggaaatacaaacgccaccagggagcagaggagctacttgatgaagaatctcgaatccatgctacacttttggaatatggcaggagatatggatttagccgccagagcaaaatggagaaggctgaggacaagaaaacggcacttccagcagggctgtcagctacagaaaaagctgatgcccacgaggaagatgagcttcgagcagctgaagagcagcgtattcagtcgctgatgaccaagatgaccgctatggcaaatgaggagagccgtctcaccgcaagctccgtgggccagattgtgggactctgctctgctgagatcaagcagattgtgtccgagtatgcagagaagcagtctgagctatcagctgaagaaagtccagaaaaattaggaacctcccagctacatcgccggaaagtcatttccttgaacaaacagattgcgcaaaagaccaaacatcttgaagagctgcgagcaagtcacaccagcctacaagccagatataatgaagccaagaaaacgctgacagagctgaagacttacagtgagaaactggacaaagagcaagcagccctcgagaagatagaatccaaagctgatccaagtatcctacagaacctgagagcacttgtagccatgaatgaaaatctgaaaagtcaagaacaggaatttaaagcacattgtcgagaggagatgacacgactacagcaagaaattgaaaacctgaaagctgagagagcaccacgtggagatgaaaagaccctctccagtggagagccgcctggtaccttgacctctgcaatgactcatgacgaagacctagacagacggtataatatggagaaagagaaactttacaagatacgtttactacaggctcgaagaaatcgagaaatagcaattttgcaccgcaagattgatgaagtccctagccgtgccgagctaatacagtatcagaagagatttattgaactctaccgccagatttcagcagtgcacaaagaaaccaagcagttcttcactttatataataccctggatgataaaaaggtttatttggaaaaagagattagtctgctgaactcaattcatgagaacttctcacaggccatggcctcccctgctgcccgggaccagtttttacgtcagatggaacagattgtggaaggaattaagcaaagtagaatgaagatggaaaagaaaaagcaagagaacaaaatgagaagagaccagttgaacgaccagtacttggagctgttagaaaagcagaggctatactttaagactgtgaaagagttcaaggaggagggccgcaagaacgagatgctgctgtccaaggtgaaagcgaaggcctcctgaacatccccagccgtggctgtatgtcattgattttacttttaagcaccgtatatcacctacaagatcatgaaatggttctgaaagcgacagtagagagatgcagttgtgatgatttcaacaacctggatgttttctttctcctctttgcttccattcatctctgttggctgctgttgatggagtcagacagtaaacacgtggcttggataacacccatcatcctatgaagaatatagggagtacttgttctctgttgattcaacttttatgtctccagtaacattgcgcttatgaaggtacctgtatttgtatggactctgaataaagaagaattcatttgtttagcaagtattagttcagcaaccactgagaaataagcactgaggaagattcagagacgtgtaaaacacagttcctactgcacaagtacccagcaggtggcccagggaggcagatacagcacacttgaccgcagaactgggctatccaagatgtttttcagtaaacagaaggcatttagctgaaatgatcagcccatgtagtgttggtcacttgggcctttcacctgccatggtaccttttgttcccagctcctccaggtgccagccagcaggcttggtggtgacagcaactggaacgaaagttcagtgttgttttaatttttatacgttactcaagttgatttctcagaaaattgaaaacagaccttgtgctgaggacacgtcaataaaaattataccttcccctgccccaatgttcatgtgagtcacagcatgcagaggggctgtgcatccccctcattgaaggcacatttgatgaggctacgctgcagatgggtcatggtctgagccaggagagagatagacactgttccctgcactcaaggcaagtagggtgtcaggaggaagagcagtagggtttgcagagatccagggaaacttcctggaggaggcagcatttgagccctatctaaagggagaatcggatgttgataggaagactgttttaaatgaaaatacactatgattaaaaacccaagagagtgcagaggagtacaaggcatgcatgttgggaaaggagggaataagctagtctctgcaggaggcttcagagacccgtctgggaagtagggctgagactaggctttggagggccttgaagggcagctgagggttgattttaatccttggaaatgaccagtgcagatcaaacatggagctcctgctgccctggtcctcaggagtctggtaactcagtcatgttctgtaggtttgtgctccattttgcataaatcttgcaaacataccaggtggcaggtttgcacagtaacacaaaagcttaaacatgtcaagcaagtggggcattcagcagccacagaaatgtgttcatttttagtccctaatggatgtgattaagcagggctgatgtgtacagatttaaaaacacacacacgtgctggattaaaaacagccactggtttcagtgccagggccagcaaggcctacctgagccaggcggaagcagcagcttgcaaatagaaactgccacctgcgagcgcttcttgggtcatgtgcagctccacctcagctggtccctgagccgtggtcatgtgggggttttgaagggctaagttgaagcaagtaattgcaaaagaacaggtggcactctgagggcaggggaaggagacagaagtttgactgcgtttgaaattatttcagtcagggaaacatctgcgttgtcttgttaagcagcttgtaggcccacccctggctaactgaactttgtgagcagttggggcagttatttggatatttgtccaaaggtggtagggaggcagatgacattctggggttactggagtccacctctgtgctgatggggaaagtatggcatgatgaatccaaagcaaccagtaattctttttgaaagtgcaggcatttattttgagctgtatttcataggagtttcatttggtttggttttggtatagagaggtgtccatagatctctattccctttttttttttatcgacaaggcctactacggataaatcagtttttgttgcctgaatacactttgaattagactacagaagccagtttgagctcaaatttcacacttgctgcagacaactctcagtgtggacagtgcctttctgagtaattaggatgttatatgactttttggtgaagccgtatagggtaaggagatgccccaaggcccctgatcatttcagaagccacctggagcaccagaaggggtcatcttcccagggctatggctctgtgtgcttagacatagtatggaattgtgctctaagcccacaggcttctccagagttaaaaggaagcaagaacatccttaagttactttttcaaaatatgcgcttcaggaggaaccaggtttccccaggagagagaggctccctgctcaatcagcacagggagttgctagcgggcaggctgcccagtgctgtggaatctccgccagcctctgggttgggggctccctcccacttcttgcttcttatggagtacatgggactgctctgctttaagccgcgatcagagctgttgtgagcaggacaagattgcgtgatcacgaggtgcgtggggagatgctaggacatttgttgatgtctttgacctgtgctccgtctctgttggatgactgggttagctaacaccactagagggaggtacagaatgttaaacagtcgtcagagtcacactgagggttgttttaacagagggcaaattcccagtttgtcaagcatatctctgttagagtccgaagttcatggttttaatggttctagctcgtagcccttaatattttcaggatagctgggtcctgccagtgtccgctgagtccatcagcacaaccagaaggtccagggtccaggcatgggaagcattctctgacaataccgagccctcgggacctcctgaaaccttgagcagaggctggagaagaccttcagacagtccttttactacctcacaaagtgccatgcccgggacctcagacctcagggttgtgacgttgttgatgttgtcaggccccagtacgtctctagtgaccgaagcagacctgcctgaaagggcactccggacagtgagccctggctctaacctgtgccctcatatttctgctgcctcatatggtcttgtttgcccactctgtaggtgactgatcaccctaaaagggaggtaggtatctagcagtagcacagttactttgagcctgaccacttgttctgaagtgcagatgttgaaacatgcattgaggaagaacactttaaggaagcactttatgatttactcatggctggtgttggcctcaaagtaaaagaacatcttaatgcagaacagtacaataaagagccccataggatggatgccatcatctgtccccatggttgggattgccaaggaaagtgccttgttctgtgcatcttcagaatcccccaggccctctcttgatccttttcatgaagtccagagcattccttctattacaggctgaagatgcattgtaaaaggtaatgctataatagtattccctcttctcaataaatgtgcaaaactggagaatctggtgctgatctgcagcatacttgacaacacagggaataccgtggatgttccacgccagccttacatccgtccccattgcctgcccatgtccagtggccctgcgcaacaaaagtaagggcttgtcttaccacactctccccagcatctagctcaaggtagatgactgactgggaaattccggttggataaaatggcttttccacattgcaactttgcatctctattaggaaaatttagattgaacctttcctctacttgatgcttagtttgagaacagttttcacaactttagagggtctctctcagagtatgttatactgtaaccttgaagtttgagatgaaacaaggtgtcagaggttttgaatctttcaaaggaattgccttttacagattttttttttattccctaagaagggaaaaagagagggaagaactacactaatgttagagataaggtatgttttggctcaaaatgtgtcatgaacctaaaggtaacttgatgggcagaaatgtctcagccatgtgaaccaagaagtgggaccacagtgcaaggctgtgggtggcagcactagatatggtggtggcaggagtgtgacatgtaggcactccatgggggacagctggacggtgtctatcaaaagtgcaaatgcgtaagctctttgaactagcaatgctactcctaagaattgtacctgtgtacaaggtacttgtgtacaagagtttttgttgaaacattgtaatagcaaaaagttggagagtgccaccaatacaggggaatggttaaatacattatggccagcttaaacaatggaatagtttgtagaaatttaaaacaatggatcctgtgtgtgtgtactaccatagaatgggccccaagatgcatgattaagtgaggaaaaaagcccatggtatcctaatgtttggaatggagaaagtgtgtagatgtatgtgtgtgcatatgttttcacacagacgtatacacgtgtatatcatatgtccacctgcatatgcctaggatgtctctgggaggatatctagcagcccggcagcctgaattgcctctgggaagaggggtgggaatgacttttcaatgtacaccttttgtaccttttgaattttgtaccatgtacatgtattatctattaaaaaatagttcttaatttttaatttggtatacttttcttaatagaaccaaaatggaagaaaattctgattctcta

SEQ ID NO: 78 - protein, 627 aa, Homo sapiens
MGLPRGPEGQGLPEVETREDEEQNVKLTEILLVAAGYFRARIKGLSPFDKVVGGMTWCITTCNFDVDVDLLFQENSTIGQKIALSEKIVSVLPRMKCPHQLEPHQIQGMDFIHIFPVVQWLVKRAIETKEEMGDYIRSYSVSQFQKTYSLPEDDDFIKRKEKAIKTVVDLSVMYKPRRKYKRHQGAEELLDEESRIHATLLEYGRRYGFSRQSKMEKAEDKKTALPAGLSATEKADAHEEDELRAAEEQRIQSLMTKMTAMANEESRLTASSVGQIVGLCSAEIKQIVSEYAEKQSELSAEESPEKLGTSQLHRRKVISLNKQIAQKTKHLEELRASHTSLQARYNEAKKTLTELKTYSEKLDKEQAALEKIESKADPSILQNLRALVAMNENLKSQEQEFKAHCREEMTRLQQEIENLKAERAPRGDEKTLSSGEPPGTLTSAMTHDEDLDRRYNMEKEKLYKIRLLQARRNREIAILHRKIDEVPSRAELIQYQKRFIELYRQISAVHKETKQFFTLYNTLDDKKVYLEKEISLLNSIHENFSQAMDAARDQFLRQMEQIVEGIKQSRMKMEKKKQENKMRRDQLNDQYLELLEKQRLYFKTVKEFKEEGRKNEMLLSKVKAKAS

SEQ ID NO: 79 - DNA, 5332 bp, Homo sapiens
gttatgaaagttacagggaaagtatgacaaaaaagattaacatgcaattataagaccaggctaatttccatgccttctcagaggtttagcatccttaattgcctgggatcccaggggcccccgtggctccactgtgcgttacaaagacctgattgcctctcctaagagtcataatctggatacagagctgactgcttggcatttccccctgcctcagagtcctgtgtgccggtcataactctactggtttttctttcagggccatggcctcccctgctgcccgggaccagtttttacgtcagatggaacagattgtggaaggaattaagcaaagtagaatgaagatggaaaagaaaaagcaagagaacaaaatgagaagagaccagttgaacgaccagtacttggagctgttagaaaagcagaggctatactttaagactgtgaaagagttcaaggaggagggccgcaagaacgagatgctgctgtccaaggtgaaagcgaaggcctcctgaacatccccagccgtggctgtatgtcattgattttacttttaagcaccgtatatcacctacaagatcatgaaatggttctgaaagcgacagtagagagatgcagttgtgatgatttcaacaacctggatgttttctttctcctctttgcttccattcatctctgttggctgctgttgatggagtcagacagtaaacacgtggcttggataacacccatcatcctatgaagaatatagggagtacttgttctctgttgattcaacttttatgtctccagtaacattgcgcttatgaaggtacctgtatttgtatggactctgaataaagaagaattcatttgtttagcaagtattagttcagcaaccactgagaaataagcactgaggaagattcagagacgtgtaaaacacagttcctactgcacaagtacccagcaggtggcccagggaggcagatacagcacacttgaccgcagaactgggctatccaagatgtttttcagtaaacagaaggcatttagctgaaatgatcagcccatgtagtgttggtcacttgggcctttcacctgccatggtaccttttgttcccagctcctccaggtgccagccagcaggcttggtggtgacagcaactggaacgaaagttcagtgttgttttaatttttatacgttactcaagttgatttctcagaaaattgaaaacagaccttgtgctgaggacacgtcaataaaaattataccttcccctgccccaatgttcatgtgagtcacagcatgcagaggggctgtgcatccccctcattgaaggcacatttgatgaggctacgctgcagatgggtcatggtctgagccaggagagagatagacactgttccctgcactcaaggcaagtagggtgtcaggaggaagagcagtagggtttgcagagatccagggaaacttcctggaggaggcagcatttgagccctatctaaagggagaatcggatgttgataggaagactgttttaaatgaaaatacactatgattaaaaacccaagagagtgcagaggagtacaaggcatgcatgttgggaaaggagggaataagctagtctctgcaggaggcttcagagacccgtctgggaagtagggctgagactaggctttggagggccttgaagggcagctgagggttgattttaatccttggaaatgaccagtgcagatcaaacatggagctcctgctgccctggtcctcaggagtctggtaactcagtcatgttctgtaggtttgtgctccattttgcataaatcttgcaaacataccaggtggcaggtttgcacagtaacacaaaagcttaaacatgtcaagcaagtggggcattcagcagccacagaaatgtgttcatttttagtccctaatggatgtgattaagcagggctgatgtgtacagatttaaaaacacacacacgtgctggattaaaaacagccactggtttcagtgccagggccagcaaggcctacctgagccaggcggaagcagcagcttgcaaatagaaactgccacctgcgagcgcttcttgggtcatgtgcagctccacctcagctggtccctgagccgtggtcatgtgggggttttgaagggctaagttgaagcaagtaattgcaaaagaacaggtggcactctgagggcaggggaaggagacagaagtttgactgcgtttgaaattatttcagtcagggaaacatctgcgttgtcttgttaagcagcttgtaggcccacccctggctaactgaactttgtgagcagttggggcagttatttggatatttgtccaaaggtggtagggaggcagatgacattctggggttactggagtccacctctgtgctgatggggaaagtatggcatgatgaatccaaagcaaccagtaattctttttgaaagtgcaggcatttattttgagctgtatttcataggagtttcatttggtttggttttggtatagagaggtgtccatagatctctattccctttttttttttatcgacaaggcctactacggataaatcagtttttgttgcctgaatacactttgaattagactacagaagccagtttgagctcaaatttcacacttgctgcagacaactctcagtgtggacagtgcctttctgagtaattaggatgttatatgactttttggtgaagccgtatagggtaaggagatgccccaaggcccctgatcatttcagaagccacctggagcaccagaaggggtcatcttcccagggctatggctctgtgtgcttagacatagtatggaattgtgctctaagcccacaggcttctccagagttaaaaggaagcaagaacatccttaagttactttttcaaaatatgcgcttcaggaggaaccaggtttccccaggagagagaggctccctgctcaatcagcacagggagttgctagcgggcaggctgcccagtgctgtggaatctccgccagcctctgggttgggggctccctcccacttcttgcttcttatggagtacatgggactgctctgctttaagccgcgatcagagctgttgtgagcaggacaagattgcgtgatcacgaggtgcgtggggagatgctaggacatttgttgatgtctttgacctgtgctccgtctctgttggatgactgggttagctaacaccactagagggaggtacagaatgttaaacagtcgtcagagtcacactgagggttgttttaacagagggcaaattcccagtttgtcaagcatatctctgttagagtccgaagttcatggttttaatggttctagctcgtagcccttaatattttcaggatagctgggtcctgccagtgtccgctgagtccatcagcacaaccagaaggtccagggtccaggcatgggaagcattctctgacaataccgagccctcgggacctcctgaaaccttgagcagaggctggagaagaccttcagacagtccttttactacctcacaaagtgccatgcccgggacctcagacctcagggttgtgacgttgttgatgttgtcaggccccagtacgtctctagtgaccgaagcagacctgcctgaaagggcactccggacagtgagccctggctctaacctgtgccctcatatttctgctgcctcatatggtcttgtttgcccactctgtaggtgactgatcaccctaaaagggaggtaggtatctagcagtagcacagttactttgagcctgaccacttgttctgaagtgcagatgttgaaacatgcattgaggaagaacactttaaggaagcactttatgatttactcatggctggtgttggcctcaaagtaaaagaacatcttaatgcagaacagtacaataaagagccccataggatggatgccatcatctgtccccatggttgggattgccaaggaaagtgccttgttctgtgcatcttcagaatcccccaggccctctcttgatccttttcatgaagtccagagcattccttctattacaggctgaagatgcattgtaaaaggtaatgctataatagtattccctcttctcaataaatgtgcaaaactggagaatctggtgctgatctgcagcatacttgacaacacagggaataccgtggatgttccacgccagccttacatccgtccccattgcctgcccatgtccagtggccctgcgcaacaaaagtaagggcttgtcttaccacactctccccagcatctagctcaaggtagatgactgactgggaaattccggttggataaaatggcttttccacattgcaactttgcatctctattaggaaaatttagattgaacctttcctctacttgatgcttagtttgagaacagttttcacaactttagagggtctctctcagagtatgttatactgtaaccttgaagtttgagatgaaacaaggtgtcagaggttttgaatctttcaaaggaattgccttttacagattttttttttattccctaagaagggaaaaagagagggaagaactacactaatgttagagataaggtatgttttggctcaaaatgtgtcatgaacctaaaggtaacttgatgggcagaaatgtctcagccatgtgaaccaagaagtgggaccacagtgcaaggctgtgggtggcagcactagatatggtggtggcaggagtgtgacatgtaggcactccatgggggacagctggacggtgtctatcaaaagtgcaaatgcgtaagctctttgaactagcaatgctactcctaagaattgtacctgtgtacaaggtacttgtgtacaagagtttttgttgaaacattgtaatagcaaaaagttggagagtgccaccaatacaggggaatggttaaatacattatggccagcttaaacaatggaatagtttgtagaaatttaaaacaatggatcctgtgtgtgtgtactaccatagaatgggccccaagatgcatgattaagtgaggaaaaaagcccatggtatcctaatgtttggaatggagaaagtgtgtagatgtatgtgtgtgcatatgttttcacacagacgtatacacgtgtatatcatatgtccacctgcatatgcctaggatgtctctgggaggatatctagcagcccggcagcctgaattgcctctgggaagaggggtgggaatgacttttcaatgtacaccttttgtaccttttgaattttgtaccatgtacatgtattatctattaaaaaatagttcttaatttttaatttggtatacttttcttaatagaaccaaaatggaagaaaattctgattctcta

SEQ ID NO: 80 - protein, 80 aa, Homo sapiens
MDAARDQFLRQMEQIVEGIKQSRMKMEKKKQENKMRRDQLNDQYLELLEKQRLYFKTVKEFKEEGRKNEMLLSKVKAKAS

SEQ ID NO: 81 - DNA, 707 bp, Homo sapiens
agtttccgctttgcactccaccccggtagcagctccgcggcagggacagcttcctccggacgcttggcgggcttcgctctcgccttacgacagcccggtcggatcatggggttgcccagggggccggagggccagggtctcccggaggtggaaacaagagaagatgaagaacaaaatgtcaagttgactgaaattctggagctcttggttgcagctgggtatttcagggcaagaattaaaggcttatcaccctttgacaaggtagtaggaggaatgacttggtgtatcaccacttgcaactttgatgtagatgttgatttgctctttcaagaaaactctacgataggtcaaaaaatagctctgtcagaaaaaattgtctcggtcctgccaaggatgaaatgcccacaccagctggagccccaccagatccaggggatggattttattcacatatttcctgttgttcagtggctggtgaaacgagctatagaaacaaaagaagagatgggtgactatatccgctcctactctgtatcccagttccagaagacttacagtctccctgaggatgatgacttcataaagagaaaagaaaaggccatcaagacagttgtggacctctcagagatatggatttagccgccagagcaaaatggagaaggctgaggacaagaaaacggcacttccagcagggctgtcagctacag

SEQ ID NO: 82 - protein, 175 aa, Homo sapiens
MGLPRGPEGQGLPEVETREDEEQNVKLTEILLVAAGYFRARIKGLSPFDKVVGGMTWCITTCNFDVDVDLLFQENSTIGQKIALSEKIVSVLPRMKCPHQLEPHQIQGMDFIHIFPVVQWLVKRAIETKEEMGDYIRSYSVSQFQKTYSLPEDDDFIKRKEKAIKTVVDLSEIWI

SEQ ID NO: 83 - DNA, 121124 bp, Mus musculus
  misc_feature (1)...(121124): n = A,T,C or G
caggagccatccaatcagaaggctgagagccacatttccataacgatgattggctagtagtctggagactggcggagctgcagggggatggggaagaaatgctctcctgagaaaatagcagaacaactttctgttgtttactgcatattctccaaatgattgtagtgattcatcctttaggaaggcttgtttagcaaacaaaagaggcacagttgttctcaacaacagtagcattcaaccgccaagaagctgagcaaaatggaagtctttaaaatcaactttaggctccctgagttcttctagctgaatatgcaaaacctgtctaggagaggcatgaggaacataaatcactaattcgggtttgctggttttgatgaacgccaccgttgctttattaaacgtgtgtcaactttatgaaatctgaacaaagtggagttcatcaagtatgaaaatcctttgaaatataccgagtattttcctagttaggggggttctgccaccctcaataacaaagttgtcctgagtatttctttttcctcctgcagtcatttatacatgaaaaatcttagagatgtattcatcaatgtgttaacgctctcacaaatttttatacttatacccgtctgctctcagtaattctctccacaggacaaagaaaaggggaaatgtaatggctgtatccaacagcctttgtcctttcccaacttggtgttttttctaccctgttgttttaaattcacaccgagttgtagctacatttcacctacaagtttttaaattttgttttacaaacacccctccacccccatcgtttctccttctggcaaggaggctagccccgcaaagcagactaagcagaagtatttttcagactttcccagtgaccattccttggctggctaacagaccagccattcagaagcaattttcttcaggctgaaattatgtgctgaccgtagcagatcacttcccataataacccttcccccacccagcgctaaatacaatctgtctcctactcactgtaataacgtgcaaatgactgtaatttcgcagacaagaaacagcccaaagtgaaacgtgtctaaacagaggtcgatttgaaaaatcagggctattacctaaatctgtaaaatacatattgtaataaaaccagcaacagcaatctccaataagtagttctaaaaaacgcagcttgtgttttgatcttctttatgcacccggtcttcagaggcataaaagagacctccctcctttcctagaaatgctttcatggcatgtgatttcaattgcctgactttcctagctgatcccagaccctgctagggcacccatgcagacacagtagccaacaccaccctgctggtgcctagggccaagatgaggtatgatttgagacacttaaggctgacctacctacattgctgttctcttaacgcaagtattatacaagtattttttataagagagacagagacagagacagaggggaagagagagacagagacagacagagacagagacaggtggggggagagagagagggagagggagagggagagggagagagagagagagagagagagagagagagagagagagagagagagaggggctgttttgttaggttttctcacagtgaagcatagcaggagcagggtgctgccttttcttcacccattaagcaactggacctgcagaagaacaagagctagtccagcatacagagagaagccaccctcatctttctccttctgtcttggtattgaacccatgccatcaagtaggagaggcaaacactctaccatggaactatatccctatatttttattttcttgctattcaaattcattgtaatattaaatcacttgatatagttgccttatattgtctacagttgtttaaaccaagctagattacaaagagctgtcaagactgcatgaatctccatctttgtgggtcaactggtgagacttcaggctaaaatgtgttagtaggacataaaagctacctcaaaaactaatgtggtaatgttagaaggtatagaataatgtctgtatttgtggatgtctgtcagaaatgtgtttttcgccaggggctatcatgaggtcttttttccctcacctctttctaccaaggacttgaaatggttctatatacaagatcttttttccccttggaactttgttttggtctaaggttactttaggattatgcacactatcaaatgtttgcccaaaatggcaatatttgactctgcttatgacaactatccccagatagatattgctaaaagtattcaatggaaacttgagtcggaggtgtagcaggatttttttgtttgtttgttttgttttgctttttccctccctcttttcagaagctctttatcaactaggaacaatgatctgtaggtgaaaagagtgaagaccttctaatgtctctgtgggtgtttccttaatcggctccatagtctctggaagggagcggaagccaaccagtgcttaagggctccaggtggacaagagtcattccctagagttctgttgggtaaccaatacatttatagttacccctaacttaagtctcttgcctgcaaattaagcttatataatttatattttaggattttctcttctagtttttgtctcaatcttgagagctcccaaagaacccccaagcttgtgttctgtgtagagttagaaaagcttcgacttgcttccaagtaaatacaaactcaagaaagaggtctgctggtcttgagggcacattctatgatcctaccactgggaaagcagagactatcaagtgcctagctagcctgggcggcctagtaaattgcttgtagaaaaaaaaaaaaaaagaggtggtggtgctggtggttataaaactggttttgattgcctttaataatacaacgccaatcagaagaaagaatcacaaacaaaggtcgctttgattttctgtgttgttgcctaaagctgttcacctcctcttcagctctttccaggaaaaaaaaatagaaagaaaaagaaagaaagaagggaagagagagagagagagagagagagagagagagagagagagagagagaaagggagaatggagaaaaggccaagttggcaagattcttccacttccttgttaacgatgtgttatgtgtagtgctgagctgatttggggggcccatggaagagcgatgacactctctaattaactcttttacactaacctcatgtctcccccatccctcaactccgaacactgttcctttttcccagacatctcctccgtctctcgtgtctctgggtagacacctggtgaaatgtaaaattacaaagtctacgtgttaatagagtgtactggtgtgatcaaggaagtgcagtggatatcacttggaagacaactacaccccctggtacattactttgataagaaatatatgtaataataagaggtcatgaatttgaaagggaatagagtgcacaggaagaattggaggggaagagacagagaggtagaaattatgtacccaagtataaaattctcaaagagattaaattaaaaaaaattaatcagaatgaaaaatttttcagttctgtaaacagagccaaactttccaattttgtgaggtaactccacttgccaaggctggtagctaattatctttcagccttccattatctgagagtcttcacatgcctcctgattgtcctccaccccttgtcaagcaaaacaaacacatgcaaagccagtataacaatagtagtctattcaaaagttgcctggaagaatttgggaggtggaagagacagggtggggaataaagggcctgtgggaatcataaaaatgggggaaaaaagtgctttgatttgccaaaataatttgaattaaatatgtactcaagttggccttccttggccaatggtgtttatctaaaaagactataggtttaggtttggctgtagaagacagggctaggttcagttacacatctggatggttacattttggatctggtttgactccctgctttctttagtaatgggttgttttgaaaaaactttaccctctcccttttttacccttttgtttcaagagataatagttgattttttttttcttcctaaactaatgtcacatatggcgtaaccacagcctgaaatggagacaacaccccagggacacaggaagcacacaagtgtgagttagtctttggaggaatcacacttctaaaagaagaaaagttatgacttctgtaaggtcctgtgccattcccaaggagccacacataaatgtaaaacctgtacagtaaaaataaataaataaataaataaataaataaataaataaataaatactacccagaagccagaagcagaatagaagatgagcggatcctaggtgtctggtttgtcctgaggatttgttattgtacatcttcaatgtgagtaagagaggagatgacatgatccctttctgtgtctcactgcagtcaaggtcagaacttgcagtctgttgcttttttttgcagcatctactctagttcatctaacaaattggcatttttttaaaaatggggtaaatatattaaaaaaacacaaacattagtcaatagccattacttataacatgtggcataaatgtttttattgatccacaaagtcgcctccaaacatttacatcatagttgtcttctgccagaggcaatttactcttgtgtgtccattttcgtaagctatggcatgtctaaaactccaattgtcaactgaaaactgcagtaatatccgatctttcaaactctgagtaataattggtttgcttgaaacccaaagactaagtgacgttaaattccccacattctagctcctacaataattgaaaataacaacgcaaacttaaaaataaaccatgttctaaagacttaatatgtaagactacattagtttaaatatattaacgggctgttttcacattagcctcctgtcctggaaaatgagtcccattaactcggctgtgtttgtcttaccataaaagtgggaacattttgtatgtttgtgnnnnnnnnnnnnnnnnnnnnatcgatttattttttaataaggctcatttgagatgttaatgtggtttgcagaggccttcttatctatctgtctgtctgtctgtctgtctgtctgtctatctgtaggtcgcagaagattggttggataagttggagggactcattggtaatttgaggagaatctttcagtggttttgctgaatggtgatctgggtccacagttcatggcttgcagatcagaagcctggaaacaaaagggttacttgttctcccatcaccggacgctccccactgaatttttttttatttaatgagagagagagagagagagagagagagagagagagagagagagatttggggtgggggtgggggaaaggattacaggaagggcaaggtggtgggggaagggctgagaggcaggagctgcagaactgggttgccgagtccttgggacttggaaggggccacagtaaaccgctcgcctgggtttccaccgcgcggcgtccccgctctgtgcgggtggctctcagctggcttccctctgccaccgagcgatcacacacattatttcccccaagataacacaatcaaacttgcatttaccgatatcctctcttcgcagcctgcttgagatgtgttttaataaataagtgttttatgtgaatgatgtagtaattgaaacaggcgccccattttcccccctcccttcgtcctgcgggaggttttgcaaccccaatctgcttggaaaataaaacgctttgtctccaccgccaccccccaccgcacccccacccgcgctcagtgtgtgttttatacgtgtgtatatctcaaccccctacagtagccaagagaaagcagctagccaatgagagagcccagtttcataaaagctgctctctgattggtcctgtgcgaaagggcattgggaacaaagaaaagtccctttcaggtatacaggctgagagctcctttggctccactccccctgtgcgtgtgttgtgtttcagttctgattccactgttccagaacaagcttggtgtgtgtatgtgtgcaccggggggatttctgtgttttggttttttttttgctttattttttttatttttataaaaaaatacacgggacggtctgtgacatttgctggtccatctttaataaaaaaaaaattgaagaaattataatttccaaaataaagaggctacaaccaaacacactcaatgcagttagaaggaaaaggtcaactcgctcccatacagaccgtaagtacggttgcgtggtgtgtcgctatatagcactttagtggggtattcatgcaggggaatgtgcgagttttatgcattgaaatgaggaactagttacagggtttggctttgcatttagaacagcccaagaagggtgaatttgattcagtggaggggactttgtaacttctttggacaaattaagcttgactgggcacttggactaacttagagtaaattaccttttgggctcgaacccaaaggagactaagagtgattcggttacacaccctggtcctccgtgtcaggtctcttgcgcaccttccccctcctttccctttctaccggagctgagctgacccccgcccagaccgagccaggcaaatgggaacccgggtagaacaagccgatttctctcctgtcacatcctcctgctcagtaatttaatagtaaactagggaatattcatccattacatgtaatgactgtaactaccattttccacctttaaaaaggcaaggaaaaaaaaaacccaccattaagagaaggtgtgtgtgtgtgtnnnnnnnnnnnnnnnnnnnncccaaacaacccccacaaatagtaacaatggtgtgtttattacaagtccctgtttgggagctagcaaaatgtttttctttgtttaatacatgaaggggagggggatcctaaatcccagcagctcggaggtactctgcccgcccccccccgccccccaggcgtccgctgcattggcccccttgggaaagccgacaaattggagatcagttgaggagaggtttataagctgtttctttaaaacatctgctttgctcttgtggccattacatttccctccttccgaacttccgagatcctagatggctgagaaatgtttcacattcataacttgtagcttcgcccactgtagggcgtgcagggggaggggggttgcagcggggagggagaaaccttcagctttttttttaaagaccagatcagtattttcttgatacgcttgtcaccatttttgttctcacgacaaccaattgagcccttgatcctcacgtgatgtgaaaggcttgcactgtaacaaaaccgctccttttagatggttggtgttgctaacgcgcccatcccccactctcccagccccgacatttccagcaaagcgactctccacttccaatccatcaacaattcattactgcttttagcttccaaacgccagctaattaaaaatactaagccaagctccgaggccatctgactaaacacaggagggggtgggcgagaggtggagagaggaggagaaaaaaaatagagacgcactgtttgctgtgtgtagagaaagagaaattgtcctggagaaaggtcgcctttaaaaaaaaaaaaaaaaaaaaaaaaacctttttgactctaattatcgaattaccacatgacagatcggcttgcgcggcggaggattttaacccctcctcagggactattctaagaactcggttctttttttctcaaaaacaacataaaacaggaaaacatcacatccttcaggtttccaagacagccccttttagacgccgttattttcccggctccaccgccccccgccccgggcgaaagctgctctaactggtttatcagctccctgcatcgtctgctccctcctcctccacacctttctttttctcctccagccgggctcctcatcccaccctttcttcttcttcctcctcctccccattctttcatcccctccttaagttagttggagaaatcaaatgtcaggacgagcggaaaaatgccacttcccgactaacaggcggaatccagcccagattttcagtcctttcttcttattctttcttccctttcactaatttatcccgatgttagcacattctgtctcgttactagaggacgcctgtaggttggctacatgagatcattacttactgatcacggtgactctgaagtctgcaacagaaagcggaatgagaagttcggaaaagttttttctctaatnnnnnnnnnnnnnnnnnnnnccctcccctgcccctctcctctccctctctctcaacaccctattattctgaatgcttgttaagaggaaaaacacccttcggtgctcgggttgtgaacgtgaagcatctctcagctgcacagtgacacattttttttaaggagaaaaggactccagagctttttgccaaatgggggatgggggagtggaatgatgttactgagtgattattttggctgagatgtgttacttggtttcttcctttttgatcatttggtgtttaagtaaaatgaggcacagggctgtgtgcctagtggactgagaaatgcttttttgatttgccggcctaattaaaaaatgataaaggatttaaaggtaagcattccctctctctctctttctgcgtctctctctttctctctccctctcactgtatttatttattttcttgacaatcaactgttaaaagggggctgatccctttaaaaaactgttttaactgctctttgtcaaacacacactcatttgtggtcactgaggccaccttggcgcagaccacttaaagtgtatgtcttaatcagtttccctacagtcagtagcaccatatttaacagactgagcagttctgtgacccaggggtatggaagaattatttagatggatttttctttttcttttcttcttcttcttctttttttttttttcctcaaaaaggaagatctttaaccttttccctcatactgtctttttactgagaaaaatactcttaaagagatctgtgcatatttcataaagaatgtgtagcttttggggaagggggtggtaggtatgtgtgtgagaggggaactgttgtttttctgtttcttgtggagaacaaaacattggttgtctagacaatgtgcaagaagaagtattaaaattagaaataaggaaaacttagtgacatcattttgaacactagtcctagagaactttgagggcctgtggtgttttttttttttttttttttttttttgttgttttttgcttgttttgtttttttacattgcaagacccaggccatgcttagggaatgtttaacagggtgtttttcttgtatgaatatccatgatcttttcctagggtagaaatagcacatgtgccaggcaaaaataaaaaatgttcaacttaaaaaaaaaaaaagccacaaaaacctttctgggcttgaatcagatccttggagatattttaatgcttttaaagaactggctatccccctgctgtttagagggattttagttttagctactgtaagatgcttattgtcggggaaagggggggtgcttttcaagtctgcttgttttcctttaaacatggtattggactgtggaggcaataatgagcccccagctctctgtccttctctgtgccccttcctaactcctcagtattaatggttttctatttcggtaatacccagacaagaaatattcgactttttccccccctccacaggagaagctggacctcgagtgaaggaagtgagatccctggacacatttttgggggcaggaaaaagaagaggaaaattgcaaggaaaaaaaaatttttttttctttacgagaaaacccagaggagctaaacgaatgtcccctcatccctcaaagaaagttcatcgggtttttaatctcgagagctcatcttcaggatgtccgtgaacgtttcgactgcaggaaaaggtgtggatccaaatacagttgatacttatgacagtggcgatgattgggaaatcggggttggaaatttaatcattgatttggacgccgatttggaaaaggacagacaaaaatttgagatgaataattccaccaacaccactaccaacaccactaaggattgtggaggtccggcctccaatgggacctgttctacctcagccttagctgatggcctaaaatttgcttctgttcagccctccgctccccaggggaattcacacaaagaaaccagcaaatcaaaagtgaaaagggctaaaacttctaaggatgctaataaatctctgccttctgctgccttgtatggaattcccgagatcagcagcactggcaagaggcaggaagtccaagggcgccctggagaggctactggcatgaattcagcgctgggtcaaagtgtgagcggcggcggcagcagcaacccaaacagcaacggtaccagcaccgggacctcggctgccaccgcgggggcaggctcctgtgggaaaagcaaggaagagaagccagggaaaagccacagcagccgaggcgccaagcgggataaggatgctgcgagatcccggaaagagaaacacgacctgctgcagggccaccagaatggcggcggaggccaggccccctccggtggtcacctctatggctttgggaccaagagcaatggaagtggcgcgagcccctttcactgtgggggcgctgggagtggcagcgttggggctgcaggggaagttagcaaaactgctccggattcaacgctcatgggaaactctatgctggtcaagaaggaagaggaggaggaggagagccacaggcgaatcaagaaactgaaaactgagaaggtaggatacgatcgccttcttgtgtgccccccactctgtgtgcatttgtttggggttgtgggatgtgcctccaggtgtcttacacttcctagtgctttcgggttctccgtgagatttctatgacgttcatcctttatggatgctatcccgagtgcagattttggctcttgcttctgctgcttgcttctgctggtggtgccagcgtttgaaaggtcatagggtgggaggctctgaatggtccaagtgccttttgccttcttgtaagagcgactgggcagccagcaaattgtccgtgtgtgctttgaccagaaaacctgctgcggcactagcttgagtttcgtcctggtttcttccctaaagagaattgtcgtctgtgttattgttaaccgtgtgtctttaggaacagggttctagttccctctgtggaaagggagtgtgtagtgttattgacactcattgttctgttactttcccccaaatagttccgtcaaaggatgtactccaggctgggagtattgatcactgactttgtaactatgcagtcaaactgtgccagttttgggtgactgtggagacgctctctactttgctctctcacccactgcagctagagccgtgagactgttatcacttcggtctttagcttgcctgggcagctgggagattagtaagtaagactcggaaagcacatttggcttgtgttcttgaaatgtgaggatccgaccaagggggccattggggcagcagggaagccaactgtggtttaacaatgcctgacgtgagccatttggacccctgcactcttgttgttcattgtcttaaagtctgtggttagacactgtgctggaaaccccctgctccagtgttaccttgattaggcatggaggcctggggtttgcttgtctgagatgcagttgctttggggtaatgtttgggaactggcggctatgtgtcctccaggctcattggttgggaggtgagagtggtgtttctgtgaaattaatctttagactcattccacaagttgtagcatgaagatgtagtgtttctatcaagtggttgtagtaacgtgatttcttctaactatgcttattattgtggtacgattatgtttcccctttctggctgtaatgatgcgaagaagtctcctggggattactcctgcatgaaataacacaaagttctctgattccctttattttcaacttcaggtgctcagagttaaagttggaatggacataggaataaagttctgattgtaaacactgatggaggcagagagaggcatagacaataccgtcaaacttgcaaaaggctactgattgcttttggaatccaaatcctcttagccttttacattgatgaatttagatcaatttaaaaaaatctcaggctttgcttcttactttaaatgtgtggtttcacataatttctactaaaagacagtttgaaatcttcttattacttagtacagtgggacatttacttttgttgccaatagtcttcaaattgcagctttaatctgctttaactatctggatgaattgccctaatccagtgctcacaatgctgtggttaaggagtcagagctatttgattggatccactggctgctgggaatgtgggaggttctggccttttgcattccccttagccttttaatcttccagccaaatgttcacattcaacaattttgtttagctggcgatcggaacatttcaggatctcaaaggctgctgtcatggcaactgagattagtgcgtggtgtcggctctccagtttgtgttcctttggctccccagtcacagagggaagtggctgaagaatggagtggctgaattattcgcacgcatgcaatgcgtcttcaggcagagcagtataaatggcatcctatgaattccataaatgaagagcgaacaagtcatgcccggaagcaggggtggaggtgggggcagggaagagagaggacgcggccctgctgtgtggaagccatgctccaacctcagccaccagagttgacccagaaatcattttaggatggtttcaggggcctggaaccttcagtgttagccactcttgccaagctgaggggttggcttgggatcttaaacattggtccttaaacactgccccacccccacccccaaaatgacttcataatcccatccatccttgtctctcagagatgacaactccctggcatgatagcacccagagaagagagcctaatcccactaacttattgggtatgtcaaattaggctttgttttagaaaatacagtggccgaaggatgcctgtttaggaagctagaacttaagagggcatacttgaaaacatgcttcacatctgaggcctcatgaaagaagtttttttttttttttttttttttttttttttaataaaaacattctatatgctttaagttcaacatacttgaagaaccaggttactggagcataggtaccttcagaggcaagatgcaacaagattttctggtttttctcttcttccttccttcctttctttctttctttctttctttctttctttctttcttttctggttggaaggttaaaggagattcataagatgcgctgtcactgtttaattttcacagcatgcttaactgtctatttttggtctgtttactctgtttcttcactacccagggtcatgtaaagcatgataaattggaccttatgaaacctaattaaatcaatgagtgttctggctcctttatgtggaaaccacaagtatgttgtaaaattcgccactcccttaatacgtgaaaaaaaatcaaaacaaaccataattccaagatgtttgagctgtagctctatagcccattttgtggttaagccaccagtgacatgtctgcctaagtaggtttgatgagttggcttttggttgttagaacctgcctctccaccttccattcctgcctttcaaagcagaatggtctagcattgaagctgtttgcatatctctcttcattgtcttacagtttagatttatcagaaaaggaactattgggctggtttaaatagttatataaagtactgttacaatcagtggaattatttaatcactagaatactgggaaacacacaagaaaaaaacaaaaacaaaaataaaaacaaacgagtcttaaaaacaactgacactgaaacagaaataaatgaaagtcagatagttgtgtcttaggattcttctatgcagtgcgtattccaagaagggttatttctgtaatagataaactcttttcatttccattgccttgtcttctgaaagatggtgtctataaatggacctgtctataataagatatcattcattttgttttattctcttgtagaaaccttttttacatgtcactagggaatcctgacacattctctaagtgcatgtgagcagtttaagaacatattttgattaatgacttttgtggctacatccccccactcccataatatagtgcgtcctgtgaattagggagtgcatttgatctacagaggaatgaaagggcaggaaggtcactggctttaatgaaacaactgagaccattataggtggacagtgtgttgttttgaaagttacatatggatttagctaaaggtggcttcctgtcagcaccaatcctccttccggttcaatccaatagacaccctgggaggtgaccaaggggctgtctaaggtgtctgtaagaacacacgaatcttggaatatcggtattatcggttccatcattgaattttgagttgaacatttgaaatgtgttaggtttgttggaggagaaaaaaaaaactgtgaaagtatacacaattgctccagatcgagctaaaaaaagataatgttcagctactttaataacttggcaaatagttcataacactaggagagaagggcagggggaggggtgggtgtccaaatgtcttaaggttaagaatatgctctcatcaaggaaaattgtttgggtgcaagatggttttaattaaaatgttataaagacttttttttttcctaagcagcacttttatagttagtaaattgagtgaatgctgaaagtgctaagcagaaatctccttagccacggaggtgttcaataaccagactcaaacaacagggagagtaccatctgttcttggtttccagcatgaaacacagggattgaatgaatggctgagatttgccccaattttgacaatgtctgtgctagtccacctggtacttcatagaaagttgaaattgcagtaacacacacaccactgtgaaaacatgtgttcccacttttttttttaaccagttccacttttttctctattttgggggagggtttcctgaagctcagccattggctacttcctacagccctcttctactttctagaggccctcacactgagggggtcagtgcttcaaagatctaaatgatcctgtcaattttcctcctgcaggctatgggggaaaagctccccagggctcaccctggtcatcactcttcattaaactaattttgtgtggtagtgctgggcactagtgtttaccagacacgggtcacgctctcattcagagccaccttctagaatccttgataaacaacaacacacttctgtaaggataactctcgagtatttggctctgagagacaggtattcctggctctgggtttagtgggaaccctgggtaaaacattatccggcctttgtttgaggtcttttattgaagctaatgactgggcttgtgccttcctgagataaatgacattatctctgagtgggctgacaggaagcagacatgttaatggtgaatctgcaggggagtatctgcttgggttctgacaaaggagcggagaagggacccctggttgtggtcattagcacataatgcattcttgctcatcctaagaggcccttgataattggaaagctattttagctacaagcacttaaatcataaatttactacctaagagtagcaacgtaaagtgtttttgttaagaagtatctgttctgctctttgaaggtggtggcagatgaggctgttggtaatgacatttgggagaagtggcaggttgaagcatttgttttagaatcagatgggcaccctctttttctgtcaacattgctcagccttccttctgcattcaccaggccaaaaagaaaaaagaaagaaagaaagaaagaaagaaaagtggatccaaagctccagggaagtcagttttgtatttgaagatgtctcgtgggagggggataaaaatctccttttttataagctgggaaagagattttgctcagtgatttgagtgtggtgaaacctgccttttgaagtgtaggttttaaaaagtcatgggtataattgagtttcaatgcaatttaaacgctgctgcttgaacgaagataattgccacgttgaacacactctagaggtggaaggatcacactctcccattctttactattaagcattgggaagtttgtcatagtaattactgtaacacaacatagttttgattgccagtgctctcagcttgccagcgatctgaacatcaagggtgtagcttggatcctaaacagtttatttctaagtcacctggagagcgttcttctgttatgtagaagccagaactaaggaaacattgggctacccttggctgcaacttcacagtggaatatcatttctttgctaggattgttaccagcgattatacaatgattatacatgtctgattctgggccattgaatatggtagggatagggaacaggtgaaatgtaatgcctttggtagtcagagactaagtaatgtaaagatcatattagaacctggtaaggggtcttttataaaggtctgagagtttaaatgatgtaattgcatgtatagatgttggattggtagtcttgtgtggtgtgagctctattcttaaaacacaaaacaaacaagtaagaacaacaagccaaggttttgagctggcccaaagggtgtaggcactggacaacaaacctaaggacccaagtgtgttccttagatcccacactcaagaaagagagaaccaactcttgtcatttgttctctctgaccctctttatgtgccctatggcaggggcacacacccatgcccaagggcagatgcacctataaataagtaaatgtactttaaaaataaaaaaaagaaccactaattttgcatttcactctgctagagaggggggggcatccctccctctgggtcaaattttgtctcccctctgaaatttcactagtgactgcttactttctgtaacaacttctcaattcaagctaaaggatttggcaactgtaacaaagccattgcaacaggatgaaaggttgtttaaactcctcttagctgtctgaccagcagttgggctgtttgtaatgttatttttgagagcttcaggggaattcaagatgatgaggctggcactttgttctggaagctgaatgttacaggcctgctgaattttgcttagaaacacctttgggaatgcagtagaagagattatggattctgcttcaaggactaaagtgaccacaaagcaaatgcttgagtcttggtagggccagtgggccttgaactataggaatgtatgtcatcagatgtttaaggagtcctttacccccagggacgtgaagtgaaactttaacatcaatgctctagctctgatggagaactcaatgggtagggtgttctgattaggacaagcaggcttgaaatggtgaacagacatctctgctgacattttcaaagcctctccccnnnnnnnnnnnnnnnnnnnntccccctccccctccccctccctctttctctccctctctttctctctctctctctctctctctctctcctcccatctggtcatttggacccagtctgattattattcatcataactctcagccatctcactttcttcatcctgggactcttcagtgtctgctagaactctaagaaaaatgtacatttaggtatatcccaataatgccttatgaatgtaggcaacacagtttaggggtaaataaaaacatattgattatatttttgtgtcgttcctaatggccttagaaagcacatatttagggttgagaatgggcttattatgttaaccagggagcagatgtcatggtgccacagacgtataattttacttaaagggacttttaaggtttttgatgtgttttcttttcctcttatttccccgatggcttctttttattgaagggtaacttaaggagacctggtagcaattttactgccttcccttgacagtttgaaataatagcttggtctttgcttgtgctgatctcataccagtgagcttgattctggtttttgtcatgtggcagcaaatttatttatttatttatttatttatttatttatttatttatttatttaaaaagtgtaatatgttttaaggaatggactcttttatatgcttcaattagcagcagacgacaaagttccagttggtcacactttcgtaaactcttggaagtcgttgcttgcccctttgattaaagaaaacttgtggtttggttgcaaagcgcatctggccttctggaagcttgcttttccttgcacccctgtgtccttcacattagtcactgagggttcaaaggtcgtgtccaagtttttccgtgttaggttagcagcctatgttggagggctgccctttagttaggtaccggccttaccgcacctctgaattccgctagcataaaaatcactgtttgtgcagattttatagtttagctaattcttcactggaaataggagggggatttggaaaacattcctctctcaccctctccatccccctttccaaacagtgctcaaccagaccggcttacttttgaatttcctgtcatctctttcactgattttatggatagctcatattaaaaacaataatgtttgacttggaaggcctgaaaccttgggtttttcattcttcatggggaactgtgtatttgcatgtggctcaccacagtacatggataacgccatcaaatctggtctttccgtttgggctcatggtcagcacaatagcacttagctctctgttccctggttccagtgcttttgtgatggaaatgaaattaggaccagagtctaggaagcaaaggagaaaatacgcaacagcaaatagaacctgacccttgacctacttcaaaagcaagcagtggtgatttaaaaaggaagaagaagaagaagaaaatcccagggagtgaaagagagggtagtccattttaattcggtgtgaagctgtgtggaaggtgcgcagagcgcagatgaatggtggccacccggtcaaccagacaaactgaaggcttggtagctgatgaagaagctctgagcattcccggatctgtcaactgctggaaggtacaatatgaactaactctctcttgcgtgctggctggggctgcccaaagggagcaacaggatttcacaaaggagcaattggtctccctccacccctagctcaatgcatccagctccgtttggacaattgtctccatttacattcctcgcccaaatcctttccccagccttttccgtcatggcgaagcagatgccagacactgaagtcgaaagccagcagctgtttccattacttcatggctctatgggcccttactagcctgctgcttccccttttcctcccctcccccacctggtaaagaaaggccctctcccttggactgggccccgacctgtgtgttagtgtgcaggtccctttattttttgtgtgtgatgggaaccagagaccagcctgcttcggtgggggcgtggcctgggctccttggggcgcgctgcttgctcctggactcactcaccctccttgcagccagggacccgtttatggccctgagcacagtaaatctgtcagctcttcaggacgccttcacctctttcttcatttgctccagcttctagtctgacaacgttcccctgaggcggaattctaatctgcttccaattagttgtaaaatgtgactgaaatttccacattatgactgctgttttacttacacgcacacatctagaaacaaattaatgccttcaatatttatttatttatttcttgagcctttagatttactcgaagaggaagagttaccgactattaggaataacttccatgggttccatcttctccactctcctatgagggatatattaaaacaagaggactccttccgctaggagtcccctcccagccaccgttcaagattcagaacgtactgcaaatgttttacaaaaaaaaaaaaaaaaaaagtagaatttctaaaataagttaagtaggggcccctgtagagtgttttaatagctacacatacaaatttacttctaagtatagcacagctacatttatttggcccagacacattgttacctttcaaaaattatttcgttatatggccaaaagctgtagccccagatagaggaatcaggtcgctctggcttgaaaaatagggttctgttaatgatgtcattgtaggcactaacaaataccctaagttgtgtctaagtccctggagcaaaacttcttggagctcttgggtcccccatccatggagtcccatggtttaagcccccagcgcccatgaaaaaatgggtggctctcaggtggggggcatctttacacatcagtactcatgacccttctcttcagtgaattttctcgaagttgttgatccacccgatatttgggaacattagaagggtttaaatcttggcctggaaagagacattaagaacactattttgtcacatcccctggaaactactttctcaaacagccgtgcggggatgacgtgagtacacatagcagtggacccgcagcttagcattggtgtagaggtggtgctctcggtgttaaaggatgtaaagccagaatttattggcactgtttatagtagagttccgtcctccagcatcttggcagattgatacaaacaggcgtaatgggcttgaaagaggtgtgaaggattttactgatggcaaagagcttatgttgatcacgtcactctgttggtttctaagtaacagctttccctgtaaatggaggtatctattgtcttttcaaggtctttgtcatataatagtgaaagacccatgttgattgattcttttttaaccctcctttttatgtgctattttcaatctctggaatcaagagaagtgtttatttcacttcacttaaacagatcttattttacattatttattatatatggaatataaattacttagatgatttttaccaaaactcttcatgtttattatctatgagacagaaatggctcaaatagtttttacaaaagccctttatttaaactaggtacaaaccccatagaagcagcaggcaagtcttttatatggcttcctttcttcttctttaatgtttggtagcaaaaataaaatgggcagattgaaatccctgaaattttaaggcatagggcctcttagtttgcggagccccgccccccagcttaaaaaacatggccatcttcatactaaaaacctcacaataggcacgactgtggtagcccctccagtcctggggttcactaattaccccttaatgaggtcagtgtgccccagtagctccctatcttgggaagaaaagcacacaggatagttggatttcaagtggatcttgctgtatttgcaacttagcataactgctttgaaggcccccagggtacttaattggggcctggcatttgggtttggggggtgggggtggggctgctgcacacagctattctttgtgtgtctggaagccactgtgcaccttggaagcattacaggcttttgttgctggtgcatagttttataaactctgaatgagcctcttacctttttaaaaccatcgggagagcaaaatagtgggtgaacatagaagtctttgagttggtcagcagccaagctgttaacaactgcagcagcagcagcagcaacaacaacaacaacaacaacaacaacaacaacaacattcagagacgaatgaatggttgaatattagaacaaaccatttgttgccaaactaagacttactcctcactcaaacctctgggctggtaggtgacactatgaggctgtatagtacagaaaccgaatgcccagggttgtgttttgtgatcgcgctcaactgtttcccccttgtcctttctttgcatgcaaaacaggtgaaagggagaaatgatgtagttatttaatggtgaggctgcttagccaagagcatttcttattaagaaatgagctaagaggtgtggatgcagcttcctcgcctggtcaaggcagtaaaactctaagatggctggaagaaaaggcttgaggactctcaaccaacttagttggttgagatggtggtggggagggtcaagcgagtcggtaagctcaggaggggagcagaagccaaaaggctgggtagtggagggcccttggtgccccatggtcttacccaacacattctccagaattgttggggcatttgtcagaaacatcccctgtttaattgggtagtggcatggttctgaatagaaagggactctccaggaaggcagtgatgtggtctacaatcaaggggccaaagagctgttgtctggcagcctaaaatcggtgtgattctctttagaaaaggacaggttatttatttatttttttgacagtaaattaccagaaacaatagcttttgttcccataggagttgtagctcagccttctaatctcatggataaagaagcttaggggtgtctccagtaaactactgttttctggaagtgtcaggctaaacccttattcattacttttatttttacatcaatcttgtgagtgagaactcctcttttgtctacaagctaccacacttcctgacagatccaattttttttttttttaacactgcctctgatctttttgatcatggtcaaagctatcccactggaacatgaaaaccatttgttccttacgcgatgcattcctcactattttatgtgtatgagcgtttgggctggatttgtagcgtgtgcaccacgcgcaggagaccggaagaggcctttggatgacctgaagttggagtgagggatggttgatgctggcagctgaacctgggtcctcctggatgacagctgggtgctgttaaccaccgagccacctctccagccccacatgaggcagtcttgaaaaaatggagcttaacaattatctagcctgcttaaccttgattgttttcttcctcaagttttggtactgctgttttaatagttggataactccgacgtggtatgacttcctattcaaatggaatcgggtaggtttattggtagctctcttctgtggacttgcacaaaacagggaaagcggagttgaggaacaaataggatataagagatcaggtcttaatggcttcactgccaaacttcttgtggctttttaaactgtgctattatttacatctgatgcttttctagtgatgtagtctctataagtgaaggaagagaacgggtttatgtctgtgagaattcaacataactcttaaccatagacttagatcttcactcttaccgctagaagtaccattcattgtctctaagaccactaagtgagaatgtttctaaatgtaaagaattactcattgtggtgccttctagttttcatcccagcacttgaaagatggaagcaagtagatctatgagttctcggccagccaggcgtacatgtgagaacctgtccctctgacctcccccacccccaaaaaaaacccacctcacttatatttgatttttcagtgagcattctttcttcaaatattaatgtgtgctcagtctaggtttacttaacaaaccaaaatgtaagtgtgaaaaaaaaaatcctagcacctgtgtgaaagcccagaagtcctgaagcatgaatgtccctatggctttaacctttcctgaaagacagcttttcttgccacttgtccttggctccgtgatgtaaatccttgctaggcttttaagacgtcaccacctaatcatgccctctactcaggtgttcagtttgacacaggtaggataaagaattggggagggcaggcgccgagttttctgcccctatgacttaatatgaattcctcttgggtcttgctggtcccgttgagcctgcatgatatgctatttagatggctcctttttgttactggtataaccatgtgtgggggagggaactgacctaagatgctctgaaaatgatttttataaatctgcttaccccaagtctaatgctttctattgtagcttatattaaaggcttaaggatcactttgaaagatgaccacgtgaatccacaagcctcctgcaatatcatgtacatgatttcctggtaccaactaatcttctctaggtaccggagcttgtgcagctgcagttacttccataggctaatcctgcccagttttaaagggacaggagttcttactagctgcagttatgtcccagtgatcagctagcacaagatcacttgctttgctagagttcagctgtctacatgttaaatcgtaaacaccttggagtttctgacaattgtgaacactgaagaagctggaagactttatacttgaacttcctttttagcccacatctttactagaacactggatgcacataattcttctacttattaaaatgatgtgtatgtagggtggcctgtgtgtgctgtgtgtgtgtgggcgtgtgtgtgcgcgtgtgtgttcgtgtgtgtgcgtgcgtgtgtgttcgtgtgtgtgtgtgtgcatgcgtgtgtgcgtgtgtgttcgtgtgtgtgtgcgtgcgtgtgtgtgtgttcatgtgtgtgtgttcgtgtgtgtgtgtgtgtgtgggtgcgtgtgtgtgcgtgcgtgtgtgcgtgcgtgcgtgcgtgcgtgcgtgcgtgcgtgcgtgcgtgcgtgcgtgcgtgcgtgcgtgcgtgcgtgtgtgtgtgtgtgtgtgtgtttggctgaggaggccagagatgttggatctcctcccctggaactggagacccaggcagttgagagcagcctggcatgggtactgggagtcaaactttcaacctctggctgaacagaatgggtttttaactgctgagctttttctccaagtcctcaaattgcgtttttaatctggtgagtgagtggcttgccaccatataccagtagaggaaggagttaaatggcggtgaaaaaaataggtaatgatttatctttcatctgccataaattctaaaagctttctggagtctccctcattttgggcccattgtcatttgttttaggatctaaagaatgaaactaactggataaataattctgtgcaatggagtagagtcgtcttcatgttatttgagcctgaatgtgcgtgcataattggagagattattggagagagagagtgttttgctgtggtagatgtggtttcaatcctagcgttgagcatagcatttagtttctcagcttacccacaaaatctgtgactaatttagtgaatgtgaagatttttgtccagatggttaggtttaattgtaaaaactggaaagatttcaaagtaccctttgggggagtgtgggaaatgagtaaacagcaagaaagaattaaaagtaacgataaatcaccaaatatagaatatatgtatattttatatttataaacacacactcatatatacttaaacatacacatatatttatatacaggcagggaaaagcttaaagaattgattatagcagcacgaaggtagaggatctagaaagatgagtgtgttctgcgtggttagctttccctgagctcagaacaagcttggtcacaaaggcggtggagttcaacttcctcggcactggctggacatggttaaggtcattagttattaactcactagatgctgaagtgggttgtgctctctcccctgagacttggcttagaagcccaggcctgcgtgttccgttcacaatgcagctgtgtaacccagagaggtaggaagtttgatttttagcacccatttcttcttctcaattccttcctgtgatagccatgccagaaggtgtaaaacaattgtaaggatgctctcccaactatttaagagctccttctctctatccctatcccttcttatggggccggggactgaaaacacagacgttgcctcttttgtgctttgcagtcaggatactgatgacctaaaccttgacctcataaattatctttctctttcccagaaaattttctttgaagttggtagcctaatagattctatactgaactctttttgtgtgtgtgtgtgtgtgtgtgtgtgtgtgtgtgttacctagatttatagggagagaaagaagtgacgtgccaatgacttcaggaaatatctagacaaaaggggaggccacaaggctattgacaatatctgctgtgtaaagtgggcattggctgtggaaaatggtccctaaggaagcaacagaaatgtatccagacatcagagagtgtcgaggagtgagctctgtgagctaaatcgatgtgctacatttaccatataccaattgctttcataagagactggggctgctttgcatgaatggaaggtttgagagaaaaagaaaacaccaccaccaaaaacaaacaaacaaaccagaggcctgccatattgggacggtgtttttcaggttctgaaaagacatgtctaagaggagtcaaaccatgagaagacaatccacagaatcatctaagcatggctcataaggtctcccagaaatggaagcaacaaacaggctctatgggtctgagctaggtcctctccatataccttatggttgcgtagcttggtgtttttgtgggactcccaacagttggagtgggggctgtctctgactcttttgcctgttcttgggacccttttcctcctactgggctgccttgcccagccttgagattacaatttgtgcctagtcttactgtatcttgttatgtcatgttgggtgaatatcctgggagacctactttgtttgtttgtttagggaaacagaggaagtgttggtggggtggttagctcggaggagtggagggagtggtagtcactaggaatacaacgtttaagaacgaaaaaagagaagtttggagagagagctttctgtgtgggagtaagtttaagtctcctaggctgctacaccaatggcattggagagcaaggttaactgaaggttctctatcctgtaacaaggaagtgctctttgccttgctcctcttggctaaattcctgcaaaaaaaaaaaaaaaaagatatctttttccatcttctgacagattcttatctggctatagtctggtttttctcccactgtttatcaagagctttgacctctgttagcaatccattggatggcttttactgacgatcctgatagtgctctgcagtcccaggtgaatggacagataaagggcagagataagaggctcaaaggtacagactgtctggtaggggaagaggcaggagagtgtggttgctgtcttcagtagcacgcctgaatgagtcatattttctgcctacgtgtcaggctgatttcaccatcagcttgctctatgctctagtcattttcttcctcctgtttctttctttcttcctctttccctcccgtcactcttctccctaacctaaggcctcattcatactaggaaatgctctatcactgagctatttcctccatcctttctgtagagatttcttttgctatggtaatacacataatgtgattctgatttttctaaccttcttaaaacttaatatagagcccatgattcaaatagagaactggtaaggacaggaggtcctagagacggatgctgccattcaagtgcactgtaatacaacttgagagcaagagtcatgctgtttttttctgtaggtttttttatttgttatgaatttcatatattagtccagttatgttgtggtttccagaaattattgcagatttctcatgaacctggtaagtcaattacaggcatcgaaataagaatagtgcacatcattgaaaagatgagggtagctttacacaggtcaggcaacaggaattccaaagatacaatgggttttaagaacacagaatctgtgtaagtagtaagtaatacattttatttcttcccaagcatcgatttggcaaaagggagttttgggtgacagagcccatgattgtgtttttttctgttggaaacctgggctatcttaagacccaatggaaaagaaggtcactggaaaattgtagactacttttgtcgctgcttctttcaggctttcaatgacaggaagttcctataatggaagaggttgggtctcagagactgagagagctgtggtttgaagctgtattatagggtacagagccttgtcaagtgtgctgtttgagatggaagacaaagagcgcttgcagaggaaggagctgcgacagcagctccagcaagtgatgttgtgtaagagggggcttgagtttggaatctggattgattggcttggacacaaccacaattttctggattgtacttcctcaccgttttcttggctgactgcacatgctgttaaatcccctcagataacacacaaggcatgtattttgcacagtctgcatccagattggattgggacctggtcctaggccccatcatgcagggccttgtaggctatggtgaaggagtttatattctagttggagtgaaacaaatagcatgacttagttagatttaaaaaaaaaatcttcctctgacatgtgttgggtggagagagccaattgccagaggtgcagtgaaattgattatggatttttccagaaggtcccataagacacagtagatgtcttcattagtcctagagttaggttgaaagtggtcatgttgtccaaaggtaaagacagactaggacttgatctggagttgggaaatagtaagagttaaggacagcagctgaacgggatgggggtggggtggggtctgagggatcagtagttatgagtcacttttgtttgtttgtttgtttctgttttttgaaacagagtcttccatattcctgactggcttcagtaaatagtcaaggatgaccttgagtctctgcttttgccttctgagcgctagcattgcaggcgtgtaccagcacagccagctaggatacacctttgacacagcctgaggcaatctgacatttgtgatggttagggtccggacaccgacaaggatgaagttgatttggaggttggtgggctgagagaggtcacccaaagagtgagtgcccttagaaaagacaagagagcagagatgagccctggagttttaagaggagcctggggcacgcgtgctttggaagaggaaaccccaggcaatctggtgttttctggaaagcaagttttgaaattccatccaggtggcttggatcatctgtgccaaatgctgccaagaactcaggttacgatgagactcagaatcgatgactgctaaactcagcaatcatagtccttactgaaacacaggggcagggaaacaagatatcactgaaagacttaggttattgaaggagggggatcaggatatatccaaaaaaaggttagcgtaaggactgaaatgttaatctaagtatttattatttaccaaggagtgattatagctgtgggtggagctcagttgatagagtatttgtctagcatgcacaaagccctgagatgaatctacagtggcttctttagctgtaaagcaagttcaaggacagcctaggatacataagaccctatctcaaaaggggaccagaaagtaaatatctatcactttcaaagtgtaaggaacttttaatagcctgtttatgcactgctgtggaatggaggcaggcaattatactagagcggaggcaataaatgttctttattaggcatgagggtcagggaaggggagatttggtttggcgggggtgggggggtgggagtgctgctttggagcttggcagttgaatgagtcttctattgtagcatggaaagatgaggcttagcaacatatactgagttgatagaattagtggctaaaaacaaaacaacccctctggattaaaataacagcaacatctagcaaatttttgctggcgattacacaggccttgcacatgcaaagcatgctgggtaaaatacgcccctagccaggaagattttattttaccatctgtgcagcattgttatggtgttaagggacttagaaatttctttaatagagatgttttagacaacaattgtgtatctgcccccccccccattggtttagggatctttgactactctgactggtttttcaggagtagaaatagtagaaaagcaaggtgcatatacgtgactctgtttatttctctatttgtacctttatccatctcttcattgaacaagtcttttctgagtgcctgggtctgggtctccaaggcacagtagtgagcaagccaagtcttcatcctgtgaagcatttattatattctgagttcttatggagaagccaccgtattgtgcgttgtgagggggaacgtagcaggggaggatggaagagagctggttgaagggagagtttatatgtgtttgttctggagtaggacgtgaatacagactgccaaggaccatttgacccatggaggcaatcaatactagacccagagtgcagtccctgaggtgggaagtgtttgcaaacctgaggagatgaaagtgtccaatgtgtcatgagtgagagatggagatgacaaggaggccgtgtgatctcagtggtattagctaaacttctgaggccaccccagatctttgggtttttcatttctctgtggtcccgggagatggaggtatcatcttgtgtgaaatatgtctatcagtcccacaggaatgctgcgaatcccaaaggctattggtagaaccttcctcagaagacattaatgaaagaatcactttccaggtggagtgttttctcagttctgagtattcacacttgcacacaggcacaactgtgcacgcacacactcatgcgcacacctcatgtactgccaagttataaataacgttgattattccatcttcgaaaaacaaagttaaaaagccatgggctaatgattcaaagaccaatcccatttgttttacaccctctaccttctcagtcccttggcatctgacaaatctacatgttgggtgtttgtggagaaggttgttaatcccagcacacagaaggctgaggcaggactgcaagtcagaggacagcctggacaacacagagaggtcttgtcacaaacaaacacacttaaaacaaaagactatgtctcctactttgagacctgcctcattaagctcaattagttgtgcttagtaaattactgctttgctatgttgtgttggatacagaatcttctacgtagcccaggctggcctcaaactggagatcctcctgcctcagacttaaagtaattcttaagtgactttaaaaaataaaaattaaatcactacatgagtttatagaaattgaagttgtaaatatgtagcccatgatggaaaccaagcgttcctgtccctaatgcttggcccctcccaggcccctcccactaagttccatccatagctttcttgaagtggtccttctctgtcagtcacgtgaatttgcaattcgcatctcctgtacaatgagagcatgctagagacgcggatctgagcatttctgttctcgagtagctatgttttggaaaaatcacttgctgtccttggattccacgagttagctgggctggcagcacgggggctgttggcaacctttctcagttataagaaatgtcctacggaacatctgaaaatttaattccgcccccagtcccctccccagccgacaggatggtgtggatcacccaacactagagcattcagtgtgcacttctctacaactcaccgtcaccgtcgggtatgattttctggcttcaatcagatagggacttgtggtttcaatttgtatttttcacgagtatgctttgaaaacttgtaatctttgcctggttttatggtgaaccagccactttttgaccttaaatatttcaggtgcaggttaactaatcacactcactttctacgttttgcaaatttcttgcttgccgccttatgtttgcacccccccccccccccgaggtctaactacatggtggatggtttgcaaatattttttttcccatctcttatctctggatggtgtttattcatgtcccctccctatccccaactaccagtcctgtgtaaaaatcttaaactgtgtattgaagttctataattaattttccttcatagatgttgagctttgcaccggcttagggagaccttccatatcctaagatttattgttttctactacttactaagtgctgtgatcatcttctaagttgtttttgtttttactgagatatggtctcacaatgtagccttggctagactggaactccctatgtagatcaggctggcctaccactctcagcaatccatctctttctgcctcatgagtgctggaattaagaacatacttcactgtacccggcttaaacgttattgcttgatcagatctgtatttttcaattacccaaggaatgctctgtctcctgccccactcccatttcccagggcccctgccctgttcttttgtgcacttttgagtacagaatcagatgacacatctgaagattcatattccactccactctatctcaagaatggttatttgtatctactcataaaatagctcctttttttaaaaagtcatcatagtaccattaaataccagttcataaaggtgttttgcagttaatttgtgggcatggccaaatgggagatgcagccaaaaatacagacagtctagactcagggagatgtatggccaggacacacttagtcctgcttcctcaaatcctagggcaggagcttcgaagcacagattaacttcttaagtagtgaagatgagccaggctgctcttggttgaccgcttaggcttagtattacggacactggcagggcaaaggaagtgtttagggggtgtccaaacaatgggtttcatcaatttcttccacaatcttacccgtgcagcaacaccatctctggtggtcagctgggttttcatctcttttaggataatgggcaaaagccactgtttggggtgatcttgtcttttatttttatatgctttctttctgggactgaattttctgaatgtccttctatttcccaaagagctgtaaccctcctatccccatctctactttctgcactttaggcaactgtctcttctctgcaccttctccatgtttttctgtgatctgtgcctgcacatttctcctgtgcgctgggggacccctgaggacatttttacttatttttatgtctgtcagtacttgttgagctgtgtcctcttttcctggtgtcacagggtagaggagaggcttcagcacggctcccctggatccagacctttttatttctccctctcttctgagaacagagacaaagacacttggaaatgagctaagttttcaatctgtcttgcactcacagacacttgtgataatataaaagttccgttatgtgtgtagttggttggattgcctatgcctcctaagtctggtagggtctgtctgttaggttaaagaacatcaatgaagtgactaactcaaaaggtttatattgcttccgcataacagactgtggtgatgtcctctgtggtgcgagaatttttttttgtctgatagtttctttgttaaccacaaaaccgccagggcaaaatggacaactattcttccaaaaatggggggaaaaccccttcaatagttgaatgaaaaagagagatgcctatgggaaagtttgtaccagcaaacctgatttgcaaaagaaataaaatagacttgggaagatgtttggggggggagggtgtaaaaagtttgatgtgtttatgtgagggcctgcagatcattggcacacgttaaaaactcagttggaaaaacattcccccataattctggcctgggatggtatagacagaattctctggggattgctggccagcccatctagcagaagtggagggctctgggtttagtgacaaaggttatctcaaaaaataaggtgaaaaataatcaaggaagacatccaacgtcagtttcacatgtggacaccagagcacatatatgtgcacccaaacgtgtgcatatctgcacatgcataaaaagggtcagcctatgtgtttggagtgtgatgagctcttaggaactcaagcatggaatttgccctttctctctatgctaaaattcatgaaagaacttgaaacatgacggtgtctgagggtttctgtatgccatcattgtttgtactcatctgtaatcaatcattgcccataactggtgtggaagaggacagtggttttggcagatctttgtggtgcacagcattcaggaggcagaggcagagaggcagagaggcagagaggcagagaggcagagaggcagagaggcagagaggcagagaggcagagaggcagagaggcagagaggcagagaggcagagaggcagaggcaacctgcctgaaaaaaagagttgaacagtgatttcttttttcttttctttttacctttggcataagtaaaagtcatcaattattttttgattttgatacactaatctttaatcttgttgcctgaggaatgtttcttgatttcagtagcatcttcagttatgtttaaggactttcaaagtcctattggttttaagataaccttcaaagatgttattattatatacctggtttgctgacaaagaaactcaggttttgtatgaatgtcagaaccctggtctagaaagagatcctttaaaaaaaatttttttaagtcttgttttctttctgtagtcctggttgtcactatgtagaccaggctggcctcatatttacagagatcgaccagcctctgcttcctgaatgctaggattaaaggtgggggacattgtgtctgcctggaagcaattagagtgtgcactgtaaggagaaagtggcgcaatgcttgcctgaattccctcccggctgatcagctgcctgtaggttaaccagttaggattttaactgagcctctatggttcctgtctccagggttgaggagaaaggaaatagagacaagaatactgactggaggagcttccgtgaaggcgggccttcttcggctccaagtgtttgaatcagaatgcaggctctttgatttaaaattacttgtcaacaagcccttgaattaagtgacttactgggaaccaagcagcccagactaggaagatggaacaggaaccccctgcttcgtttccttctcctaatgtttccccccattgccccatgctgatttccaaatgaagaacaacaaatgaaataacaggcgaacactttgtaaatatagagtgttttacaaatccaagcacaaacaaagctgtaagtggtagggaaacccaggccacgcattttgtgatggcttctgttcatacattagggagcctgatgggacccccactaaacaattagttaccagctgtttgctttaatctgatcatttacaaaaatacagcagttcttactggtagtaaatatgatagacataaaatgaaagccatgcgggtgattgacattttttttttaacgctgtctatatgggtggtggaaactggttttaactctaattccagaaatatcaataagtttatatctgtcttcccgaaagatttggagagaagacactgaaggcttagagagcacacattgtgatttctttgacaatggaaagcaccgtgctaatttggagaaactcattaatgtgtaggttaatactagtagtgcctcttaattaagtttcagtggatagaaggagtattaggaacagaatacataggagatttttatagaatctctgattgaggcaagccaccggttatttctactgtgcatgctaatttaaaaataattcaataacgattcaatttgtgtcatcctggcatttacaaggggacatgaagaagtcttgcttgtcattattcaccaaatagcagtttgtagacccttacaagttcccatatgttagtgaaaaacattttccaagaaattggcaggatcgcactttgtagcccatgccagcttcttcctggggccaattcaacagagaagagagagaaggcaaaaggaaagaaagaaaaaaaaaaggccttccttgtgttagtggctgaattactctgacaggctttcaccttgcccctcctcttattaatattctttttgatgtgagcttgtaaaacagaggattggctgttaatctccaagatctcaagggcttttggcagtggcccataattgatgtgttcacatggctgttgtctgactactaatgatcagacagcagcgttatctaccagctaaatctgtgttgcttataaatcacacttgataaactgaagtttcatttcttcaaagagtccgtacagaatgccaggggcatttcatgattctctgacagcttagattaggtttatttttcatttctgtttgacaaaatattagactccctaacgcaagggaaagggaatttgttttgtttctctaacgaggcagttggagggtggggtgataagcagagaaggatggcctgttttctacccagaggatgtacagatcggggtggcagatggaattttcgctattgttgccatccttcaaggtgagtggagtttgatccatggcatagtgaaagacaaagggcagaggaaagttctaagaatgtggatctgggttcagattgtgacacggccagggcagggtaaccagaactgtgagattacagtagccattcagtcacagtgtgtgttgagcctgtgtgtcaggtatgacttcctcctatggaaggccaagaggaagaagacagaaggttttacaaaataaggtaacagccacagaacttctgggttctgtcctttaccactcgctggggatacttatgcccgtagacgtacccagttccccctccaatatggagatttgaaaccaggataggatatatataggatgcacgtttacagtgcgatatgactgggaacttctgctaagtcatggttgttcatttggccacagactcctgtggctctgagctaacttctgccatgtataaaagggaaaaacaaaaggactgaatttcatagcccattttgttgcttttctgtaaatattcatgtcctctgactgttcttacaaagcattttgctaaagcactagtttgtgtgtgtgtattatacatatgcatatatatatcatatattgtacatatatatgatatcgaatatatacaatataatatacatgatacaaggtctctatatgtagtccctgctttcctagaactctctatgtagaccagactggccttgaactcaccaagatctttctgcctctgcttcccatctgcaacaccatgcctgtggtttgtgcccataaatcctgaagaccacatattttcaggtttcaaaaaaaaagatggtcaaatcaaaattgtgatatttaagaacaaattttgttttgttgtgtctttgaggtagggtttcattctgtagtccagtgggcctgaaactattggtgattcttctgcctcagattcttggtttctgggatgacaaacatgaggctctatgcctggtttggaacctaggctggcctggaatttaattctcctgcctctgccttcagcagtgttgggatgaatggagtgtgttagttattatgcctggatgaaacaaattagaaacatagtattttaaagagaaacttaaacaaatttgaggtgtgttagaagttaatttctttaccaaaatggatagctttctgggcagtgaggtggttcgtttaaatagaggcatttgctctcaagcctgaggggctaagtttgatccccaagacctgcatgtaaaaggagagaactctcacaccttgtcaaagctactaaagtgagtcccaccagtccatccctccccacccagtgcaacctaacccaaccaagcacagcttaagatcaaaagaggccaaagccaggaaggtctccaagtattgcccttttggtactttttttttttttttttttaagatttagtaggaattgtgtgtgtgtgtgtgtgtgtgtgtgtgtgtgtgtgtgtgtgtgtgtgtgtgtatgtatgtgtgcactcctgtgtgagcatgggtactgaaggaggctgttggagtccccaaagctgggacaacagttagttatgagccatggattctgggaattgaactcaaattccctccaagtacaggctcttaattgctgagccatctctggagcccagtttttatgttttaatcctaggtgccaaatgtattccttatctggcaggagtggcttgacatgaggattcccttttcctagaaatagttttaatgctgtaattaaaattagcactcccatcaaggagtgaatgtttattgataagcattagtgctgattaacaaagaaatttacttatttctgctgcttaccataccatggttgatggttccgagtaattccgttttttattaaacaaaaaacaatttcagtttaagttgtttgggttaaggttattagattttaatatactggaaaaatatccgcgattaacgttgagaagattgctcttcggctattcaaatcgaggcttccctgaattatgttataaaattagcaatgcagggattctaatagttgtaaaatatgggaagaagtgcatttagaggtgtggagtgcaatttgcattataaaaatgtgtgtgtatagaagggctggattatgatagtaaaaataaaatactgagactgtttgaagagtttttaaaatctcatctttaaataaaaaatccacctgtgagttttataaagtgtatagccattatggcaaaaataagcatgaattctttaatttttttaaaaaaagatagcagtttttcttgactgatttaaataatgactcaagtcagcttgatttaaatttagctgagtctactgctaaaactgcaggtgtttactgactaactggagaagtgggtatcattttaatgtagataagagaagctctggtggccaccacgtgctgggagtttggtaatagcgtgtggagtaagcccaggtcaccttcagaagagcacatcctatgaaatatatgattcacatgttaagaaatcttgggcacttggagcacccctctgaaagatacaaccacatgtttgtttggaagtcatctctgctgcttccatgtgactaagatttatagcagatagtatttattaggtatgaatgaggttggatgagggcccttgaattagcaaggccaagctcctccatggccactgtgtgtgtgtgtgtgtgtgtgtgtgtgtttgcatgtgtaaggtgaggtcaatttcaagtctccagtgttctcctttgtctgcctcataacagtgggtcttactggcacacgctcagctttttacctcggtacaagagacatgaactcaggtccttacgtttgtactcactggttgatctgtcttcccagccccctgggatagtctaaaattctctttttgtttttgtttttttttttttttttggttgtgtttcattttatccttttaagatttacttttgcttatgtatgtatgcaagagtttttttaattttgttttgtttttttttgttgttgttgttgttggttttgagacagggtctcactgtatagctctggctggcctaaaacttatgtaaacaaaactggcttcaaactcacagaaatctgcccgactctgtttcctcactgctgagattttatatatatatatatatatatatatatatatatatatatatatatataatttatgccaccggcccagctctgtagaggtttatgtgcttcgagttcaagcaatatccaaatatcataggggccagagaagggtacatagaactgcaagcagttgtgtgctgcccctctgggtgctgggaactaaaacagagtcctttgcaagagcagtaagcactcataaccactgagcactcacaaccactgagcactcatgtctagcgccgagtctttggaacttcttctaatgatctagattatcttctgaaataaaaaaaatgtctaaaaatattctggaaatatgaatgtccagagaatgtgattctgttaacacctctgtctgggtgtctataaataaaaggcactcgcaagtgtgaaaggttaaatagagattgtaactctcgttttttaatttgcatttgtgattcataaaggtgcttttttttttctggaggttttactgtgacatagttgccacaggccttcagagtgccattttatagatgttgactatagaagacccgacccccaatcttcaaccctgggtttgtccaaaatacaggttttagaggaggaaaaacaaaatcactctttgtccaaatctcatcaaacaccggattctaagtgactgtaaatattgaatgttactttagccaccttagcctgtgacaaattaaacagaccgtgaacttcactgaactcggtgccttggggatcactgggcggaccaggagctggcagcttggaacagcttgactccccacaggttttgtgactcctcttgagatgaaggtcacattaccttttctcctggctgctggggaggctcaacaggttggggcctttaaggctttttccaaggtgagtcaggagtgagtaaggatgctgaatcagaggcctcagtctgctgagacagaagctcctggtcggtgagaggaccacacaccacgggtggtccagagctgtagactgaagtgatggaaaatgctaacatccctcatcttctggaaggtgagagacacagggagaccttcagccagctcctggtggtgttgaacttcccggacctcagaaaccaacttcctcttaaatctggtcttctttgattgaggctacctcctagtgactaggaccattactctgagcagtcttcctttcttcctctgctctatttgggtttcttggactccttcctccttccttccagccctcctgttttccccagagcatcgcacaccccctcccccactgccttcatcctgtgtgctgtgcattactccagtccagcccttgggtcctgtgcctacccaggaaacatttccctacagatatccctctgcctaggttctccttccaggggctgactctctctgtcctgattaaaaagaaagatacgtgagaactgtctttgaattcatcatctcccaccttctctaggcttggctgtgtctctcccttggagttcagccatggcctcttaaaacatatctttctcctctcctctctctctctctctctctctctctctctctctctctctctctctctcacgctctcctccccccccccccgtgtgtgtgtgtgtgtgtgtgtgtgtgtgtgtgtgtgtgtctgtctgtctccaactttgctctctctcatacattttcatttagagtccaacatgggctttaccgggtgagccagataatttttctatacccctacttcagaaagaagcccacactttttttttaaacccctaggttctcatccttgcctggactcttgactttcctattgtgcttcctggctccctagactgtcagtcccgtgactaaggtagcattcagaatggcttagctctgtcctagcccaagtcctacgcaggtttataaatccactacagtacactcactgccccacccccttgatgctcccacaatgccttgggcttaactgaccatctgaaccctgcccatattctcgactctgcagtgactattcatctctcctggaacaatgcttgccacatagaggcacctgacagaaagatactggataagaggatgacttccctaacagtgaggcagctttcattagcaactcttacgaaggggagggcatggggtcagtacatggtccttctgtcagaaaaaactagctctgttattcaatacatttcgtatcggaagctaaataataatctttcattaggagccttcgtcctcagctttggactgttagttcttttcttccttctcttctatttttctgaaacaggttctatggaactaaggatgatgaccttgaagtccagatattcctccccttcacctttcgactcctgggatgacagacatgtgcccctacacaccaaggtgtttgttttgatctgaggtgaaatggcttggcctcatttttattaaaagattttttaaaagaaacatcttgagtgtgttcgctcacacccagtcatcccagttattttgaagccgagagtctgaagctagcctgggctactcagcaagttccaggaaagtctaaggctgaagtgtgagacatcaacagcaaatgagagagaactttttaaaaaaaaatgacaccagggcttccagttgttattccacaaatattgaagacgatagtggaggcatctcctcctgccctgcatgttattctgtggataaacttgctcagaggatacttatcacgctttagaaaaaagttgttctcactagagagagacctattgggttttaaaaattggttctgttctcagaagggaaataagctttaacttggaaactgcaatttacttatggagttgtcttatgggtctgggggaggacttaacctaacaagtatgagttaaatgaccctgggtgagtctgatcctcaaatgcaaacatacatagagtatgtgatagtgaacttggtagagggcattacagatgttactgggaaaattcatgacttctgatttgtttattgttcttctttcccgactccgcactccctggcttctggcctgaacagacagcctctcttttggcctttagtttcgtcatttctcaaagtcaaatgagaagacttacagctgccttttagtcgaggtgtggtaggaatgaatgtgttgcaatgtgtcctttaaaaaagataggcatttgataccaagatagataaagtcaaaattgttaccgtctatggttggcccatgatgctttggtaaaatatgttttgaccctttgcaagacactgcctaagggcttgacgtgactcagactttcccttgttctttgtcactagcagcgtatattgtacagtgcaatatattttacaagactatctttgggtggttggaagaagtcacctaacctgagtagagaaaggattttagttaagaacagaaacaaaagactttcttgtcctttcttcattgtccttctgtcctccaagaaatagtgtccacatataacagagatgagacacggctatttatcccatttcaacctgacttcatgagaatttaggatccctggaactacagtgcctgagttcaattgagttgaaattgacccctaggctctcataggttccctatgctgagcagcatctgagttcacttctgggatgccttgtaaagtaatgggaatgagccttaattggtagaaatggaatttgggtagaacttttctcggaactcaactttataccaaggggataataaaaggattcttcccaaaaagaaggcgccctttctagtacctgctatgatctccaccaccttcctcagtggcttgtttttatattctaagtatctttggaaacagtatgcaaaaaaccaccattcactgctactatgcagagctcaccccactcacttttcagaatagattgtctgtggttcagctgtggggcagtagtctttgagagaacacaatcgaggctaggtatgtgacaactaactgataggatgcagtggaagagatctcgaggcctagatctgtaggaaatgacatattgagcatctttgaggggagattttgtttagcttccaaaacaaaaataaaaacagaacaaaacaaaacaaaacaaaaaaaactgagagcattgggctgagtagtgtaattacactgtcagcccacaccatacctttgatagtgcttggaaaagagccaaagcgagacaaggaagcttcaagacatgctgctgttcaagcatgctttctccgtgggcttgcacatagggacatgtctggggtgattcctgatggacagtgacaccctacccatccacccccataagcagcattatagagagcctagattgttgacattctgtgtgtccagcattctgtttgtcttggctggaaatggaagcaggcttcctggcccaggggtcagagccctggttgtgactagactctagcagcatctcagctatggtttcttccctctggatgctgggaactgagtggagggtttcatacaagctccaccacgtactctaccattgagttaatcctccactgctcaggtgtgcgcatgcgcatgcgcgtgtgaggtatgggcacctgcatgtattatgtgttctgtgtgcttctgcataccctctgagaggccatagaagatctgctctgtcgctttctgcattattccctccacacaagaactcttaccaaacctgagctaggataacatccataaagccccagctacctcctcctggctgtgtaaacacccacctcaacaccacaaggtttacaggcccgtgctaaccatgtccaacatttttttcatagagtttggaggtgcaaactcatgtactcctgtacaaagtcctctgcctctggggctaggggtaggagtttggagggatcacagtatttgtgtgcaaacttcaaactgtaggcatttaaagtaactcaggtgcctggcttcctgtgtacacaaaaggataagaaattccctatagaggaggcattctctccgtctcatgctctgttttacatttagagcaggttgctgcttttggctgaccttggccggttcaaattcccgcttggttgctcttcctaagagacccttcatctcttctcatctcctcttcacgactttgtgaagatcaaatgaaaaaaactcgagtgcacaatataatcctgcctatgatgtctgtttgaaaactattctaatccctttacgttatgtgcgttaaacagtagctcagaatgcgaactctttctacaaacaaatcgagagcaacaagcaggcaggacttttgagtttttagctctttggataacttgcccctcccctgcattggggatcttgcttctgcctctctaatgtggagacacagtgttagaggagaaccggtcccttcaatcattgacatgagtttacccctaccctctttatttttgcacagcaagtcccaaggcataaattgcattgatcttgtttctcagaagtgtccaccacatttaggagaggctaaagtaagaataatgagcaaagctggcgctgttctggtttgtccaccggagatggaaatttaaacgtgattaattttggattggggatcagtgtccaaggaacatgtttttaagccgactcggctttgctaatgcaacagtgacgtcaggcagctgtctaacacagatttgctgccacagtggcaagtggtcacctccaaaaagcctggatttctacttaagggcagagcagtcttctgcctaatgcgttttaaattaagaggtgactgtgggcaatctaataaaacagccaaataccaggatatgaagaaaatgtgagccttaagtacccatgccccagcatgcgcagagaatcaaaacattgactatgcaaactgaaacaccactcctcccgcctgtggcggttggcagtctgagaatcccaggattgaggggttaacggcaggatccgtgtggagatttgtgagaacagatgggaagaagctcgggcaccgtgccctgtcagggttcaaccccgatgcaggccaatcggagtgaggtggggtggggtggtctctgcagtgaggatgctcctctgtgggaagccctgggctcctttctcagccctcccggcaacactcactggctgtctcctactgcagagccacgtggatgcgtctttgttggtctagagtgcctgctgcagggcccctcagcccagcccgggagacccctctgtatttgctttgggtttcctggtagtgcagaccctccccggctgacacagtcaaatgtgcgatgatgaaaagcagccgccccccagcactccagcttttggagccttcctggctcatcaccactcaggaagcccttgaaataaggtgaacagagaaaatattgccaggacctgcagaggcgtcccccagcccccagcccccgcccccgnnnnnnnnnnnnnnnnnnnnaatagccaggctactgcacagcgtgcaccaacacctgggaataatcatgcaaaaataacagtgagagactgcggcgcgtctgttcttgacattaactttcctcagtttgacaggctgccaccaccagctgttagacttacgagtctttttttttttcccttccccgtcccctgccccctccacccccacccccgagatggctgctttactcttttgggctttaataggttacatcagtgtcccatcaagatgacagacacaagctttgacaaaggaacccctgctataactggccaatgcttttttccccctgatctttaattttcgctattactactgtataagccttccccctcccccgtgagttttaatgagcactatcttattagaagtatgtttctccccccaggaaggtatgcagagttgcctttcttgaattgccttttgtactaaagcttaacctttggcctctcaagaccaaaccactcatcaatttcccttcattcattcaagtctcagatatatttgccatggtggtaataattctgacggtagcactggctccgacttattgagtgttactctgtcctacggccctgaattaaggttgcttgtaagacaccctgtcacattatctaggggctatttgtgtttggtttttgtttgtttgtgaatcacatagagatgtagtagcttgcctgagcatccatatcgaataaccaagctaggattcccactctgaagaccacactgtctgcacctcactgctgatcacgaacgtcccacctcttacactcttcccttggacacagctctacaactgaagttgtcatttcaactcatttatgattaattaacgttgattgattctcttgatgaagcttgtcagccttgggggataggaccttgggttcactcttttttttctttcctttacctttttttttttccttttccttcttttttggttgttgcaggttgctcagagtttaggggtagtagctctttagtggatgtgagggttgaggagagcaggagtacattttttgggaagcccgtgtgcgaaaaggtgcaattggagattagaagacttcttggtaattcaggactcatcaggacctccgggatactcttgtcattgctaggagactataaattgagtgtggatatccagaggatggacagctaccaggtgccagtgtttgaaagagcccgtttcctcaggctgagcttctctggattaagcacccccttttcttatactttaacacattttaaccaaacttagctatgaatttagaggggattacagatttatgttaaatatagtagcatataaaaaacagctttgtaaggttgtgtatagggtttagagagttggaatttgtcagactgggagaatctgccacgctctaagagagtgtttacagagatgtacccagtcttactgcaaccctgtgcagtgctgagcattacttacaaccttcatttgaactgtaccctgtgctgagcatcgattttgcatgagtttcccttgcaacccagtgggtgtgatggatattaacaggcccatttcttagactctggtcctgatgttagctgtcattgacttaggttcccatctagcatgcactgatagagccaggacttgaacccaggcctcctgttcacaaaaccctagtttcaccccttcagcggccctgctcagaagctgctgctgccccacagcagacaggcctatggaatggtttgcagtcctctgccttaggaagcttcattggctgaagaaattatgccttcagtgtaggtcagtgacctgagaaattgctcaagaggagttggtctttttgtataactatcgaggcagggtgtgggtcttgtaattccagaatgaggggagctggagaatgcacagattggagccagaacattctgtttaaggtaaccctgtctcaacaaatactaaattagctgtcatgtatcacttaaggtcctgcttatgaacatggtatgtgtgctctgtgtgtaacaccacgacatacatgagagaactgaaatcttctcagaggaacatttcccccgggcattacctggtagaaattactgaccatattctctgaatgttccgctctgttttagtctcctggggtaggtgattctcttgtgaatttcctactgccatgtggtcttctcggctgtcctggatgacatctgggctagcttattgctcttgctcaaaagtgggacacaagtttccttaggattgagtgcattgatctcaggagccttctttctggagcattctgtggtggcctcaggcaaagtttcgaggcataaacacacagagctgcgtgtggctgatgtgaggaatgcgggctccacgaagctccatttccagtcattaattgagctaatggaaattcagtttcttctctaagctcctaagtattggtaaataagaggaatgctttttaaaaatatcaaagcggccaaataaaacactctgggagtggctgtaattcccatcccaaaagccttctttccatttggtgacctgtatcgaggagggcctgctgaaggccacatgggtggtctttgcgccccacctcttcaggactcatagagctgtggggggagaacaggggcagttcttctggaaacaacacttatgggctccatgaggaaaagagagaatacttcacttgtgtccatcaaagatttgcatatttgagatcatattatctaccaggtgttaaggcctttagacaattatcattttatgagtaagttcatatttatagtcctaatttctgaaccttcacttccttgttttaaatcatgatggatgggacttctatcttatccctaactcagctttggtccttacgtttggattgtgttcatgaaaaccggcttattgggaggagtttgttaccaagaaacccaacttcttcaggaatttggacttagggttaagagtgtctgaccgtgatcatagcatagaccgagtctgcaccaggtcctgggttttgcaccccaccaccaccaccccagaagcagcagcagctccacaacaaaagtttcacaaggaaatttgagatctggaattatataagtatcaccaatactgtggggtgtgtccgatctgtctctttaagtggagttgtgttgaaatgggtatttaatgcagaaacgggtgtgataaggtttgtgagcaatgttagaagactgaagaatccattttccaaattgagaaaagtggaccttaggcagagaggttaaaggattaggaagggtcacagactaattagtggcaggtctggagccaaagtcctcgtgtgagcacttgctgcacccagaaaggtcccactctttgtccagtccatccttgccttccaaatctaaactacagctctcttggactcctcactgcttgcatcttggcccattttctaacacgtcaactcaagccgtctttgttctcagtattagtgtgggctgtgaatcaggccacctgaggctattttcagaaaagtgttccatatttgtccctttagcattaaaccatcacctcgcagtttttaattttgtagtgtgattctgatctcacacaagtttttatctgcatagttaggattgtgtgtgtctctctctccccccttaatttccttctgcagaacccctttcctctttatcagcccccattttaaacaggaacttgctgtgctaactttgatccgctttaagcagcagtaactcagaaggcataaatcaccttatctaagactgggcccccgccgccgagggcttttctttctgggactctgcaatcaggaatgcagaacaataaaaagtatggtgcaaaagaagttttatggcagctttgagagcaggaaattaagtttctttaacatgcagatgggtgaagggctgttctctggcatctagaagagcctcagaggaaggaatgtcagtttataatcattttagataggatgcaaattgtagaaggtcctctggtcatttcatcctggagcccacacagacaactaactaactgcctctgctgtttaagaagaacaatttctcatctgactgtgttgaaatactcttttttgttttgcttgcaacaaaagctatgtaatattacatctgtaggcaaagactgcaaagtagactttatgaagcaagggatgtatgcacaacagatggagttttactaggtcaaccatctgtgtgtccttcttaaacatttactgtctgctaacccaactgatggcaaatacaagatgctgttctgtgcattgccattgtctgtgcacagtgcataggtaatccttagtcccagtacacaggggtgttcctctgtgtctttttctcaaccaatgacctgttcacaaggtcaaatcaaaactgttccgtggcagtcctggcagtagttctgtgagccaaataaatggctggcaatctgtccagtacatatgtgggctttgttttcatctcagctgggcatctaaactggagaagaacacctttgctgcctttctaggggcgccaaggggacattcttggacagctaggccttgaacttggctgccattcccatttcttttggattttgagatagggctgccaagctttggtcaagttcctcagttgccttgataagatgaaccactgaaggctttgtggtttggagagctcaggttatgtcgatgccaggcacacagagttatttatcctccttatgaattcctgctaaacttcacgctagaacacttaattaggaattggttcttaacacaggctaatattcagtttatgtgcttcagtgtgtataatcaagttataaattttatgtattcagcagagtaagttaatatattttagtagtgatttaattcattatgctttataaagtactctgagaataattgtagtccatctcctttatttaaatgtccaataacatagatattgttatttactattatttatcagagcttctcctttagataatgttatcattttgaaaatgaggttcctgtgtgaatgggaagtagtgttaattttacacgacatttttcattcacatttccacagactaaaaggttgtccgttggtgaatttagaaggcctgcttctcattcaggaagctagcactcccctcttcaccttcctggacacgagaacacaaaatgcccatttctgttctttcgacttatattttggcaccatgaaagcactcaaagcctgtgataattgcaaatggaatgtcgaatgatgatctgttctagaagcgatgtaagcagattgcattacagagaactcccagaatgcatcacccctgcagtaagcctgtctgtctttcaggttgaccccctgtttacagtgccggcaccaccgccgccgattgccagcagtctcgcacctcagattccgccctcctactttcccccatcttcatccaatattgcagcaccagtcgaacagcttttggttcggactcggtccgtgggtgtcaatacgtgtgaagttggagtagtgacagagccagagtgtcttgggccctgtgaacctgggaccagtgtcaatttggaagggatcgtgtggcatgaaacagaagaaggtaaatatgttttatttttatttatctccctctgccctcttctccgtgatgtatctctgtccatctgtgaggggaatttattttccttgtggtttgagaggatagaaaggtgatttgtaggttctctgactcttgggttaaataatgatcctgtgttcctggttgcctttaccttaaagatgagccaaagccttaaaagaggcgtcttcatgctgagggctaacatggagagcctgtgagagctggggtcaggagcagctttctcctaaaaggtatcaaggagacatggctcaagttcctttcatttgtggtatgccagccaatttgtctgtctctgtgttgtggggtcttatatttatctacctccttacctccctactgaatcaaacagtgccccttgtgcatagccagggccgttgtcatgatgcagtcgaggctggttggtgctcagagctaataagctaaggttaaaggtttaaagcccagttgagccagccatctcttctgagtctccagacagaacctttcttgccccttaactcagcaagccatttggcaagtgcagcccattagtcaccagggaaacacggcccccgggaaactggatgcatctatcaccgccgttgggaatataagccaagagtaccagtcatgccgatagtccagatcgggtcaccatgtctcatagcacacggcgtacggtatttcaagtggcgtgcatcattaacaggtcagaagatactgaaaagcagctctcagagatggggagcagtctgcacaccgggttgtctcaagaggacccttggaaaatggacgtggggaacctttctcccctttcagctaggttggtcaagggtaaaagagatggatgacagctaccaatgcttgggtatctgtgagaagagttaggacaaagctgagtatgacatgaaggggctgagactccatcactagatgggtttgtctgaattaaggagggaaaaggaggaggcaaacttgaaggaagaagataggatacatgctacagagacctagaggcatccctctgagggctttattgctggaaagaagtagtagctctgactgtttcaagaaaaaaacgaagattggagacatctttgaattccactataacattatatgtatttttgtatgttttgtttcttgataaaaaatttaaaaacaaagattgtagctggtgctagtgatgaagaaaaacatattaactatacagtaaaagggagtgaaaatagctgtaggattagttcttgtttatttaaatagaagtgacacctaaactttgatttttagacttttttttccatcttctctatcgatgcattttagttttggtttgctggcagtctgaaaagccaattaatgcaatactgtgagaaaatagggctggaatgtgattggagagtagagaaatttaaacttttcttatcttgcctgtttgtttaaggcccacttccaagaccaaggggccagttatatggaattctgggagccgcccctcaggttgtccggttttcctccctagagttctcctgtagagcagatggcagagaacggattcaggttgatcctccctcttgtggaaagagaattaagacacgaaaaacataacactaattaattagctatataaagattttcagcaacagagggaaaaaagatttgaagaaaatatgagctaacttccataaacttgaaattgagatttcttggaaaattcactcattaaaatgagtctctgtcttcctgttttttaatggactcattgcttgtcatgattttatttatgtaagtgtggagtagggcaggcttcctgcggtgtaacctcactgggtggtagatgttataaaattagccacaagctttctgggacagttgggttatttttcagtttgcctagaagtctgtttagttttgacttttaaccttggcctctaataaaagtggattatttggagcagagggcgttgaggggtcgtgctgaatagccaaagcaatgcatacattgaacagaatccggatgctctggtcctatgtttaaagagcttgaagatattgttttgatagtatacaaataatgaaagccatagcacttccaccctggcctctaaaaaatggtttttgatttaaaaaaaagatattttttgagacagcttcagtctgtattggaggctgatgttgaattcatgaacccctggcctctgccgcattgggattcaaagcctgtgccaccatgcctggtggtctccagaatttgatagaattggttttctttgccttcacccagccatatctgtggctgctcctggtagtgtctctgcactggctcctgactacagaagcaaggcatagtagctgaccatgggcaggcccagtctccttaccacctcatgacacatgcagatgtttcctctggtggtgtaaggagctacagccactcatagacttatttttgctggacaaactagatttctggcctctgtagaatgtaagaactcctctttatggaagccttagtcctaagatgtgtatttaacacacacccattttcaagatgcgtacatttacgttatttctttctctgtacagtgttcagagtccttggcccccatttaaaggttaagctaatggacttcttcaccttctcaggaaaagcaaacacattcagaggcagttattttacagagctcagaatggaagggggagcttggggttttaggaaggggaaaggtataaaaagatgcaatagtttgtccaatgaagtttgataaaaggaacgactgcatatcctcacacttataacactgttgggtgcctgggactaagggcctataaactaaattgaatcaaatccattcttactatgacagggagtgttacacacacacacacacacaccccaaacataattcgatagtgtggaggtcgtctgcgcctatgttttaatttgatagtgcattcgaatcccaagaattcatagttacagtcgtcacaggacagtgggtattttggcagcctcttggaggtggtaggaataaagactggcttgaggaataaagaactttggcttaagtatttagctgcctcctgaatttggaaagcctcattagggttggcttcttttcgttagcctttacttctccagttacaacctgtaagtgaaattctagttgttcaagaaccaagttgtgcatgggaataaagtgttaataacgaagttgctcctggaaaaaattagcaggtttcagactgtgcctaataggagagaaaaactattactacatgtgggtgtttgcttattctactctgatctttcttctccaagatgaacgtttaggagccatgatggattgtatgaaatgactcacagatgttggaggaatttccatagcatttcactcgtgacatttgggacacacatgcctaaaatataagagtttgtttgaaattttgctcttaaaaatgggggggggggaaattggtgaaatcagcactatatgtaaatacatgtgttgagtttggctttaggagtcttgagtgtgttttctttagcattttgtttaaggggggattttcaagttattatttatttttaattatgtttacgtgagtgcatctatggacatgtacccattagcacaggtacccaaggaggtccaaagaggatttgaattcccaaagctggagtttcaggtggctacattgcagggcaccctgggtgctggcaactgaactcttgaccactgagccagctctccagcccctcagtcatgcttcttagtgggcctttatttgggtaggtggccacatatgaaagaaaaaaaaaaaaacttggttcagccatgtccatgtccattcttataataacccttcccctcctctttagttctgtaatggtaaactgagtaaagccaaggggagaaaggaaaagtggcaattgccaaggatggcctcttgaacggctatagagcatgagttctcagcactgtgttgttggacctctgagaaaggaatggatgcctttcagatagcatccctaggcaccgagtcaggctgaattggtgtagatgtgggtattgatctggtttggttaatgacctgccattgatggtataatattccaaaagtgattgggggagcatgggagagaaaaggagaaagagnnnnnnnnnnnnnnnnnnnnagaaaaggagaaagagagatgctaggttctttgtaagcaccttgaatcctttctctttaagggaatgtacatgtattccttgtctcaagtgcccaagcataaaatggactaagggactcttgcctttgcccagtggttgatgagatctaccaagaagatgctgaaggatggaaggagagcatcgttgttcagttagtagtaagggctgtgggaagccttgaccattcaaatgaaccacagaggatttggagactagccctcagagacaaccaatcgatatcacccttcctaatctagtgggaggcaccttactgttgcgttctcaaatgagccagggactataggttaatttctttgtagcctctggtgaattacttttgaaacagaccagaaaccaagagtagcgctaccgcagcatctgtgctggagaaggtggatctcatttgcagttccagcaattcttagatggacagagagaatgcgagcttgaggccagcttgggctccagagagcccctggctacaaacaagcaagcagacaaacaaaccaatcttgcttaaagcgtcaatgggaaatttcctaggagacagcggaataccagtggctcacggagtatgactgtaacaagtcagaattctgttgaaaggaagaatgccatataggaatatcttcacctggtgtcctgtgcttttgctttccagtgggggtgaggcttaggaagtgattgttttaaaggtaattaactggagaaataaatgactcttttttaaaaaccattagagacgtttgtaacttctgcttctcttggatccaaagtcataaatgtgaagtgcagtgagtttcaagataactcattaaagggcaaatgatctgcataattgaggatagtctaaaatacaatgttattatgattcttattctgccgtatttacttactgatccccaccacttcaaacaaaacatttcttttaaaattctgattaatttgagaagagattccgtactaatccaggcgtccaccgtgttttctgtgactaagcatagagtttgtgccatgctttgctgggtgagaaactgttattgaggttcatagctgtgttgttgtaaacctgtctgtgattcacaggggcatgaaatgacactgttgatttgtatgcttcattatccacacccattactgagctagtcggtgactggaactggtgaccagtgctcagtagaaattttgtcagctcatgtatttgtcaaaaataaatagtactttaattactacactggtaagaaaaaggttttagccttgattctcaatggactcccatggaggttttgacagactgaaggaagtatttattataatttatcccactgcgtgcactagccatgaacttttccatagccttcgttgcccgacttacagagtggtgacaatgagtacatttagtcccttgaaagccaccgtcactggtggcagaacagtgccgagcttctatcttccaggttgcatgttcatgtggcaaggaaacacacatcaaaaaccaaagtgtgtgttcacaggacacaaaccctgtctttacttctgcttattctgagtttagggttgatttgtttttgagagaatcttagtaagttgtcctagaaccaagccatcctcctccttcagctgggtagctcgggtttcaagtgtaaacagctgtgttcatccaacatctttaaattaagaaaagatttgcaataacaacagaatgctgggaagtgatgtgagtgctgttctgctgaaggaaagtgggcacactgtggacagagtgagcattggtactgtgtggtttttgttggaaagccccagggcagccacctttcctgttatcaagatgaatagcgtgctgctttcaagtaggacttggctcactgttttagttcggcctttactttttggttatctcaatccattctttggtggtgacaccgggtgttaagtaatgaaggagaagccttgaactcacttcataaagacatttaaaaacctttttcgtccctttatctcaaagacaaacttctatatttgaatatagaacttcaagcatttaaaagtaaatttttcttaggacttaggtatgagaaaagatgaaagctgtcttgtaaggtgtgtgtgtgtgtgtgtgtgtgcaactgaagtattttcctttttttccctaaaagaaggaatttataaagaaattttgaaggagtcttgatgttacagtgactttgaactgtagatagatttataattacaaatggaaatgaactcactatttgaaagaatagctactgactcatcagatagataccagctgaaannnnnnnnnnnnnnnnnnnnnnnnnnnnnnnnnnnnnnnnnnnnnnnnnnnnnnnnnnnnnnnnnnnnnnnnnnnnnnnnnnnnnnnnnnnnnnnnnnnnnnnnnnnnnnnnnnnnnnnnnnnnnnnnnnnnnnnnnnnnnnnnnnnnnnnnnnnnnnnnnnnnnnnnnnnnnnnnnnnnnnnnnnnnnnnnnnnnnnnnnnnnnnnnnnnnnnnnnnnnnnnnnnnnnnnnnnnnnnnnnnnnnnnnnnnnnnnnnnnnnnnnnnnnnnnnnnnnnnnnnnnnnnnnnnnnnnnnnnnnnnnnnnnnnnnnnnnnnnnnnnnnnnnnnnnnnnnnnnnnnnnnnnnnnnnnnnnnnnnnnnnnnnnnnnnnnnnnnnnnnnnnnnnnnnnnnnnnnnnnnnnnnnnnnnnnnnnnnnnnnnnnnnnnnnnnnnntgtgatccatgcgtgcatgcacacaaaaaccaccaatgagatcctgacttcaatggtatggggtaagtatctaacatgtgaatgttatcttttgatttctatataatagttgctattctggcaggcctagcagcgtatgcctatgatggcagcgcttgtcatttgatttacattccccggatggttagtgtcattgggcaccttttcatgtacttgttagccatttgttcatgtgttttgaagaaatgcacctcacatcctttgatggttctgtgaaatactgatggatcagaggctttgactggagatctgaaggctcacgtgttcttcctttgctggtcagatagagaggattcacagtagctctcttccaaccctgccactgccttttctccccatcagcgcctcttgctttgagggagccgttagctttatgtagtcccactaaactgttttgctcttttcttcccactggcttaacgttttcctatgcattcaaaagaatagctgggctcagatactagacccactttctaggacaaatgtttaataacatgttcattaaaaaaatctctgtcaaactgcctttgccaagtgactgggccatttctgaattctcacagggatgaataaaagctctggttactctacaccctctagtatttagtgttctcaagttctgagttttgacccatggaatgagatcttgttttgtgaagttcctgttcatctaaaggatgctgggctagaacctgcttcaccgtcctagtcaccatttgtctgtcttctgtgatggtttgtgtatgctaacatggttgggccatttgaaacaggcgtttgttttcttactatttaattagaagagctcttagtctattatagatgacaaatactctctcttgctccggtgggttttttaaggcagccatattgttacagtaccatgagtgcagattcggcgacatttctaggagacacaattttaaagcaggcttttacattttcttgagtgtgtaacatattctgctgtttctaaagtgtttctcaagatgggcgtgacagtgatctgggcatggtgaggcataactgtggtctcagcatttgagagtctggagcaagaggttcatgaattttagtctatgctatactgtatttcagacaggaaggcaccttttgctttctaagaagcatttttcactggtatggaatattctgcggaatagatataattagtataattaacatttcttcagtgctttattcacattggttccaattttagatgaatgtaagttcataggatgacatctttatataaagggagatgcttgtagatttggaatcacggtgtcagtgtcggtttttaagaaactgctgagtctataaaagcagatatttgttatatactaggacacgtggtttaatgctcttctggaattgactggatcagtgtggacacctacgatggaaggatgtgaacgcttttctttcccagcccagctttgcatccccttcatcttaatagcaaaggggattcagctccaagttctgtgtctagctcgtgatgctgatgtccacactctttgggccctgcctccatagaggcctttgctctccatcatggaaaggtttggctttggcatctgcttctgcctagaatggcattcatattaccccactccccatcgaaagggaaggaagttaaaaggggctgttaaacaccagagattcaaacccacagtgaggaaatattatttcatcatctattttctggagccccaaccatttaggcttgtcttctcaacgtttctttgttctgctctgtttcctcaaaggcaaggaagtgaggacaggatacttataaacaatccttttggtgtcataacctgttcataatacatactgtttggcacttgacatagtttagcagggtacagatttctttctggcacatctatggcctgccttgcccctctgcctgcctcctatgcttcctgtcagagtgtctcctcccttggcaggtagaactatcagggtactttttaccagtaatgtcgaccaaagcactcccacatgtccctctccagcattcctgttcaaaaagaagcttggctggtatttccttggcaaagaggaaataagccataatatgggagaaggcatagcttaggttccagatagccattctcagcaaagaaaattgccggaattaggctcatgagcacaattgcaggctatctagcagagtctgacacccattcaggagactccagagaggagcagataaaaagtgcagcgagctacacaaacccctcattgctcatttgataacttcctataacctaatggtaaattgagcagttacacgcatgttcttatttgctttgttttgtttatcataattaaatctcccagctcaataagcatctgaggtacttttgtggcatttcagtctctgaaaggtggctcttgattctttgtgacataggacaggcttggtcggtctgtgcccttttgtcagggaagtgggggccaccttattgttatggtttgaatctgcccatcctctgccaagctcacacttagaacaattggttctcagatggtagttgcactcagggaaggtacagaccctttggaatatagctggcagatgagagccaccaggcctgagacttggaaggctatgcctgcccacaggtttggcctaatgctctacttcctggttgggctaccaggtgaagagccacatgttctcactgctgtgaatgttgtcaggccttccctgctgcaatggtctgaaatcccctgaaacacagtgagtcaaaatgaatcctttcagattaaaagtggcttcctttgggcatggagttacaacagtaagaaaagcagcacacatccatgaagctctacccatctagttagcctcatgcccttaatgtgggaggctcccatagcaaaactaattatatatgtgtgtgtgtgtatatatatatatatatatatatatatatatatatataacataaaattttatttaatttttgactgttaaacatagcttttgatcatatttacaaacacaccctcctcccagactcactccttctagcttcatgttttctgtctcctcccccacccccgtgtctttctaaaacccactgaatccagtttttactgcctataaaccactgatcctcaaccaatgagtcatgaccctttggaagggggaggggtggatctaatgcttcattcacaggggccacctaagaccattctgcatatccgatatttacattactattcatgaccataggaaaatttcagttctgaagtagcaacagaaacaattttatggatgtgggtcaccacagcatgaggaactctattaaaaggtcacaacatcaggaaggttgagaaccaatgtccatagactcatgggtatggccatccgcgggagtatgaccattccccggaggccacaccatttaagtaaactgactcttcctccagctgtcaggagcccttcaggtaggaatggatgctcatgtgcccttacccctaccttaagtgtactgctgaccgatccactcatgagagcagcaaccttctcatttccagaagacactctgttgacccaattctcctgaacctctggcccttaggatttttccacccctagccccatatgctggtccccaaatcttggagggaaggctattctagcagagcagcagaacatctacctaagatgactcctggcagtatttttttcagactctcgcattcctaactaaagtaattaatctctggttgtgtgcgggtgaatagaactagttttttaaaactgccaaaaagcaaataaacactttcctgtctgttaaggttttggctgaaacatgggaactccatttggcttatagagagaaatgttttttaaatttaatattcactgaatatttttacaaaatacccccaaatgtagttttcagctatgtgcgtcataacaagaaaaataaaaacaaaaaataaaaacaaatccactttccttggaaaagaagccccacgtgctctcctaggctggtgggaggcttggatcctgccagctcttcagaagcccccatgtacatctgcagcctgtgttttgccatgtagacctccactgacagacaacttttaaagtcactcaagtcaagagagctggctaagaacatttaccatgtctcattttactggtgaagtagcagaggccaacgggtctaacgagacctaaccagggccactttcctctgggtccctcagcttcctgaatagagactactcacctctcagaatatgaaagtaagcctattacagacggtgctggaagttagtctcttcttagcaatatctctccagtatatgtatggaatggtttcttgtcctaacagatgcgtgggagtagaacctcgagctgggtggaaacagaacagggtcagctgccttggtttgatgttctagaaagctgtcaccaagatggctgcagtaagatgactgtgtgagaggtatctttctttcaatagatgtttttgagtactcaagcacagactgagcatcctctagacaggaaagcatcagagatgcatgcaactctctgcagcccctgcttgataggaagcctagtagacattttatcttctagggagggttttgttggtgatggtgttgttggtgttgctgtttgtttttgtttttgaactgatagtcagacttgaagaataaggggtccattttcaaagaaacaatgctgtgagctacttaaacttacattgactgacatgaatcttcagagacttaggagaagaatattgcctcaacccctcagttggttatttgaaaattctcaaggtgtacactgttcaagagatctcattttatgtctggcttgtgtattaagtatcttcttgaaataaataccatcagttgggccagtccccctgagcctgcggttcctttcgagcagcaggtttcctaagtatggaatttcagcgaagcatatcatgtgtcggatgtaattgttaagtctgtgagactgatttaacatcactgtctttattttctcccactgaagaaaataaagcagtatggggaatttatgacccgttgtgcagtcaagtcaggatccaaaagagaatttagaggcacaaagttccagggcttaagtgatgctttattaagaatctccttgtcctgcttggtcacctacacctaccccagagttccaggagagggtgggctggaccatacatgactgaaggggcagcgagtatagctaaacccaatccctggggacctagttttgggtttgctgatgaggagttagggttcccctctggatttgcctctttgccaggccaccttcattagtagaatcactctttatattctatttggtctgtggggaatggagaaattctagcaaggggtaggtggtcccttttggcactttaggaaaattgtgggtttcttttccaatgtagaaggaccagtttgcagaagagatttgtcagggagcccgattttgtattcttcaactatgaattctggcagcccaacttgttatggctcagtgtttgatgtcactccctcttgtatttccttctaatcattaacgaaaaatgatgaaaggataacaggagcacctggcctattggtgagcataaacacactgatcagagtgcaaaatggaaacacagcaatccctccgaggcagccagagcctttctcccactcgatggggatttttttctctttttatctctctctatctctctgtccctctcccccctccatgtgtctatgtctctatgtctatctttccattatttttaagtgtgactagtaagaaggcaggcataaaacatgactacaaaccctgggctttgtctcctgtggtaactgggcaggggagtactatgcacttcatagcaaatgctggctctgttactacctaaagcagcacgattccatagctcagggagcatttataacattttttttggttttattatctgtaatattctattatctcttcatctagctatatggcaggctcctctggagcccttagtaatgcagtactgataccctagacacatacattttggggaaaggtggatagctaaaccaagagaaagaaagctaaaccaagagaaagaaagctaaaccaagagaaagaaagctaaaccaagagaaagaaagctaaacaaagtgacaaagaaacaaacaacaataaatgaaaactgagcggccagaattgatgcagctctaggtaaggaaggtaagttgctgttaaagcaagttgtgggggttcatacttaggacctcagcattcgaaaggactggggccagaggatcgccatgagtttgacgtcagcctgggtacataatgagtttgagggcagctacactagtgatagcctgacttaaaaaataatgtagtaggattcgaaaaccaggttggggcctcacctcatccttctctctccatgtgttacatgaactcttgtgcgtacggcagcctggtgaagaaatagttaaatgtattcctgttgtgttccctgcttttttgccaacacgacaaacccctcctcttcagtttgacatcagacacatttttcataactcaaatgaaggagatgggagtggaggggtcagacatgccttgggacttggggggaatgaatacggcacactgaataaaaggaaccctggatagcagcactgtctcgggtgtcaaacctagtgctaggtttggtggcatatgcttctaatcccaatgtgtgtaaggtggagtcaggaagactgtgagtttaaggcaagtctgagagagatgaaggtacagagggtgagagggaagaaaggagagggaatgaaatcgtttgctcgagctacagtctcattgttcagtcttcagccttagctgttttctccttggccctgggcctgactttcctcatctgtgtaatggagtggattgaattgcatgatctttggtaggtctgaaggtcctccagcaaaggagtgtaatgatcttgggtgttcacggcagcatcatgtcagacttgacaggttctgcagagaaggctcagcagatcactccaatggcattattcttaaatatgctctgggctggtaccaaagtcctgctgtatgggtaggctggatttcagtcttcatgaacgtagatccatcagcacttcttcaggtaaagtgactcctgtagctcactcgaggaaaggctcactgaaggtctcatctgacaagctgttctgagccaggatagcttcactggcaggttctgagcccttggcctaacagaactgtgcaggcaccactgtgaaacagggatggtattggatgcaggcgagttaacatatgagggcagctttatttcctgtttaaattctacccaagttactcacgcacacacacgcacacatagttgaaaagtccacaggtttctcttaggctgatcacaaaaaagaatagtagattcacaccccagttttccttttctcgtggtgtgtgtgtgtgtgtgtgtgcgcgcgcgcgcatgtgtgtaagtaaatatttctttcttatttggaaacacaatgactaagctctctttttccctccaacacaaatatattttatcccacccatactcccaatataattatgagttatgagctctctatggctgtttgacgagttattctaaaacatagagccttataataacaaacatatattatgtcacagtttccttgggtcaggaatgtggaagcaacttagctgattgcttcagaccaggctgtctccagaggtttttgtcaagctgtggccagagctgttattgactgaagacttggctgaacctgaagggctctcttttgagctaacttatgtggttattggcaagctctaatctgttgtgggccatgaggataaaggttttaacatggactctccatagaaccactcacagcatggcagctggcttcttcagacagacagacagacagacagacagacagtgcacaaatcttgttgacatcctttgtcgtgttaagcttggtcctttgcctggaaggggtccttcagagactgttgacagacagacagacagactgccttggagtaactatggcttccatttcagttcacgttttaaaacctcttatttagaacctcctgttagaatcttccctttccctcctttctcaaaactctggtgtataggtatttatgtattttctgatttcagcagactttttcccaaatttttcattgtttttttttttcacagacaaatctgttctcatgtatttttcatttctaaaagcttttctttaaaaaaaaaaataggattgtttccttaagtcctccatcctacttttacggataagcctcctcttgtttcctctgaaaatacttcttttccccttatcgttagttttaacttctttctcttttgattgtgcttgatgtgaggtttctatttcacggtggtgacactcctcatgtgtctgtgggtcctgtctgtttgctcctacctgttaaggagaagacctttgtgggcctcaatgatagaataaaataaagagatgggccatttccagagcttccctgagctgtggattgccttataactttagtctgcttttatccgttttccaagaaaagctttctctacattcttgactgtcatctttcttgctgctaaatttagggaaccaatggctaaaggtattctctcttatgcaaatttgccttaatcttcctgacttatttagtgactataaaatatattatattatattatacaatgtaagtttgtagctgagaattcctggtagccattatgagatcatttcagttgatatataatatgctactgtaattatcacttaaatactgcaattagtttttttcaagattatccttatttttctttgaagatgaagcctttccacatacggcagaatggaacttggggtcctggtgcctcagattaccatgttctggggttatggtacgcctggtattgtagattgttagacacagttatccccaatgaatgagaccttcattgtgtcttattcttacacagactcttaagtttgggaacttcaaacaggagatacaacttctaatgtccccaaactcctttgattattggttatctaatgcaagattagtgactttttagaatgaactttctgcagcctttgccctgtctacctcgctatgggtccttgccagtcattcttttgaccaaagctctgctcttcttatttttatttagcaagaagagtttgtcacaccactgatattttcccaaaactcttttcagtatttgttgcgaaacccttccttctttgttgaccttctgtgaagttgtagttgagagaggtttctttctccaaaggaaagatgtgttgaacaaaaccaagttccgctgttgtatacacttgtaataccaaacttggacagggtgtgtttggaatgtctctgagcaacattgctcattaaccacacacagcacatgcaactacttgcattttcaagtattgttattttttgtctagaaagatcctgtttggttttgtctacccactttagagaaataaacagtacctgcctttatttcttgagtataaagaccaaaaacaatgatatgaacattgcattaatgtctttggggcatagacgtctgtcttcttcacaaagcatgtggccgagtctcagtcccaaaatggcctcactggatgaatattatccaaagactttattcgccaacgtacaaggtggtgattaaatctgtttctccttcccatacctctatcccacccagttcaagtctgtgctggcatggagtgggtgattgggttgggttgtataggtgtggtaggctcgaggcccttgctgttttatcagtcaagtcaatgaggtaacagacaggaagctgagggaaatagttttacaaccttgaaagtgttatcttggaggacaaggtttgtaatactggagtgaagagaagccccttttacatgggtaagtcagtgcaggcaaagctactaatttgttgttagcttcaaggagatttagagccttggtgtccctggcagttggggtgtacaataaaattctttttctcttccttcatttaagtctagggaaagctgggtgcttatagaatggtaggaccaaatgcttcttttactgatagacatagggatttgttacacagaacatttcagatttaatgtgttttgtggaagatgcactcatcctttttacttcttgagacaatcacagaaaggagaactggaggctagtccccaacctgctgttaagggatgaatccaagggaaagattttaacccccatccccgagcagagctgtctccaaactgggagaaatagacagcaaacagaaaatatacacatcagctgacatgctagctaggtggagtcctttggtaggttgttagctgagcttagctaagcctggccaaccaagtgaggtgttcacgtaagaactgaggctgattggtaaaggacttgcctaccatgcatggaaccctgacttctatccccagcatccataaagtagccatggtagtgcatagtggtaatacacccttaaagtctagccttatacatggcatggaggtgcatattggttatcccaataccagtatgaagagaggaaataaaaacaggaggagcaggcatttaccatcatccccaggttcacggtgggatcaggacacgcctgggctacatgagaccatgtctttattttacaaaacaataaaaggttcaagtggcagtactagtggggggggggggggttccaggaaagaaacggggtgcctcactctcagggtgagggtgggatgcattttgctattccctttggggaaatttgctaaggcactttaacagaggctaaggagttttaactgcctgagccctttgacaggagtattagcatagcagcttcacttgatttaagaagggaattattccaccatccacactaatctcttctggcaagaagcagaataccagcaatggcttctcacagaagatgacagggccccagacttccttcccttcctggacgggaacttgcaactcttcaaaatgttaatataacctcacggatgataacaaagtcacagaaaagtcttacatcacagaagctgtctgttttcctctcacacaattttaatagtctttagactctccctacacacatgcacaagtgttcacgtgttggggtggnnnnnnnnnnnnnnnnnnnnggtagtgcatagtggtaatacacccttaaagtctagccttatacatggcatggaggtgcatattggttatcccaataccagtatgaagagaggaaataaaaacaggaggagcaggcatttaccatcatccccaggttcacggtgggatcaggacacgcctgggctacatgagaccatgtctttattttacaaaacaataaaaggttcaagtggcagtactagtgggggggggggcaggggagacatcagttcaagctgtcttccctggttgccacttaaatttcaagtccaacctagactatatatacctgttggtggcattgagcaggacaatacagaggacaaagctcaactcaatattttttgtgtttgcttatccagaaccttcactggtagtaaagtttccattgttaattttagtgtatcatactttactatgctttctcctaaaaaaaaaaaaaaaaaaaaaaaaaaaaaaaaggtaatagctggatcaacattctagagattgcttcactgccatcttcccttcccaccctccgatggaaaacacatgaataattccttcttggaaggcttaatacagacacaataagctaagaactccctaactgaactttacaggctgaaggggatgagatataagcagcatttgaactaacttctagtcaccataatttagtaaggggtggctgccaaaagccatggaaagctttatttgatccatttatgaattaagagcctgcagtaagttaattgccacatattggggctaataaagactagcagaaagagactgcctttgggttcatgtgcagagaggaatcaaggcagagagagttgctccctgatgtctgagggtgtcctggctgtggaccttccacagagccaggcaaggatgctggtacatgtgcctcaagtctactgaagagcctttgagccagcattcacctctcaactgctgcgaggctttgctttattgatcataataagctgtttcgtcttattaaagttgcatcatggagtctggtttttaggaatcctgttgtgaattagttgcagaagaaatgatttgcttgtatttcccgacagttaacaggccaagcagatgggacagcagacctgaaatagttgggttggctgcctgccactgttctgtgaattttgatttgcatggatatgtaatggttttattattcttttattatttttggaagtacttgcctatgatgcttaagaaaattagacttcagtttcctgtaaacacactgttctaaatgaatggaactgcagtattcctcgaagactctatgctatgttacatgtgaattagctaaggacaccgtagtttactctgtcaaagatgaatatacagctggttgtggtggtacttgcttttgataccaacacttaggaggcagaggcaggaggttctccatgagatcaaggccagtctggtctacatagtaggttctaggacagctagagctacatagtaggaccctgcctcccccccccgccactccccccaaaaaaaggaaaaagaaaaagaaattgaaataaaaactaaaaagatggataaaaacacatgagtttctcctggttgaataatttttattcataattgactctgattttccctttcatttcagagagtgggaattttttccttttcttgacactgttcattaaaagaaagaataaatacaagaaggatgtctataaactttaaaagagggatttcagtgcaagtcataagcaagagtgtcatttgtgtcaagatctgcattcttgctgaaagaagagtctaatatcttgttttgattgttaatgttgaatacatgcaaaatattacttaaaatatttaaggcatcactcataaagaacaacatggaaacaaatatttgtctttctattgccaactaagaatggaactttccagtttctgagacatctgggtgagccttctgtagtcttgccttcttccttctccatgtagtcacgtaatctctattctgaaattgtgtgtgtgtgtgtgtgtgtgtgtgtgtgtaagggtcctatattttatcacagatctctaagttcctacataagatactgtttggcttttcttagtcagaatcacacacagggtttttctttggcttgcgttttccaagctggagctcattccaactgctccatctatcagactctctgaatgcatccttacaatatctcctttcttgtgcccatggacttttggactgcagccagttctttgctgtttcaaatgctgtctctccgtttccaggcttgtgtttaaacaaaccaatctccttcaaactgcacgttgctatttttccttaaggtttgtttggctaaggagatatgtcactaagtatttcaggtactacagattatgaaacaatcacttattacacacttcaaagagaggggtgcatttactcagtagtggaaggactccacagtatggcttccctcctctttgcaaccatccagataaaagccatgattgctgcaaaatgtattgcattagtgtttgctcagaacacagctcaaggggtcaagtggaattttaagacagaaaggataaatagggggagagagcagtgttactttcacctgtgggagggttcacagggcactggttcattcgtccctttgggttgctgctggcagctctctactggcactcaccagaggcaccttgagagcatctcttggaattggcagcctctcttctgcggcctgtgggccttagtatgccgtgaccttctatctcttggctttcagctcttggctcagaaactacttcctcaataaagcattccttgcctgcaatccctccaattccttttctcctacccgtccccaaacccctgtctgtttaattttcttcggggccattgtgtctaaaagtgcagctgttcccctagtgatcatctgtcttgcttcatatggctgtagttcatcttcactgtagtgcctaagccttcaagagaacacgacataaaaacagcctgaggaaattacttttacctaagtaacacaaagactgagaatatttctaaataaaggatggctgtagtctcacagaagtgaatctgggtaggcacaagagacgtgaaactaaaccattaaactattgcagtgttttctctacaaaacggggttaaggatttgggaggtagtgaatggtcatagattaaaaattagactttaaaaaacaaatgggaaagctggtactgtaaacggtgcactagctgtctgggtcactgacagcttttaggcggaacatactgtagacttcatctgcaggaacatgacattcttcaaagataaaagagtgggtcaagtttgaaggctctggaaaatgttttctttcaaatgaatttccctccaagtgaatttcagacattttcacttagtatctagacactttgggatgatttatgtccttaaccaatatgagacatattttcttttcaacacttaagatattctgagttctataaataccacccttgttgatggaatatttggaaaagtcttgttctttgaccttagtatattacttatctgaccagacaagctcaatttccaccataggagaacagttttgttttgtaaggcatattgtatttggcaaggcatagtcttctgctttgcaaagaaagtatgtttgtctaaatgtcataaatggtttaagagtgttttattaaccttaagatccactatattcttctcaatctggatttcacattcagatcatattaggattttttaaaaatgtgctttttaaagattggttcaagtttctggaccaaatatttgtgttcatttggtttaagacagatgatgcctttttccttttctttttctttttctttttcttttccttttccttttccttttccttttccttttccttttccttttccttccttccttccttccttccttccttccttccttccttccttccttccttccttccttcattactgctgttagcctgtaacttccaacatgttgctcagatgaacagagttggcacctactcatctagactaggatgtcacttcataaatgcatggtttttctgtcaaatcaccttgagattaaaacatacttctgcttatggttcttctctagtcactggctaaaagcacccaagatagtcctactgtacagcagtttctgagtcactaacactcagacacaggtttcagtgccaggtatagtttccccttcactgacatcacctgtcagtatagtttatttataatgctccagctatgcattattcctggacacagagaaatgctagcaattccaggcatgctctttcttctgcctctctcttctctctctctctctctctctctctctctctctctctctctctctctctctctctctttctctctctctttcttgctctttctgctttgtaatgcaaatctgaagatccttcttactatattgtggttatgagcaaactgttgcataattttcctattttacagacacatgctaccttttgaataattaagattaaagactttgatatttagggaaaatgttagaaatgctgcaaaaggtgtcaattatgccatttaaggaacaattattgctttctttttgtcattaaatgatcataaactacatgctatgtaaatctgagaaattaacatctcctatttggagataagtttttgatcataagaatatggcagaattagctgtattctaagttgtacaagcgatcatagttaattaaagccagaactgatgaaaagactcagtacttttgagggttctgcctcctccctcttcctgttgtctttttttaattagaggttgtctgttttgtgtttcgctgtatttcaatttcatgacttttgttttgtagagatactgagagatactctgtgtgtatgtgtgtgtgtgtctgtgtgtgtgtacaagcacatacatgttcctgtgagatgtgtcagtggatagagcacttggcaaacttgccaagaaagtgtgagggtggcagttcacatctctggcagggatggagggcgcctgccatcctagcacctggcaatcagagagaggaaatcctacttccaaactggatagctattcagaattggtaagatttaatttcaataaaaccctgccacaataaacacagaatggggacaggggagattgagaaagacactagatgttaacattgagcctccatgatcgtatacgatgctcgtgcacctacctgcatgcatgtaaacatgcatgcacatacacagagaaggagaacgagacacacaaattacttaataggatttattgaattattttattttcctaacattgtgtaagcaactaggaattaaaagtggggcaatgttttatggttgaaggctaactataaacatgcctgtacaatgtaaaattcgttgtttttaatccagtcacttgttacgttattgtgaaaaagtgagaaatctttcttacctccatctacaagtatgggactgtccagcatttctgattacttataagagccctccaaagacagttcccattggtgtatgttaagaaactaagtttaccagcaagcatttctagctttatgctgtgctgaaaggatgaacaaccttctgatgtcaagggatgctggaagtcacactattataatcaggtttcccataataggcaacagtctccaacagcatagtcgcatgtgctcagtctctcagactgtgtatttcttccaagttgagagtcagaagagtcgtctatccctcgtgttggcctttctccctggtatttctcaagagttggcaattatttagtaaaatcttgctaataagaccattgctgactacaaatgggtccatacttctttggagagagaggttttaggagatacatttgtttttcccagacttcctctgaacaatgttaggatctgagatttttttttcttcttggcatttgagacctaacatcaaaaggtatataccttcaaagaatttcatgttgctatatttaaatggtaattacattcccccctggcttagctctaagcttgataaatttcataggctcagttatttttattttattttgttggtatcatgagatgattttttttttctgaaccaaaaccacctaagctcaggttaacaatacagatgaatgctaagattgaagctctgtttcagtgttaggtgttaaaatgtttatgttctgggggaaaagtgaataatccttttgaattatttattttgtgtgagttttttaatttaagtgttggaacacagttttaagagtcaatacagcctactgcagtaatagaggacatagttagattcacttgagcagttctttagagagccatggtttccaagggaagaactgaggcagggggattttaaccctgcccatacattatggacacacatgtcttttagaagctggcctagaactcagatcaactgaccaacactatttagggaccagtatagcatgatggttagaaatagaaattcctgcaagcataaaacacagccgaattggaaatcaaccacccagacaaagcagctctgcactttgttcagctaaaagttaaatgacttaaataaaagttctttaagtagaaccctgggaatgttttctgttgtgttcctcggtagagttcttagggggaaagaatggttttctacgtgatctttgcctgtctgtttcttgactcataaatgtgaacctttctctgtagaattgggtttctgagaactagtggtttctctgtgtatttcatttctttttaaaaggcccattgacagttggacaatacgaagcatccatttcctaaccacaaaaacaactccatttctctctccatgtaaaatagttaagaacaatttgccttttgaggaagagtgtaggcggaggtgttgggattggctgtgccaccctggctgcctgctgaggtaactcttggaaacagtgggttttgtttttgtggtttccagtgacctttggctacgggtaagctatttaaaaccccaagtaggaaggtgagtcttggcacatctaggaattaggttggcctttcctcatattatggatctatttcctgaccatttacctggcacttcttttgaatattttattatctacttggtttgtaatcaagcccacccacctgattttagcctacagagtttttcccctgtctttttattccctcaagccctcagcccatgtgtattcatgtttttgctttccattcacggagacctccagctgggaaaatatagtgtgtacaatactctctgccttcagctgacattgctcataaattgcaacagaaacactgctatcagcagcttaatagcaggtagaatacagctctacatatcaagcctcagcaggacacagaatctatggttaccaaattcccagtggcgcaggggaggggcagaaagttttctaagagcgaccacagcagcattggggtgcatgttcactgaaatgaaagcagctttctgaaaaggacttggggacccgactcagtggctgctccattgacacatatctttgctgagttgttagttttgaagcactcccgaagtggtttctgtggtagcaccatgtataaaaggcaaatttgttcagttctcttcctctctttctcttctgtcctttaaaaggaaaggtctttaaaaatgtagtgggaagggttctggtttgcaaattctcgtggccttgaataggtgcacttttacctgtggggcacagtcactttcccacacaggcatttggcagaggcgccaggcccggtgcaagtgtggaaagcaagcaatgctatctcttttgtctcggtgttagtgtactgcatgtactgcgtgtactgtgtgtactgcatgtactgcgtgtactgcgtgtactgtgtgtactgcatgtactgcgtgtactgcgtgtactgcgtgtactgcgtgtactgcatgtactgcaaaagcacagagatctgaggtcacatccttagcctctccataagaaagctggacacggggccactgagatcactcatgttggtaaaggcctttcccatggaacctgagttccatcctcagaaccaacatggtagaagagaacttcctcccacgagtcgtcctcggaacttcacatgcgtgctggggcacacaaaaacatacaaccaaccaatcaatcaaaagtttaaaaaaattaaatgtgtgcctgctcacctgaaacccccagccctgtgtggggcagaaacagaagggcctctggggcttatactcagtgagagatcctgtcttgtgagaataagctggagagatgagacgtgacacctgacatcctccaatggcctgtgtgtactggtgtgcctacccccaccccaacacgtgaacacttgtgcatgtgtgtagggagagtctaaagactattaaaattgtgtgagaggaaaacagacagcttctgtgatgtaagacttttctgtgactttgttatcatccgtgaggttatattaacattttgaagagttgcaagttcccgtccaggaagggaaggaagtctggggccctgtcatcttctgtgagaagccattgctggtattctgcttcttgccagaagagattagtgtggatggtggaataattcccttcttaaatcaagtgaagctgctatgctaatactcctgtcaaagggctcaggcagttaaaactccttagcctctgttaaagtgccttagcaaatttccccaaagggaatagcaaaatgcatcccaccctcaccctgagagtgaggcaccccgtttctttcctggaaatgttcagctctgatatgtacatcttattttatatggtatatatttttttcttttatactatcctgatgaatctaaaagccaccttacatcctgtagatagagctagcaattagtatcttcagtaaatagccagtgggattggttaggatctgaagagtttgaggaaacattcagtgtgcctagagctaagaaacaaatacatcattcaaaaggaaaagggaatcgcattccacgtggtcctttcaggacagaactttgactcttgccatgtagagaaagctagggccttgaaagctaagtgtccacacgcattgacaatcccatttggcttggccagtgtgagcttcaaaatgtcctgccaaggcttccaagtagttgcaggctgacatactggctcatccccattcagaaaatacctctgcttctatgtttggaactcaagtcaagtgcatccgtgatgatgcagccccaactgttctgccatcagtcactactttctggctgatgtgataaaataaagcaaaaagtaggcaggagtctcccggctgagtcaggtgagccctgcctgtctcctactgtgatgtagtcttcttcacccagtgctgtttgaggtgtctgtggtcatggcaattcacctaatcttggctctcagagttgctttctctgtttttgtttgtttcttgacttcaaacaaattgaattttgtagcttgtttatggcaatgaatactacccatgctcatctttttaaaagttttatgtcatgaatttgatgcaaccctctttagttttagtttccttgctaattgggccaagacatttaggatttattaagtgaagactcctgggatcacctgccacaggacttcagtattgttcattctttttctttcttctttctgaaaaaaacaaacaaacaaacaaacaaaaaaaaacaacttttttcaagacagagtttctcatgaagttgggctgaccctgaacttgatatatgactgaggaggactttgaactcctgatcttgctgcctccaccattcaagtggtgagactataggtgtgtaccactctgcctagctcatgtggtgctggagacggaatctaggaccttgtgtatgctagacaagcattctgccaactaagctacatccctggtctgagaaactttttcttgattctcctgttctccaaagcattttttctaggctgtgggtcaagcctcccccaatactcagaagaagcactaagagatctagatgtgtgtctttagccatggagccatgttaagacaaaggaccgctggaagggaaggtggtgagatatacactttggtctctgtcctggtttcagttctgttcttcttagtctaaggagcccaggtaaacccttttatcttgctgggcctttaaggtccttctttctcaataaaaattccccaagatgcttttgtgcttaaaaattagttgggtcttcatttatttgttacattttttgggggaggattctcacttttagattgttagtagggttcagtaaattaatatttatgagattctttgaaagaggcttaacacacagtcagcactttatgccctcttaaattaaacaaacgtgcatggcagcattgtgcatactcatgtttatgctggtaacagtcaagggagcttttcactagccagccggcatgctctctatgttcagatttcctcgaatttgcagctctaagctacagtgactaacaacgacggcagtgttgcctacatatcaaacaaaggtggtgtgagggagaagctgaggtcatgatgacacagacatgcagggaacggtgcttttgccaggggcccagttcctctgatggtcccatagtgctattctctggattgaggcgaaaggtaaattccaagaaactatgattggggacatatctggcagctaattgctctgtaaaaattatttaagacccccccacacacacaccacccccacttctgcttaatcaaacttccacatgaccatgtgaggactggagttttgaacatagtccaaggggaagtgactttataaggttgaccccaaatccctccagcagccagggatcaggcagtgagacgacatggctgctttgaccagacttccaccagcatctgcactgggctgtgactgtgaccatggtcttttgggtttttttttttttagaatgacagattacatttttttttttaaataaaatgcttgttcttaatgttttcttgtctggtctgtgtaacacatgcctagatagcagagtttctgtttccttactgtttctatttttaaatatgcatccacataaatttagattaatttaattaattagctgattaggtattagaggccatgatttgttaaacaaattaaacacactcacactaacaagtatgtactctctctccctctctctctctctctctctctctctcacacacacacacacacacacacacacagaacaaacttaatatacctaactcatacacacacatataaagcaaacccaacttaatatgtcatacagacaagagtttaatgttaattcttacccacatctgtctcctgtactggaggccaggtagatgactcctcacaggctggccacctaacatgtataaagaaacttctttattatttggagcataaggcttaaggcttccccagaagcacagggtgaagggaaaatctagaggtcacaggcacttgtcaaagaaaagtgatggctctgcccacttctgcctggcaggagcacgctcaccaagggcacatgaagccatctgtgtcaacacagggcacaacaggaaagcatctatcgagttgtccaatgtggatacttgggaactcttcatctccctgcttcacatcgccaagcaacaaggctgaataatttttgtgtctccttgaaatcaatttgtgctgatcacacacgaaggtgggaaccacagcttttgaatatttacatcgagcaaataaaatttacgttccctgaaaggcaaagaaggctgccatttcatgcttgctaaccttcactgtgtctttctcgttgctacacacagcagcctagtaggcacaaatgttcacggccattacagagggggagctttctgctttgtcaactttggtttagaaaaagctctggtttctctattgcctttatctattacatctgtaaaatttatttaagcaatgacagatctctctctttggggctccgagtctgggagaatagccattgggatgagatttgttgaatatgactgttcattaaattgcaagtagtcagggaagctaacagtgcggatctgctatgctgggcaggttatggtctatgtttagagcctctatgtcaggtgaagaacaactgtatctcattaattacttttagaatatttaaaatggaaatagaagagtggggagagaaaagaaaagaaggtttgaaatcccagaggaaaggttccttggcctgtttatcttgcaagattccagttttcaagagttttctttcaaagggcaaaagtgggagccaggccccagcagctaggggtttaatgagtgtggagcttgtgtagcctgctagaccttcctgcattttaagagctactcctcccttttacctctttcgtaagtgctcactcttggccaacactgaaaaatgtgacttaacaaggagaagaagctgggtggcaagcatccggaccctgcgcctcatgggcaactgttttggtaggaataccatgggaatggtcaggaaattgaaaggatttttaaaaaggctttctgagggcagtgctcctgaagttaaagaaaaccaggcccagaaaaggtgggccatggttctccacacccaagatgggaacaaggagttattttgaaagtcctgggtcccagaaaagattaaaggcactgtgaagtgtgaggcaggagaaggtacccatagaaaccagatccaagcctgagattgtccaagatgtgggtaatggggaagaagtgacatcaggagtcatgaagaggtcaagacagacacaccctgatgcccacagagatgtaagcgcttctgaggaaagggatgtctggtctgtgaattttgattcctttgaaagtgaacccacgtcataagatgttagtactctatcccacagagagttctggaatcctatctccaggtcttaattacctcctgtgaacttaaagacagatttagaatggatttgagattctatgcttcttccagatgtcattttctaagacaaagtgccttatggggtaagaaatgaaatgtgggacccactggagggccacagcaggcatccctacatggccttggcatgcggggtgcagctgaatttggtgcatctgctgctctgttgcacttgctgctttcaaggctgtgtacgtgctaccaccatggtcagtttcaagtttctagggtgctgccaccgaacctggagttgagatgagattctcaccccctccagcgcgagccgttagcacacctctggtcatcatagagcatccctgtacaggatgctccatccgtgctcctgtacgaaaagcgtgctattcataaaaccatgttccgtaaccatacagaacacacatgggaacaggacaacaggagtcagatcatgttcagatctctgactttctaaccaggggacatcagttaagcatccttagagttaatttgctcattagtaagataataattaaggagcttgacacgcaagctctgggaaaacaaatgagttgatctgtgtaagaacattgatgcttgtgactaatacatggtaagttcccagtcaatgctccttgcacttcttttcctcttagcagctgtaatacaaatattagccacctgatagataagataaattttaaattgcctttttgatgcttcagtggatacctccaccccaaggctctattctatcaagattcagtaggaaaatctccagttcagtttgtctgtgggtttctacttttactagtaagtttatgtctgtctcgggatgttttgtgctgcttcgatagaatacacaggattgggcaatttataatggacagaatttattttctcacagttgtgggtctgaggaagtctaaagtcaagactctggctttgaggctaggaagatggctcaattggtaaaatgcttgccacacagcatgaggctccagatccttagctacaacaactacacatcaaagatgtgtactaggtcctatgccagcttgcttctatcgttgtgataaacaccaggtcccaaagcagcataagaggacaaaacatttctttagcttgtgcttctagaacacacgccattgtcaaggaaagtcaggatgggggtggatgaaagagggaagctggaggaagcagctgaagcagaggatatgaagggacactgcttactggttttgtttccaggcctatgttcagctatggttttatacatcctaggcccacttacctaggggtggcaccagccacagtgggcttgtccctactgtatgaagtagcacccaattcacaggctaatctgatagaagcaattcaagtgagagtgcctcttcctagatgtgtcaagttgacaaccaagatatcacattacctaaacaatagaacagctgtttgcatccttagtgctgttaaggcagtataagaatgtaagaggctctgcaatggatttatgcaagaactgtatcctgtatgtaagaccttggtgtctggggtagaagagggctgtgttctataagcagtcccccagatccataaggatgacttatctgctcggactgcattctgacaattatttggtttctctcaggttcctttcctaacttacttgtctacaaaaacaaaaagcaaaacagcaacaataacaacaaaacttaaaaaaaaaaaaagaaagaaattccgggagagcgttctatgtgaaaacaggctacatagttactctcaatttgaacacttcaaaacatctattttggtctttggagcccaatgtgtttgtaaatttaatcagctatgacaatcgtaaacatgtatcaggatttataaaacacatcgaagtcacaggaacaagactgtcgtctaaggaacaaggatttgttgcaaatttgagtttctgctgatggaattttccctagtgttcaagttgagtggtcctcagttgccccacagaatgtcatcggtcaagcccagacgctctcccagacagaaaacagtatccactgttctctgaggcgttaccctttccagaaagcccaatcaggagtcccattacatgaccataagttagcagcacatacacacacacacacacacacacacacacacacacacacacacacacacacacacacaccagactttaacatggcagtagccccgtggctttctgggaaaattgttccttgctttaagaagtgcacatgcattcatgcatacagacccatagactggaatacactatctgaaacagtataaccctttggttaaatgtcaacagttttgtagttaaaaaatctcagttaaaactttaatttagccagttagtgttagtgtttctgccccacccccattcaaaaatattgatttctaaaacgtcaaattatgatttcttccctcattctgccctgttgtttaccactttgaacaacaaaaggcatctggctctgtaacaggcctggttgggccagggtcctctggtgattaccttccatcagccactggctttcccaccctcttccagagcagtctgcttgggtaagaagagataatagcttgctaggtttccctttcaaagaagccaggaagcctttggaccaataattctgcaacagctttagagtgctggattcttcaaacaaagccgagtagcatcttgttctcttcaccccaaggccatctcgctgctgctagctgctcataaatacagctcccagtttctactgaaaacacctttagttattgtaagcgagggacatcaggaggggataataggtctgcacctcattcttccaccaggcattttcctgtcctaggtaccaaccccacagctttttgttatgaaaacaaagcaaaataaaaacaaaacaaaaaacccttatctattgcttcctgtgctcgcttccagtattattagctctgcctaaccagacagcctgtttgcagtgatgcttgatttagcaatccagggatgggaatcagattcttgtcttccatcctcctccctcctccctcctccccgtctctctccctccccacttctccctcccccacttctccctcccccacctctctctctctctctctctgtgtgtgtgtgtgtgtgtgtgtgtccctatatatgccccttctctgtgtgtgtctgtatgtatatgttcagtcttaacagaagtacaagacaacctgggaaggcatttgaaatgttgagccaggtctttcagtgtgaagaggtgtataaaacacatcccagtgatgagtaccaattaacagtgcattgctttctggaaaagacttcaagttagctgccctgcaggtcagagtcaataaagactgagttactaacaatagcctttctctcttgctgaagtcttggacataaccctaacttcatcagaccagagaaaaggagaataatgtgaacaataggagtcttgggggttgacttgagcctaatgctcagaggctgtaaaaactgccagagagcttgattgattggctcatatgctccactcctccatggagaggactaatgtttctgcctcttctgagagagtttgatgtgccacctggggtcagaacttatcagcctgtggggctaatgtttctgatgaggccaaagtgcagtcaataatttatacagaaatttgtgcttagattcacaagggaagagttttgacttgcatcccttcctccatctgaagaagtgtgaaagaacttcaagttgttgtcctgccaacagcatctttggatgcatatgataaacacttaggacaattgtgaattcaaaatgagacttttaaaaaccattttggagtgttcaaaacgaggcccaactttggaagtttcagtatccgttggtgaaatgggtagagggaagccagcatcagcagtttacatatattataaaccagactctcctagaatgtaatgaccgtgtccgttagacctagagtgactttgaagcagttctgagtgaccatgggtaaagtccccatagtagaggtctcagggtagagccagcagagagaaaatagccggcaaaaccaagaatggagacagccgaggagaactagattttggctagatgcccaaaatattctgtatgtccggtatgcagagaaacagaaggtagagttggcctcgatggctgcgcatgaccacgcatgcgtacagtgcactacagcgcccatataaacgcatattcatccagctcctagaaattgagagtaacgcaatgacacggagcagggctggtcaatcaatacccagctaagttctgttctcctgcaaaatgacagtttgctccagtaagtgctaacaaaggcccctttaccttcgccctgcagtaggagagcgctgttagtcacacttcattaggtttgtttacagaaaagagctggtctctaagcagggtattgaaatccttgtaactctatagggccttaaaggggggaaaaaaaaaagcaaccttccctccctgaaagataagaactttggaatgtgggtgggggagggtgcaaagggatctcagaccattgtcaggaaaactggtttgttcagatgggaataaaaaaagatgagttggcggttaaggtgtttctgccttgtggggaaccagaaccagtaccatcggaaccagaccagacacttccgctgtcctcactgaactgcaaagcttcaatctggcctttttgtgacctagaaaaagtgaggtgctgttgagaacctgaaatgagtcttttttaccttaaaagtaattctgaggagcggcttctagggttttaagttgtagtcaagagacagaggaggaaacgcttgctttcagcaatgaatgcttgttaggagagatgagttcctaacggttgagattagtggtctgtatatagaagcaataaaaggttctcaagtttgtggcctgctaggactatataggctaatgggttcagaagcctgactgggaagttgcttcccgtggaaggtatgcaggaagactgccctgttagtgtggaacttttcttcagcagtggcctgagttacaagagtgtaacggacgtggtcacgtgactctgactagtagaggttgagctggagctcaggaaagtacaggtgagctccagggaggactgaggctgaggagcagctgtctcagttgctgcatttgttggggatggggcacggtgctccccctggctagcgtcctttcctgcctagccttcggaattcattgcagatccctctagcttggaatagacattcctcgtcttcccctgctactttctgaatctgagctatatgtgatgtgactccatcaccaaagacataaacttttgtgctacttgtgggatatggtcactgtaggagggaacaggggtgggcaaaagcttttctgtcgagctgaactctgtaatcgagagggggctgagcccaatttctctgatattatgtcctttgtatctttactagattgcccaagatggtggtggctttatctgttgtgtaatagtcacctctttgtatgccttatgcctgtaatatctcttctccctctccccccccccctctctctctctcacacacacacacacacacacacacactacacaccctgcagttcagagagtcagttcccagtttgagctgctgttgtaaattgctattttaaatttcagcgagtggaataatagccgagtgatcatccccagcaaatgttgttggcctttgtaaagaatggctccttcagaagctctctgatttacagaggacacagctggtgggcagcagagctgtaggaatctgtgctctcctgggcctagcaagctacagatgaaaagggcccagagctggcacaaaagcaaataagcgctctgactttaaataaagcatcctaatttataggaagcctagctcttcagtcccagcgagatctatggatcagtagcagccttttgatgtggagcataattgtcaattggttcccactgtttccttataattcaggaccaggcctggttaaaaaaaaaaaaatttttttttaaagcacagtctcataatctagaattgtggtacacatattctgacaagcaattcactaacgtttaaacctgaaactctgcaaacgaccaggacctataacctggtgctgagttgggagagagacagggtgactagaggaccacctcctcctgcttttcccttgcccactcttcccctaaggccatgaggttttccattctcaacttcctctctatccatccgattcactcatctacagaactgctttgtctttcctcccagctttcccctccccaatgcctggtccagataaaaatgggaaagccggctgttacgggactcagtattcacagcgtgtggacccctctactctgggtgttgaatatgctctgttgatggggtccgatctggaggggccctttttgccttggataactgttgccatcttcactggctcctcactttgcctgtttcccagctgaagccatgacaacatgaagagcttggataagaaggagttgttgatgcaaaaaaggcacatgaggtgcagggaactgtgggaatagtgatttgatagaccatatcctttcgattatctgtcttcagtggctctgacagggagagaaggaaacctctgtccatttcactctgggagatcttggccatatgccctgtgtgcccagggccacatgtcaaaaggctgtgtcatgaaccaacactnnnnnnnnnnnnnnnnnnnnnnnnnnnnnnnnnnnnnnnnnnnnnnnnnnnnnnnnnnnnnnnnnnnnnnnnnnnnnnnnnnnnnnnnnnnnnnnnnnnnnnnnnnnnnnnnnnnnnnnnnnnnnnnnnnnnnnnnnnnnnnnnnnnnnnngggggtgggggggggggagtggattcatgccttcccaggtgggaggtgtgagaaggccttctctaatgagggaagcacttcaaagtgtgtaagaaatctgcattgaaagtccatcaaggcgattcagatttcatataaacccaagagtggctggaaagctcaagtgcagaattgggtattggaagtggctttgggctccctgatgtcaagcctagagggaagccgttacttacaggaaagcttagtcaaaaatcataaatgcagcctctttgtccaaatatatccagacacattgtactcatgccacacggcatctgcttttcctgggtatgcatttagattacttcaaatgtttgcctccaaagattccctcaaggccccccagatcccccatgcgccccttggcctttccttcccactgtgtgttggactgagccttggtgggccgtgacctgcagggattggcaccgtgcccagtgaagtgtctctctggcttattgccctgttgtagaagctcccttgagagatgtcctcttccccatcctggcactgtcatctcagacgtgctttccagcttgcccccaagtaaagactctagacactttagcagaaactgttacaggaacttgccagcaataagggtacttgtggtagtgtgaatggtgtttgtatagagaatatgttctaaaaccatcaatgccactttaggatgtctatatctgcttaacctaaaggcaaatgcttttgttactgatcattcataaaactactttctaaaggtatccatgtattttctttcatggtgcttttcattacatttgaagtatattataaaacctatgacattttgtaagcaggaaacttgcacaacataggtcttggctcttgcaatcaacaggaatttatctctaatgacctgtcaggaaatggttttgttttcagacaatctcctgtcccaggctggccttgaacacgttttttttttccctaggctgatcttaaactcttgtttgtgctaccatctcctaaatagtaggattgtaatcgtgtgccaccatgcccacccgtaggcacggcttttcttagaagttgtgtcttaggctgttgtgatgttcattcatccttctacattggtgattttcggcaagaggacactttgtccctatctccataggcagcataaagacacagccttttttatgtctttgatgacggctgtcaaaagccttgctcctgctccctgttcttcgccagtagacttcctaacaggctgttgaaatttgtagacatgggagaagctactgttactggggaagcaaggaaaagaaagccagcaagagcttcctttagctgaccagtcagctggatattgaccacctgtcttcatgggaaagaaatagatggcagtgaataagtgagagtcgagttttccaacaagctgaatcattttcccaaatcaatacagctcatcagacctcggaacaaaggctgcacgggcagtgacagagatggaagtggttctgtgttcttctgtgtattaaagcatgaggcccatgggggaaacaaggcttctctggcagtaggtttgtgtgtgtacatgtgtgtgtatgcgtgctcattcttaaagacttactaagtacattcgtaggaaggaagtccctccagattaaagcaaaaagagctatatagattgtatatggctgctcaagtattttgagggaaacaaaaaggaatgtggagactattttgtcttctaaaaggtagattagagccagcccccatctttgctttcagtgttattggggtttctcccttcttacttatggtggtgtttagacaaactcaaacaaacgtctagaaatgaacgttagcccctggcaaaccgcccaaactagtctaccatgaataaaaccagcacctcacgccctgggaatatcagcaaaacggaatgctggaccgtcgtatagaggttataattaacaaaggtagaacacttgcaatgcattccagccgccaacagagactcaccagcaaactccagtccttctgtcctttaatcattaagccctctgtgctttcacaaggtagtaagttaacgccagaacagcgtgtctgtgggctttacgactggggtggcagcacactggggcataaagtatttcattatacttccttttgtcagccctgccctatctcgcaagctccattgccatacattatttgttcagataaagcccaatgttcagggtgactaatcgcacaactgtgttccagatggtttgattacaggatgtggttaaagtaactcttcaaacattcagcccagcagtagggctctatttaaaaagaacaaaaagagaaagaaaagaaaaagaggtggggggaaaacagcaataacaacaacaaaataaaccccactatttcatggccacgtgacaacactgacttttcttgccttgatacactatacatatatccctggtgtagataataggaaaatctttttgttctttggctggcaggtatttcatgggcaaacttagttgtgaatttaaagattttgcaaaaaattataaatgttgtcctctgaaagagaatctagctgaaggtgaagcggtctgaagcccgacccgtgaataaaggcattgtatcagctccacactcggaaaaggcaccaggaccacactcaaccgaacaaagccagagagctgtcatggaaagaagttctgcacaaagagatgtgataagccccaccctgcacggtggtcagactgggacaatgtagggtaaccaaggctctgaaatagtggcatttcttctatactcattggtgtttctcttgaaaaaaataaagggaagaaaatgtaaccacagagggggagaatcgcagcacaaacgggttacagtttggagttattagaatgaggtttgcattttctgcccgagtgcacaccaagtctctccagatgtggcagtctgaagaagagttcaggaaaactttgtgattccagatttggcatctgtgatgcctgccaatgctcttgctcctgaggagggagactcttttaagactcagccttttagctgtaatataaacagatttatgcaaagccaccgggctatcagcgtttgcccagttcttgaggaagcagcttcacaaatatgaggaataataattcataagccacatatctaaccacagtggagtagaatctctccacagagaaagtctgtcctcaataagctagtgggatgttacccttattgaaaatgtacgggagcagtgagacctcaaaagccagggttctgttgagagtcctgtaagctccaatgtgttcagtgagcttcctcacttaagatgcagtgcttctccgggctgtgtatgctgacaggcaacgcaccaataacaaaggagggctgtactgttggaagagatcaggtcagcatgtacatgagtggagggaaatgttgaaggaatgtcctctcaggatatgacacacatcctcacccatgttcaaacatggaatgagtttctctcctaaggatggggaattcctcgtgagtggaaagctgtctgtgacttgagctaccatgtgagggagaccttgctgccttgaacttgtagccttcaaggttcctttggtctttcctattcctggcaaacagaaaggagagcaaactaggagattgtatcctcaaagatcttacgggctatgccctttcatgctctccttcagtagagtgttatcacagctccaggtagacagacagagagaatccatctataaaccaaggaaagggggaataatgtgctagtgagcatccatcatggtagagacaacatggagtttagtcggtgacccaggagagactggatttagctggtaagatgctatgtgtctgcggatggacaggtgctgtcaccggagtttgtcccaatttattaggaacttcagctgtccttgaggaattctatagaggcactcaagccttctttaggggagttaagtgcgatgtgagggccagccagcaagatggcagaaagggtcagggagcctgcagtcaaacctgatgacctgatttccatctcccagacccacatggtagaaggagagaactgactctcaaaagtgtttccctgacgtcctaatgtatgccgcggtgtgcaagcacatacagacacacgtagacacccccacccccgcacacaatgtaataatcgttcatttgatactgtggcataaataatggctgaagaaacttgtttcaggctggaaggacaaaagagggtgtgacctggaggggaaataatgacaagaagttattgttctttgggcagagggtgagtggagtgcttctttgggatttcagaccagagcatggcacttacagacgatatctggtgtaaatcaaggtatatttctttttcaatataaacaagatggtaggatagtatctaagtagaccttaagcgagtgctgatagtgtcttctactggtgataagactagaggaaaagggcacacacgcacatgtagaatctttggccagcattggcatcttcaccccatgtcttagctattaaatatttgaggttcttgcccatcctggtcctcttagttaatacatagatctttcaactttagtatgtatcatcatttataaatgtagatgttattaatccagattcctggcatatgtgtgtctggttctctctgtttctggtacctatcactgacccagagatgggaagtcaggtttaggattattagtttgagcgcttgctggtctaagacatatttctgagcaaggtgtgaggacagggcatgaaccaagggcatcacacctgggctctagtgattggagcctaatctaatgtgtgagattaggcgagtctaaccaagagcccactcggtaagcaccggtgatatgcaaaaccatgcttctacttctgaattatgatgcatgtctgtactggctataagactgtagactccttaagtacagaagctgaacagggtttccaacaaaatatgatccagtagcaccaaataggtacttaagaaagacccaataggtataaccaaccttgatgggcctggataggaaatagaacataaattcttatgtgacttcagtgtgtgtgtgtgtgtgtgtgtgtgtgtgtgtgtgtgtgtgtgttctagtatatgggactggtatcaacagtacaaagaagaaaatcatatggattagcctctcgatccatcctcatacagtttttttctgcagtaatatacctcaggtatttttcaaatagcccttgggtgggaagggaagggcaataaacccagagagatccttgttgttataaaaataaaaagggctctcgtagagagcccccactcccatcgcacaggcagggcgttcaggagcataagtgtgcttgggatctaaatctttggggaactaaggtatgtgccagtctaatctgtatagagaggaacgtaactttaagcctggggttataaaatccaaacctgtgcttgctgaggactagttctcatctgacctttctcactcactaatttaagcctttagtaagttatgagttctatatgggcgtgggttacaagatgtttgaaatttgtaatttcattaaaataattttaaaaatatatacacttggattattgattgagagagggtcttcctatgtagccctagctggcttggacgttgctatgtagaccaggctggcttccagctcacagcatcacccccctctgcctagaaacaagtctgtgccatcacccccaacattttccacatttcagaggtaaccctcttaatttggaccttcagaatggcgtgttttctaaacgtggatcttcctaaaacaaaaaacaaaaaacaaaacaaccccccaaaaaccaaaaacaataacaacagtacattgtagttcatagaggaaagttgcttaacctctccactgacttagagccacagttgtcaatggtggcactgtgaagagacttgtacacatcaagacagaccaccacaggcccatctctaattagcattacttgagaggactctccctgagaggggagcttttgttttgagcgttttaaatccagactgtttttaggaaaaaacaaaaacaaaaagcctagggtgacttatttaggcttcctgaagttgaagtaggcttttctttacagccttttactactcccggtacagacaaccacgtgacccacgtggcttctaggcagtagcagctgtgaactgttttcatgaggaagttggaactgcagttcatcctttgtgaccgtttcaacctgcggaccaagatagccactgattgatggcctgtgtggttgggtcccttccttttccctggcccagttaccctcgcctggtttgaggccgcagatttgggctctgcgtgcatggcctgttggcagtatgatggggaccattgtgggggcggggatgtggagcctgcttccagcttccagggctttggtgaggggctctagcgatgctttcgcttccccgcggtggttgaggggaagctgaagctttctcctgcccagccctttctccttgccttgtcttccagtcttcaggccagccgcatcgggccagccaatcagacgcaagcgttcgctgcaggcactggccaatcggccgcccgcatttgctggaaacgcgaaacccttaggggaaaagcagtaacaaaagcctttcactgcagacaaatgttaagtgtctgtgcagacttttcctgtttttaattttattaccgcaagaatggagggtttgttgtttctttcatgtttcctttcaagcaattttaattatacatttgtgctacatcagggactctggaacgcagtgatttcagcctattgcctctgaagctaaaatgcagtaaccttctggcaatacagatacattcctgcactgtaaatatagctgacatgctaaagaattttaagcagctgcagaggtctctgacaccacacacagtgccccagagagcagatgatgagaaagccagcccaatctgcccccctcctccatgccccacccctctttcctgaagggatgtgctcatacagactcctttccgattgttctgtcttgtgcagtttttgaccgaatgcctaattaccatcgattctcactgcaatgggatttttttcctactcaatggttaaaccccacccccacccccttgggagaatcacaaaggaatcaagcatgatttgaggcgattcttcctagcttttttccccccatagctagactattgctacaatagtaggtggaatttacagtgagtaaattcagctgtcatataacttatagcagtctcaaccatatggaaaacaatttttaaatctccttttgagattttggggagaaattttccatgattcagtagttgagtcctgatcattcagatattttatcttctttttaaagattccccagtaaaaagagtcctgttgctttatgtggtttccaaaatggcagatagcacaggagaacaagcctcccaggaaagacttggaggaatggcctctgagggcggaagtgtgggcaccgaaagaaacaaaggctcctttaaatgtttcatttatttaccctactctgaatatagctttgttacaaatatgctttaaggatgtgatttttgttttgttttgttttaaatggcacttgtccccaagagaacaagcctcgtgttagatgttgtttcccagtgacatttggcatactaagcatgctttagtttagtatttcacagatgcagcgctcaattaaagtgtctgtctgctgagcagccgaggaagaagcaggatggctggaaggaaacatgagcgtgcgttcatttttttttttttttttttgagttctcttctaatcctctgtagcaaatgcttaccgaagttgactgaagataaccccaagagcagatgcattgtgcacacttatttccttaagagagctattttaagagcctctgagacaagaccaagcagtgacacagagcccgttctgaggttgatatttgtctcacacaggcgaggaggggaggatcaagaagaaatcacagctgccccaaggacccactttttcctctgtgcctatttttacatatctgcaagattttccccccaccctcttaataaaaaaaaaaagttagcattgttttctattgttgaattggaaaccagattccttttagtcatcctctgccttaagcactggtaactcgggcttggtttatgttggctgcctgccaaaggaaagcaattatgtgtaataatagaaaaattaagaggtgaatgttactgttttacagcaggacatggcaaaaaccatttccttctgtcagcaatatcttgatcacaccctcacacactctcaccctttgcaccacactcatgaacgcacgcgcacatacacacacactcacagagagggggtgagggggtgggtggaagagagagagagagagagagagagagagagagagagaaagagacatatttcctgtgggttttaacttgaggtcactgaaaccagaaagaggaagggtgcaaaccacaggttttgaaagccaagtgagaaaagaactttgctggtaaaaataatatcaatgaatgaagtcgaaataaagtactaggtgataaatgcgcccccgttcaccctccactctcccttccaggtgtcctagtggtcaatgtcacatggaggaacaaaacctacgtggggaccctcctagactgcaccaagcacgactgggcccctccccggtaggtgccttttctttcttgctccatcctctgctcctcccatcctgtttttgcatggaaaccatagaaagaaattagtaatatataaaactcttcctgtaattgaaaccaggcaaaggagaaatgagccattcagccctgagccagtaaaacccagatgctagctgtcttctcctaccagatctctcctcctctcacttccctctctcctttgttttcctctctctctctctctctctctctctctctctctctctctctctctctnnnnnnnnnnnnnnnnnnnntcccttctcccccccccccccttaaatggggatttgaactagttgaaagctagctctctgagctgctttcctttgattctctgtggatgaacaacataatccacagggcagcctggccctgggctgatgtaccagtacaaacagaggctggtcttctcttggctgcacctcactctcaagccaccagggcagtgggtcctctttgctaccttgtgtccctgagctcctccctggctctttcggagatgctcattatgacccacttattactcgcttccctaggttttgcgaatcaccgacaagtgacctggaaatgcgagggggccggggcagagggaagagagcgaggtctgccgcggctgccccaggctccgaggtcagcttcaccgagtccagagggctgcagagcaagaacagagggggagccaatgggaaagggaggcgtggcagcctcaacgccagcggacgaaggacacccccaaactgtgctgcagaggacataaaagccagcccttcctcaaccaacaaaaggaagaacaagcccccaatggagttggatctgaactcgagctctgaggacagtaagcccgggaagcgagtgcgcacgaattccagaagcacgcctaccactcctcaggggaagccagagactacttttttggaccaaggctgctcctctccagtgttaattgattgtccccacccaaactgcaacaaaaaatataagcacataaacggcctgaggtaccaccaggcacatgcgcacttagacccggaaaacaaactagagttcgagccggatagcgaggacaagatctcagactgtgaggaagccttgagcaacgtggccctcgaatgcaacgagtcaagcacaagtgtgtcatcatacgatcagacgaaagcacctgggtcccccggggctgggaacccccctgggacacccaagggaaagagagagcacgtgagcaatggcccaggtcctattataggttcgaaaactggcaagaattctggcaagaagaggggccttaacaacgaactgaacaaccttccggtcatctccaacatgacggccgctttagacatttgttcagccacagacagcaatctaacggcggaaatgcccaaattggaagcggaaggactgattgacaagaaaagtttgggggataaagaaaagggcaaaaaagcaaacaattgcaaaatggacaaaaacctctccaaactgaaaagcgcccgccccattgcccccgcccctgcccctacgcccccacagctgattgctataccgactgcagccttcacatccaccaccacagggaccatacctggactgccctccctcacgaccactgtggtccaggctacaccaaagagccctccattgaaacctattcaaccaaagcccacaattatgggggagcccatcaccgtgaacccagctctggtgtcactcaaagacagaaagaaaaaggagaagcgaaagctcaaggacaaagaagggaaagagactggaggtcccaaaatggatgctaagctggggaagctggaggaagccaaggcggctagcaaggatttgtctgggcattttttaaaggaccatctcggtaagagcgaagggctggctaatggattgtcagagtctcaggagagccgcatggccagcatcaaagccgaggccgataaggtttacacattcacggacaatgcccccagcccttccatcgggagtgcctcacgcatggaatgcagtaccttggtgaatgggcaagcacccatggcaccactgcatgtattgacccagaatggggctgagagcgcagcagctaagaccagcagtccagcctattcggacatatcagatgctgcagatgatggcggttctgacagcaggtcagagggcatgaggtcaaaggccagttccccatcggataccttttctaacaaagacggtgttgtgaaagggcatccttcaacttcagcacagccatctcagctgaaagagtcccattctccctattaccatggctatgagccttactattctccgagttacatgcaccctggacaggttggtgccccggcagctgggaatggtgggagcacacagggcatgaagatcaagaaggagtcagaggaagatgcggagaagaaagacaaggcggaacagttggagtccaagaaagtagaccatacttctgcacccctgcagcctcagcaccagtcagtcatcacccagagacaccctgccctggctcagtcactttattacggccagtatgcctacgggctctatatggaccagaaatctctgatggctaccagccctgcctacagacagcagtatgagaagtactatgaggaccagagactggcagagcagaaaatggcccagagtgggagaggagactgtgaaagaaaggctgaactccccttgaaagaactgggcaaggaagacaataagcagaaaaacatgccatcagccactatctcaaaagctccctctaccccggagcctaacaaaaaccattctaaactagggccatcagtgcctaataaaactgaggagacaggtaaatcacagcttctctccagtcaccagcagcagcttcaggccgacagcttcaaagctaagcagatggaaaaccaccagcttattaaggaggctgtagaaatgaagtctgtcatggactctatgaagcagacaggtgtagacccaacctcgagatttaaacaagtaagattgtggagtgtggcccccgacagacagggagcagtctgagttgtgcacatgtcttgggcttgatcttgctagacatctaagcagtgggaggaagccgtcgtcagggggtttccctcttcccttgagaagtatgatccttgggagttcctgtacaactctaaaatgtacatgactcactgaggccatggtgtgtagctaagggatctctgggcatgcgccctgcagctatgtgttacctaagagtaattaattctgcggaggactcttgatttcttcatgagccaaagatgaaggcattttactaaagggcctcagaagtctctcaaattctgagatttcatttcctgtctctgaaacacttggagatatatatatatatatatatatatatatatatatatataaagatttttaaacccaggtcactgagttcctacttcccattcatcatttaatctaaggaagtgtgagcacctggtatctcttacaaagaggtctgagatgtctgggtttctggtttatgttctgtttggaacccaaagtagaactcttgagctgtggttttttataaggagtcagaagctggaggtgacagttctcaggacagttcctccacccaggctgagtgcacttgaagtgcagtcaccataaaaccagacacatagctagttctgcgaccgtcactccctgctggtattccccagcatcaacaccccaactttactacacccggtgtttgccccctagtgagtcagaacaacaagggttcttaactgctatgtttccagccagtgttgcgattgagggccaacttcaaatcctcagtcaagacctgaaccctaggtggagttacaccatgagtgggctgagtcatgaagagggtttcaagcctcagtcccgtgcccaccatagctctaaatcggctgtcgtctcccaaggttaccggagaacaagacaatttaaaaggcccatgaatgggtttgctttctaataagcaaaccataatacatgccattggtttgatatttgggctttcgattcaagatgttaacatattaatgagccagcatagtgagatcctcagctgtagtcagtgaagaaaatgtgttaggaagccaagagtttatttttgcctaattggtgttaataactgtaataactgcttaaaatttttaccgttagcttgaggtagagtttttgaaatcccttttacctgtgtgagataacaaaaggaaaacatagactgaattaaatatctttgaggatgttattatctaaggccttttaacccagctgccatgtgaccttgatgttggctgaactgtaaaagcattggtttagcctgtggtacgaggactgatgctaacacctacctcagacattttttttttcctttcagagtaggttgaacagcacctggtcacttcgaatgaaataacaataaatactgctgccatgtaaattaacaggtttgctttgcagatgatgacattttaagacagatctttattttcaaaccaggatccagagtcaaggacatggcaccattatgtataccagcccaagtacctggaccaacaaaagccagaagaacttgacagagaaaagaaattgaaagaggacagtccaaggaagactcctaacaaagagagtggcgtgtccagtctccccgtgtcattaacaaacatcaaagaggagcccaaagagggcaagcgtcctgattcccagtcggtggaggagaacaagctaaagaatgatgatcggaagacaccggtgaactggaaggactctcgggggacacgagtggccgtgtcctcacccatgagtcagcaccagtcctacatacaatacttgcatgcttatccttacccacagatgtatgaccccagccaccctgcataccgggctgtctctcctgtcttaatgcacagttaccctggtacgtgttacgggttctaactacgttggcgggaagaggctgtgttcaaatgatagctattaacaactggagatgaatcagaaacttcccagatgtctttcggtttggcttgttttgggggctgcttagagtgccaaagaggaaactgatttaatgggagatttttatattttgtaaggaaatgtcaagagtccttgggctctagcttccataccttctgatggcttactatagacgtttagactgacagatactttattgcctgtggaaatattctaagcacttactgtcataatcattatagttaccgtttctttcacttaagcggacacataaatggatgaagtagctataagctcaattctgtttacatcctcccttcatcacgacgaattaaccagagaagaaaatcagagaacctagacacagataaataatcatgtagcccattcttaatgtaaccccttattttaggatgtctgatttgtatgccccaaaaaaatcacatgttccagccgatttcttgttgttgttgttgttgttgttttttaagatgtatcctgtaacatgatgtgacatttgttgtttatctgcaggggcctatctctctccaggatttcattatcctgtttatggaaagatgtctgggagagaagaggcagagaaagtcaatactagtcccagcatcaacacaaaaacagccagcgaagccaaagccctggacctactccaacatcacgccaaccaataccgcagcaagtcccctgctgtaagcctccttttgttggtagttaaaaggccatgtttggtgggggaagggagacaagaaacagaacagtcttgaaagagaaatggtttagaaacccagctgggatttcaggatgctgttctattccaatacataaagaatggaatcttgaaatataagatgtggtcacacaggagtggaaaaaaatgtcattgaagcctttgtgggaacggggagattttctgttgcaaaactgtcgtgttctttacctacccaggaggagatgtgttagggagaaatttaaagttatagtgacttgtacaaaatagtgtaaatgttacaacattaggaaagtaaatgctggaagtttagtttatactacccttgttactaagcagtttagaggccacaaacttttaacctatttgacaagttgaacttttgctaaatgccttcttaaggatgggggtgtagctcggtggtaggatgcttgcctgtcatgtgccaaggcaacatccctagcctgaaaaagaaacatcaacgaagacacaaatgaaaacaaaacaaaacaaatccaaacaaacctaaaatacgttttcttcagaaacaactttcaaaaattgactttttttttttcacaaatggaaaggcttgcttccttttaagacagtcgacagtagcaaatgtagccagcaattatgtgacagtggttgatagaaaaatgaattcaaccaagacagtccagctagcttgtgaggtgaccagacagatgtcacccctgtcccctgtgctcgcctaaccacagtagacactcgagtttcagatccttctgatgaccatggtattcacatgttccatactgaagaagctcatgtgaagcaatgctgagggttcatgacacaccattaccattaactttgtacagacacttgagcctgagttgcatggcataggagtaaaggctgcatctgctgcctgctggtcttgatgcattatcctgtcctcatcgttccacaggagagttacaagaaatgtatctctgtgaaagatgtactcccagagaagtgacaactgctagtcctaaatactgcttataaagagaccaaagaaaagccatagctcctgggtagaaaagaaaagggggtgagatgaataagatggggcgtccacagggcgaacataaccactaccaagaaactagaaaaggtgatcgatccccgcccgatcctttttctgtaagttctcctttcagtgcacgcagacgttgttccactgagaacctgccgtgggaaaggagagctaggttctaaaagggagaaatgtgtttgagaaacactgtccttaatcctctcggatgtggaagatgtggaatttgtggtgacttttcagaattgaataatctggactgtgggcagggcagtgctttcctgctgattctgcccacccttgagtacgcaagaaattggttcccgaacctctcggttctcaaaatctgaagatactttataaagtgatgacacagattttgcctgtcaacctacattcatctttgtatttttagtcatccccagattacctccaagaatctactacaacaaaagcatcatctgagagtcctcagactgcgctgcttaggggataatggcaattaaaccaggcttaatacccttactgtgccagtttccttcagaaaactgttcatccaggctagctaagtcacacaagtggggctcgtgcatgcagtcaggagaattataaagtgattaaactatgtgtgcagcataaatattgtatattgttgcatgaatttgggtgtggatctttgtaagaacacaatgaattctttgttgggttttgatctttgagacattttttttttctcagtatagccctggaactcactttgtagatcagcctggcctctgtctcagagatctgcctctgcctctgcctctgcctctgcctctgcctctgcctctgcctctgcctctgcctctgcctctgcctctgcctctgcctctgcctctgcctctgcctctgcctctgcctctgcctctgcctctgcctctgcctctgcctctaggattaaaccatgcctgaacacaataaatactgttttaaaaaaaaaaaaaaaacatgagatgaacttccttcacaacgtataaaggtataattagaaaacttaacctttaaaaatagtcttagaaaatcctttaaaaatttcatatattaaaaaatgtttctgaaagtcaccaattggtttctaaatagccattttgagtagtgaatcttgagaacatttttaggaaatatttgcagaaaatattggtgccatttagatgactgtgggaggttctctattgttagcttcgctcttttaaatcaaatgcctatcttttgaagttttcttccactggtataggatttttagtctgtatctactcaatgacctgaatgaaatactatcgatagacggcgaaaggtgttttggtatttctgatgtttgtatgtcagcaccttaaaggagagcatttctcttttcagcctgtggagaaggcttccacggagcgagaacgggaagcagagcgggaacgggatcgccactcccccttcagccagcggcacctgcacacacaccaccacacccatgttggcatgggctaccctctcatccctggtcaatacgacccttttcaaggtcagcattctcaccacattggtgcaattctgttttggccaacagttgctatgactgtctatcagtatttaaaaattaaaatactgaactcggactaacactggtggtagaggtgattcctagcatttatttcctagtgttcctggaagacacaactaaggctgtttgtattctactgagacagaaagtggctaccgcttaataattgtcactgagagatgttatctcacagactgagggtggtagctggtgtctagggcaccatataacaccctgaagatcagataactgcttcggggatattgtagggaaaacagagccatggtaggtggctttggtgagatcacttgctctgatacctctactccttttaagttgcctcttccccatgtgagtaactagcatggtcaggcctaacatttcagaactcacctgaaacctgcttctcatcctttcactgatgtaacactttcactaaagctgaggagagaccttagtcataatgcgcaaggcaatcacatcttacctgtccccatttctattacctcagacccttcttgattagctatctttattttgtcacagttttgaaagttatagctggagagcctggtgcagattatacggaaccctttctggtgaggattcttaatagcatcggggaggggcttcctgctatctttgttcatagcacacggcagagttctggaatcagttcctacaagaacattaagcctgtcagatcaaaatgagccatcgggaactcattttactttaactacttctgcataagctcctgagtccaaacgcactcaaattgagaatttgggcctcaacatgggatcttagaagaattcagccatagccttagccaacgaacttagcaagacaatgttggataatgcttccaaatgcaggaaatgtaaaggaagtggactttttcttttaattcatttgctacttgatgctaagatagataggtaggtagatagataaagagataggcaggtgaatagattgatctctcaaagcaccaagtgtgaagagaacaagagaaggacatgcgttctattctaacacatcacagatgtaaagatggcttacttgagcagaataagtatgtctttctttttttgttaatgctactgtaatgtctcaaattatctctggaaaaaaatgtcagaggctggccttgaactgtacctccggaattattggcatgtactcccatgtctatttccctgaacaattttccatgggaatcaaatacttttttctgtgtgactgttcaggtctctgctcccttattagccttacagattaagaccattgttctaagaccatgtagacttaaagggcaggtttgtttgtttgtttgtttgtttgtttaaatttgatagctttatatcatgtactttatgggatgcatcatatttaagtcagtggagaaaaatgttacagtgatgaaagtcatcatacaagttttctaaagcaaatagcatgttgcttctcagttcactgtgacttctgcttcctattgctagctgggcagtacctgttatttgtcttgagtttcctattcaggaattcgtgcaaactccttagcaccaggcagagccagtcagatagaaggctgctatcctctgagtagctatttaaaaagccaccaagaactcagtaatggagtagatgggctacaccgagtggtttgtcatctgtctttgaggcatgaaacatttcatgtgtgtttttggcaaaggacaaatgattgctacaggttctgtgcccttgaccactgggcctgtgtccactcttttccaatgtcatggaaaccctgtgttttcctcccactaggcttgacctctgctgccctagttgcctctcagcaggtggctgcccaggcatctgcttctggaatgtttcctgcacagagaaggtaaatattcctgacacctggaattagttttctggcagagatgggctaatggtattcacggaagagaatataggctttgcagatgagaaacttggcacctgagtttcattttactgtaatgattgaacatgctatgacaagatgtttcacacggggctttgattccatgatcctcattctataaatgtgatgtacatctgtaaagaaatgtggggtttttttgttttatttttgttttgttttgttttgttttgttttaagtctaagataagggtaattgtccttaggttaagataaggccaagcctacacttttgttaacatattcatggggtagttcggtgttttagcatttgaccagaatgcctacagtcccaggttctagtctcagttctatcaaataaaatatcaggatacaaagcttttcattttattatacttaaaattaacattgcacatggagaaatgagttaccataatgctaaagggagcctttgtttctcttgtgttctaagttaccctgcaagctgttctgagaagaaaaataaattaaaaaaaaatcagattatcaatataaaattaacactccctaaaaatgtagcttatcactttgtgattcttcatttccccgggaatcgtagggaggaagcagaactctcaggctcactgtttttatgtagttcctgcccactgttgacagaaccggttgctaaggtgtgctcttcttttgcagagaataacagaatcggaagtgtccggtgccatgtgactggatcacatggggaagcgctttatatagacatcagttccatggtgttaatttgaaatgccttaatggcaggcaaaaaaccagtcatttcattttgtaaattacagattttatcacagagtaacaaatgttgctgtaattaaacttctgttttatatatatgtatatatatacgtatacatatctgtatatatacatatatatatatacatatatatatatatattctttacttttttgtaacagtaaccaggctcgcacacacagggtctgctgccaagttgcaaaccactcagtaaaggaaattaaaaaagaaaaaaaaaatgtatttgtcatgttgaaagtgttagccacaacaggctgcttacattcttttccttttaaattgtaaataaataatgttctgtatcagtgtgcctgaaccttgcatatccttcatctctctcccataaaacccctcagaaaggccaactgtgatgatgacacttggtacaatttagatgtctaattggtggctcctcttaaagatgcatcagtgtaaaaaatgtccccgtggtcactctttgtacttgtttattgtggaaataaatacttttggaaggcatggggttgccagaaccacaaaaactgtgttgtatatataatgtaaaaattaagatggggaaataatgagcatctgtgaataatgaggtgtcatttttttttgataatcttgaatggcagataacccaatagcctgcataccagagacatctgcgatctctctcttacttgaatagccctgcagtccttttttttttttccttttttttttctttaatgtttacaattatccagttttagaagagaaggattttaacgccattgcctggttacttgttttatgctgtaatctagtttattttatgtaaaatgtatattgaatgctttcctttttatacctgccttaaataatttggcaatcagaattaaaaaggttttgttttgttttttttttaataatggtttcttgtgtgtctgatgttacttctcgctggctgggagtgagtctaactttcagaggagaatttcttcacactatggacacgtaattcaacaatacacagatactaacttttcatacatgctaaaatgatataacaaccaaacgccgggttcaattctataaatatgggcagaactacatgactactctaaacatggacacatagcaccccaacagtatgctaaacatgtaatcttgtgtgtgtgtgtgtgtgtgtgtgtgtgtgtgtgttggtttatttcttaaaacttgttctctttatattatcccagctgtgctggatctcatagagatcctcctgcctctgtcccttcccaaatgttcatgttaaagccatttatcaccatacctggcctaaacatctaagtcttgtgacatatggacagtagacagaacatataaaatactcagctaagcaaggtgtggtggcaacacctttaatcccagcactcaggaggtggagacagatatatctctgtgagttcaaggccagcctagtctacatatttgagttatatgtagcagccccaaggtaacacagagaaaccctgtcttgggggggggggggaaacaatccaaaataaaaggattaaaaagtcagtgagttgtcactgacatatatagatatttcatgtccaatttcaccttttcttggctcatctttctgcctattgagccccccacactatcctaagctgggatgtatatcaatgaacaaaacagacagaaagtcccattctcatggagcttgtatctcccagtagacagtgcaaacatacaatgaagtccatgcacatagtaggttgtttgataagatgagtggggacacgttgaggatttgtgggagtttataaggctactcagtctgggacaatgtcactaacttgctgagaagggagttcatgtgaatttgaggggtggaggtgggtcaaagcaccacagtgaaatgggaaagctggtgcagaatccctccactggggattcactttggattggttaaggttttttctggtgctggggcccaagccaccccccgcctggcagatgctctgtccctgagctgcacaccccagccctggaacttgctcggcttcacaatctcatcccaatctggctctctatggctcccctccaatcaccaaagacaggtctaccagctcactaagaagtgctctcacgtgggtacctttgtttagctcgcctaccgcgtcccagaattctggcccagtagagaaatgctccctctgctttggcaagactaaagcagcatgctcctgttgagggctgagcaatattatgggttcctgaagactttccaacttacaattaggcacattttacaaataatatacaggaggccaggcttccctttcagtggtaaaatcctgaatgtacacgtatcacatgtcaggcttctcatcaatccagctcaggtggctgactagacagattataaatatgcacattagcccatacttaattctacttttgccgcgaatgggcgtgctgataaagatggagagatgcatgaccaaaaccacaagaccacgagagtagccttcctcctccctaggctttcgcttattcgtgactggtttacagtgatcacaaaatggaattttctttgtctcccccccccacccccttacggttatgattgctgtctatccccaggtcatgaagtgccgaaggccagagctcattgacattgtgtataccatttcactggctgagtctacattcagtactgaatggtaaattaaagattccccaaagacaagcatacttggctccattatattactatgatgaatctgtcattaatatgcttctaattgttttacttttatagacataaaatcagtccccttagtgactaataatagggtttattgattttactaaacattattcattccaggcctgcacatatcagcttgtccagaacataggcaaaaagcctgcagtgccagcagagtgcaaattaacttcgtggagaaatggggatggagagctgtttacagctgcagcccccattgaatgccgaatattaaaaacaaggctctatatagaaccatttatttctaggttagattctcagatggctttttcatggaaacttgccattgatgttcagcccaggtcattaacacatgcagagtgaaaagactggccttttccattcgcactggctctgaccccgacttcaagcggttgcagcccaaggctctctgaatgacctgaatgaatagctctgattgagaccgggatgaaacagccgtttaatgataattactggtcagtccagtctctctctgactctgaaaaagaaacaagacaggcaaagccatttatgattgtttgtgtcactaaccacagtcattttctcccctcttcccacagccctctgagtcataaatgctgttttctctcagttaacttaccggagagaaaacaaagtgaggccctgcaagctgaccattagccaggcctcagccatgaattcccttttagttctgtaaacaaaccctatgtaaagcctggggtggttgtcggcttcaacactgctgacttttgggagccagtagcgttttgggagactggcctgtgtgctctggtctgttcaacactacctggaacggggcagaagcaacctaccccacaaggtatcaccaactggcagagggcatttagcatccctgcccagcccctctgcacagtaaactcctgagttttctttagaagtatttagaaaacaagaaaactgactggacagcggtggtgtgcacctttaagcccagcacacaggcaaactgaactctgagttaaaagaaagatagtcagggagggcaaagagatgcaaaacaaccatggtgcaatgaaggggaagggccctgccccggaatattcagttgtggggatggaggataggggaaaactttaaaaagtcccagagacctgggatgtgaggctcctggggcacaatgaagactgccttagctgaactggtcaacagaggggagatagaaactcaagagaccacctgcagtaagtagatagacatggcccccatttgaggcatgtggtcatcaacatttttgacccagaattgtttctacctaaaagaaatgcagggactaaaatggagcagagattgaaggaaaggccatccagtagccagcccaatttgggatccattccatgggtgggcaccaaaccctgacaccgatgctatgttgtgcttgcaaacaggagctgtcctctgagaggctcttccaccagctgactgagacagatgcagatacttatagccaaacattgcactgaggtcagggaccgttagagttaggggaaggattgaaggacctgaaggggatggcaaccccataggaagaccaacagtatcaactaatcctgacttctgggagctcccagagactaagccaccaaccaaagagcatacatgggctagtccgtggcccctggcacatatgtagcaatggattgccttgtctggcctcagtggaagaggttatacttaatcctatagagacttgatgtcccagggaatgagaatgcaaaggaggatagtgaggtaagagtgggtgggtgggtgaaggagcaccttctcagaggcagtggtggaatggggtgaactcttggagggggggacctggacgaggggcaacatttggaatataaataaataaaaccaccccccccacacacacacacacacaaataaacaaaaatactgaatgggagatacttctaaacttttacataaggatcagtactgttgttacagttaaaaatcaatataatctaaaaaccatgcctgtggctaaattcactttagagtccatcaatttacaatattattttgtattgatcttccagtataatatctcctagcatgaaggttaataaattgggaaaataagtaattcttaaatgaattactggaatttaacttgaacttcttcccatgaaaaaaaaattcacttcatccacaaaagtaagctttgagagatattcagacatagtgtacactttggtgtcttagtctgttttatgttgttgatataatgccataagctaaggtagtttctaaagtttgtttggcctatatttatttgatgtttgaagtcctccacaatggaaatgtatcttgggaggaccttcttgctgagtttttacatggtggagagagagaggtaaaggacaagacttatatcagaaatccattcctaaagaaacccactcccatgaccattaacccatctcagaaatccattcctaaagaaacccactcccgtgaccatcaacctatctctgtggcacaacccacctttaaggtctgtctctcagtctactctgttggggattaaactttagaaaacattcaaaccacaacacaaaagtaatttgccaagcccttgctatgtaatggtcagagttcataacatccacattctactgcttcagaaaacacaaactctctagagaattatagccaaatctttccattgctaatccttttctttcagggagtctgatgaagaaaactcagtctgcttttccagtttttaatgaggcagagtctatgtcagagccaagcctcaatccctgttaaactccacactcaggcccagaactcctcaggagccctggggagaggggtgtacttggagcattgcagcaatggttactgggagatctgtgtttgccctcactttcacgatgtgggatgacacggcatggcatgaggtggcaggcaatccactctgtgatctgataactaaaagcctagagtgctaaagttggacttagggctctgaggccaagagggagagctgaggggttagagtctggtcaactatcatagggtccaacactggtcatcgctacatcctgacaaagggtctcaactttgtacttaagtatttccaaacgatgtcattcttcaggtcccggaggacttgtaagttggaagaggaggatgttgaaaccataactttaaacttatttcctgtaaccagatcctcctccggtacatgctgtatgcaccaagggaagtaagcaatttgaaacgttgatttgtacaatgtaaatgtttaaactggaatttcctaaccttgagttggaaaagcttttatactttattatgactaaaacctcaaaaaaaaaaaaaaagctaagaccttcctccctttccactcctctctccccctctttctccctttctccccctttttctaaacatggcatatttatgtctgcacatgtgtgggcctacatgtgtgtaacagtttatgtgcacatgtgtgcacgtggatctgaggcagcctaacattgaaaggcagaatcttccaccaacactgcacttcctctctgaggtaggctcttgcaatcaatctcagagcaccagtttgctctggaaaccctgattctaactcccaagtctggaattgtagccaggtcaccatgtccacccagcatttctgtgagtccaagatatataaattctggtcctcttgtttggccagtcctttaaaaattgagtggtccctctagtcccgttcttggtcaatgaaaagtctttgattcaaatgaaaaatttggaggcagcaatatgctaattaaaaagattcttcctaataatggtttcaaaggctggcatcatccagtccctattcgatcactaaagacagtagtaggtcaggaacaaaaggaagtcccttctcctgcacctccccactgggagaatgagtggagtcatcagtataacaggaatggctttcagcatgactgccacagagattgagcttgggtagctgcctgaacagttggacactttcttctgcctataaccaatgctatcactcagccaatcctctcctacacggagagctattttctccccaagtataaagttggaagcttggtgagctccaacacgctctgcacacagctggctctactcctctgaaagacattgcttagtctatgcttaaggcagttctgaagcacatacccagaggcatcaacatccaaggaaaacactcttgacttcctgtccgtctcttaggaaggaagaagaaaactttcccgatcactgctggaatcaaatgagtcacatatccatccttaaacggtcactgatgagaagatgattgctaagtcaccctcctcaggctaaggaggatgtgactgtgccctggcttatgggatagatggactatggcccatagctaaggttgcattaggatgagagaagagaggagtcaacgtttggttgctttacctagaacttgcttgaagacccgaggaattagctgaatctctgtagcccactccggttcaagatatgactctataggggatggagcaattgatagcattccagggggacttacagagagtttttgttgattttcctccatatgcaagagctgaggctgccaaataaaagtgaaggggtcatgcacaaacctgtcacatttggttttcttcttatttcatgtcaaagtaaattaggactttatttgtgagaacagagatgctaatccctactaccactccctaacattcacacagacacacaccattttacatgcagccctacctcctgcctataatgatacctcagaacttacaatttataggaaagaagagggatatcccttccacccaaatcaatcagtctacatcagacactaaaaaggaacttggagaaaaaaaaaaaaaaagacaggagaggaggagatggatggatgttaaacagagcatggattggagccctgtaaacccaaaatgagaagagcacggacagattagtcactagcaggaagaaaattgcactgtatgaggaacaacgaagattccttgacaggagaaatttgaggcttagtcatgggatgatcttggagctactgaaggctttaggtcaagaaagatccttgtctaaatctcagaaagcaatgtgctattaatggaagacttgtgaggaggaagtcctagatctagttgccaaaggagtctgccctttctgctaccacactgtgcccacttgtagagagcagagtggaggctctcaaatttagaagaacactaaggagtagccacagttccttgcccttctctagtcttgcctggatttcctacacaatggactaacacttctactaaatggtcacccctgtggaggggttgggggactctgaccaggagtgatgggctagggccccacctaccatattatatactcagaatctttgggtggaaaaaaatcataagaagcatgctatgataaagaccctgatcaaaagtaattttgagggaagaaagggtgtatttggctcatatggttacagttcattgagggaaaccaaggcaagacctctagagaaggagctgaagacgtcaagaactgaagcagaggccatggaggagcactgctcattggcttgctgcacttgacttgttccatttgctcacttatacctcctaggaccatgggccagagatggcactgcccacacagtgggctggaccttcccacatcaaagagattgaagttaataacccacaggcttttctgcaggccaatcaaatggaggcacttcttaattgacattccctcttcttaaattactctaatttgtgtcaagttaacaaagacctaaccgtcacaatggaagtttggaaatggatgatgccatgagacattctaactagaacaagtttcctaagctccctggattcttagagatataaagtctagacatcctcctgacatttaggataggcaatgggcagccttctcctctgggagaatgtggatgtttctgaagagtcaagcaaagtcaaatctgaagacctactgtgcagacgagttcctactttggaactgtggtggaaacttaactctggatcccccaaaacccctaggtgcctgtacctgtgcaatcccttcaatgataagacagaaacatatcaaataaggattgagggatagagcacagttagtagagggtttgactagcaagtataagaccctaggtttagttttagttcctaacaccatccatactgagtgtggtattgcttgccggtaacagtagccctaaagaggtagattgtcagaggatcagaacaaaaattcaaagtcatcctcagatacacaccaacgaccctggggctgggggtgggggtgggcaggaagagagagagagagagagagagagagagaataaataaataaataaataaataaataaataaataaataaaagattggctttggcacagctttgtgacagattgtcttgtcttctcatcatgctgaaataggatatcaccaggtctctgacctgatattgctgtgagctcatttgttactgatcactaggaagtagcaaacatggctagctgctaattcttacaccttggtgcagtctgtcagacattcatgttcctgaagaaggctgagtcagaccctgactttgctgccactaaggaaattacctagggtggagccttcctccctagatcactctattgttcagctaatgtcacggttcctcttcatgatactgctacctgctgagaggcccctgggagctattccagagactatgccctatcctgcacgccatcacctgcagctggttccaggctccaaggatgaattggcgggaatgggcctccccctcctcctttataagcgcatttgccattaaacatttgagccttgatcagaaccttgtcttggctctatttctctctctttcagcctcagtttgcctcccaggtgaaacccagtttatgtgagccgctggctggttcgcaacatgttcccttctgaatgaggttcgactcagaggcaagtgaatgtcatacaaccacaccttatccagaatccaagatggtttcagctccacacttcccattgtagaactttgtgggcaacttacagagctagggacagtcccctgactcccgtgagtggggtgttctggagaacctgtagctaccttccaaggtctactagaagaagctgttttgtgtcatgcatggctggacacagatgaattggtgataaatattgatgtggcattctcttggaaggcgaagtagctaatctcatcacactaaatgggaacagttgtatgggctctgttgctccttctgcatgcttggcagggctcctagttatctttgtcccagcagtgccaccaagccttagtcaagcctttgcagatgtaagtaacaaagctgtggtaacataaacaaaatagacttacttcaagggcagaagggttctcaagtgatcaggagtaggtagtgagttcaagttcaaaggaggtagggcccaaaccagcctctcatgagtctgagagtccagtggatgggatgaacctgcttgcttggaggggtacagtgagaagaggcaccaggttgctaggttggctcctagtctaggctcctttggaccagtactattaacactggagtttaagtcttttggtggctggaagcagaaatccattcaaaccagcttgcttacaaatcaggattactgaaaggctctaagagtatctcataatatagaaggacaggaagggaattggcagacaagccatgtatctcaaaaaccttaaatctcagattatcacagcatcacacacgtctgtttctctgtggattttgttcctccggcagcctctgctgcaggctttcaacttccctacttctgtcatgggaagagccttgggggtagctctggagctcacactagctcactctgtaccatcatctaagaggcccagctttccacctacaccccaaattcccatgccaggtgtaatgggttcctgtcattggaataaccaaatgtggttgagcagacatgggaa

SEQ ID NO: 84 - DNA, 5545 bp, Mus musculus
gagctcatcttcaggatgtccgtgaacgtttcgactgcaggaaaaggtgtggatccaaatacagttgatacttatgacagtggcgatgattgggaaatcggggttggaaatttaatcattgatttggacgccgatttggaaaaggacagacaaaaatttgagatgaataattccaccaacaccactaccaacaccactaaggattgtggaggtccggcctccaatgggacctgttctacctcagccttagctgatggcctaaaatttgcttctgttcagccctccgctccccaggggaattcacacaaagaaaccagcaaatcaaaagtgaaaagggctaaaacttctaaggatgctaataaatctctgccttctgctgccttgtatggaattcccgagatcagcagcactggcaagaggcaggaagtccaagggcgccctggagaggctactggcatgaattcagcgctgggtcaaagtgtgagcggcggcggcagcagcaacccaaacagcaacggtaccagcaccgggacctcggctgccaccgcgggggcaggctcctgtgggaaaagcaaggaagagaagccagggaaaagccacagcagccgaggcgccaagcgggataaggatgctgcgagatcccggaaagagaaacacgacctgctgcagggccaccagaatggcggcggaggccaggccccctccggtggtcacctctatggctttgggaccaagagcaatggaagtggcgcgagcccctttcactgtgggggcgctgggagtggcagcgttggggctgcaggggaagttagcaaaactgctccggattcaacgctcatgggaaactctatgctggtcaagaaggaagaggaggaggaggagagccacaggcgaatcaagaaactgaaaactgagaaggttgaccccctgtttacagtgccggcaccaccgccgccgattgccagcagtctcgcacctcagattccgccctcctactttcccccatcttcatccaatattgcagcaccagtcgaacagcttttggttcggactcggtccgtgggtgtcaatacgtgtgaagttggagtagtgacagagccagagtgtcttgggccctgtgaacctgggaccagtgtcaatttggaagggatcgtgtggcatgaaacagaagaaggtgtcctagtggtcaatgtcacatggaggaacaaaacctacgtggggaccctcctagactgcaccaagcacgactgggcccctccccggttttgcgaatcaccgacaagtgacctggaaatgcgagggggccggggcagagggaagagagcgaggtctgccgcggctgccccaggctccgaggtcagcttcaccgagtccagagggctgcagagcaagaacagagggggagccaatgggaaagggaggcgtggcagcctcaacgccagcggacgaaggacacccccaaactgtgctgcagaggacataaaagccagcccttcctcaaccaacaaaaggaagaacaagcccccaatggagttggatctgaactcgagctctgaggacagtaagcccgggaagcgagtgcgcacgaattccagaagcacgcctaccactcctcaggggaagccagagactacttttttggaccaaggctgctcctctccagtgttaattgattgtccccacccaaactgcaacaaaaaatataagcacataaacggcctgaggtaccaccaggcacatgcgcacttagacccggaaaacaaactagagttcgagccggatagcgaggacaagatctcagactgtgaggaagccttgagcaacgtggccctcgaatgcaacgagtcaagcacaagtgtgtcatcatacgatcagacgaaagcacctgggtcccccggggctgggaacccccctgggacacccaagggaaagagagagcacgtgagcaatggcccaggtcctattataggttcgaaaactggcaagaattctggcaagaagaggggccttaacaacgaactgaacaaccttccggtcatctccaacatgacggccgctttagacatttgttcagccacagacagcaatctaacggcggaaatgcccaaattggaagcggaaggactgattgacaagaaaagtttgggggataaagaaaagggcaaaaaagcaaacaattgcaaaatggacaaaaacctctccaaactgaaaagcgcccgccccattgcccccgcccctgcccctacgcccccacagctgattgctataccgactgcagccttcacatccaccaccacagggaccatacctggactgccctccctcacgaccactgtggtccaggctacaccaaagagccctccattgaaacctattcaaccaaagcccacaattatgggggagcccatcaccgtgaacccagctctggtgtcactcaaagacagaaagaaaaaggagaagcgaaagctcaaggacaaagaagggaaagagactggaggtcccaaaatggatgctaagctggggaagctggaggaagccaaggcggctagcaaggatttgtctgggcattttttaaaggaccatctcggtaagagcgaagggctggctaatggattgtcagagtctcaggagagccgcatggccagcatcaaagccgaggccgataaggtttacacattcacggacaatgcccccagcccttccatcgggagtgcctcacgcatggaatgcagtaccttggtgaatgggcaagcacccatggcaccactgcatgtattgacccagaatggggctgagagcgcagcagctaagaccagcagtccagcctattcggacatatcagatgctgcagatgatggcggttctgacagcaggtcagagggcatgaggtcaaaggccagttccccatcggataccttttctaacaaagacggtgttgtgaaagggcatccttcaacttcagcacagccatctcagctgaaagagtcccattctccctattaccatggctatgagccttactattctccgagttacatgcaccctggacaggttggtgccccggcagctgggaatggtgggagcacacagggcatgaagatcaagaaggagtcagaggaagatgcggagaagaaagacaaggcggaacagttggagtccaagaaagtagaccatacttctgcacccctgcagcctcagcaccagtcagtcatcacccagagacaccctgccctggctcagtcactttattacggccagtatgcctacgggctctatatggaccagaaatctctgatggctaccagccctgcctacagacagcagtatgagaagtactatgaggaccagagactggcagagcagaaaatggcccagagtgggagaggagactgtgaaagaaaggctgaactccccttgaaagaactgggcaaggaagacaataagcagaaaaacatgccatcagccactatctcaaaagctccctctaccccggagcctaacaaaaaccattctaaactagggccatcagtgcctaataaaactgaggagacaggtaaatcacagcttctctccagtcaccagcagcagcttcaggccgacagcttcaaagctaagcagatggaaaaccaccagcttattaaggaggctgtagaaatgaagtctgtcatggactctatgaagcagacaggtgtagacccaacctcgagatttaaacaagatccagagtcaaggacatggcaccattatgtataccagcccaagtacctggaccaacaaaagccagaagaacttgacagagaaaagaaattgaaagaggacagtccaaggaagactcctaacaaagagagtggcgtgtccagtctccccgtgtcattaacaaacatcaaagaggagcccaaagagggcaagcgtcctgattcccagtcggtggaggagaacaagctaaagaatgatgatcggaagacaccggtgaactggaaggactctcgggggacacgagtggccgtgtcctcacccatgagtcagcaccagtcctacatacaatacttgcatgcttatccttacccacagatgtatgaccccagccaccctgcataccgggctgtctctcctgtcttaatgcacagttaccctggggcctatctctctccaggatttcattatcctgtttatggaaagatgtctgggagagaagaggcagagaaagtcaatactagtcccagcatcaacacaaaaacagccagcgaagccaaagccctggacctactccaacatcacgccaaccaataccgcagcaagtcccctgctcctgtggagaaggcttccacggagcgagaacgggaagcagagcgggaacgggatcgccactcccccttcagccagcggcacctgcacacacaccaccacacccatgttggcatgggctaccctctcatccctggtcaatacgacccttttcaaggcttgacctctgctgccctagttgcctctcagcaggtggctgcccaggcatctgcttctggaatgtttcctgcacagagaagagaataacagaatcggaagtgtccggtgccatgtgactggatcacatggggaagcgctttatatagacatcagttccatggtgttaatttgaaatgccttaatggcaggcaaaaaaccagtcatttcattttgtaaattacagattttatcacagagtaacaaatgttgctgtaattaaacttctgttttatatatatgtatatatatacgtatacatatctgtatatatacatatatatatatacatatatatatatatattctttacttttttgtaacagtaaccaggctcgcacacacagggtctgctgccaagttgcaaaccactcagtaaaggaaattaaaaaagaaaaaaaaaatgtatttgtcatgttgaaagtgttagccacaacaggctgcttacattcttttccttttaaattgtaaataaataatgttctgtatcagtgtgcctgaaccttgcatatccttcatctctctcccataaaacccctcagaaaggccaactgtgatgatgacacttggtacaatttagatgtctaattggtggctcctcttaaagatgcatcagtgtaaaaaatgtccccgtggtcactctttgtacttgtttattgtggaaataaatacttttggaaggcatggggttgccagaaccacaaaaactgtgttgtatatataatgtaaaaattaagatggggaaataatgagcatctgtgaataatgaggtgtcatttttttttgataatcttgaatggcagataacccaatagcctgcataccagagacatctgcgatctctctcttacttgaatagccctgcagtccttttttttttttccttttttttttctttaatgtttacaattatccagttttagaagagaaggattttaacgccattgcctggttacttgttttatgctgtaatctagtttattttatgtaaaatgtatattgaatgctttcctttttatacctgccttaaataatttggcaatca

SEQ ID NO: 85 - protein, 1500 aa, Mus musculus
ELIFRMSVNVSTAGKGVDPNTVDTYDSGDDWEIGVGNLIIDLDADLEKDRQKFEMNNSTNTTTNTTKDCGGPNGTCSTSADGLKFASVQPSAPQGNSHKETSKSKVKRAKTSKDANKSLPSAALYGIPEISSTGKRQEVQGRPGEATGMNSALGQSVSGGGSSNPNSNGTSTGTSAATAGAGSCGKSKEEKPGKSHSSRGAKRDKDAARSRKEKHDLLQGHQNGGGGQAPSGGHLYGFGTKSNGSGDFHCGGAGSGSVGAAGEVSKTAPDSTLMGNSMLVKKEEEEEESHRRIKKLKTEKVDPLFTVPAPPPPIASSLAPQIPPSYFPPSSSNIAAPVEQLLVRTRSVGVNTCEVGVVTEPECLGPCEPGTSVNLEGIVWHETEEGVLVVNVTWRNKTYVGTLLDCTKHDWAPPRFCESPTSDLEMRGGRGRGKRARSAAAAPGSEVSFTESRGLQSKNRGGANGKGRRGSLNASGRRTPPNCAAEDIKDSSTNKRKNKPPMELDLNSSSEDSKPGKRVRTNSRSTPTTPQGKPETTFLDQGCSSPVLIDCPHPNCNKKYKHINGLRYHQAHAHLDPENKLEFEPDSEDKISDCEEALSNVECNESSTSVSSYDQTKAPGSPGAGNPPGTPKGKREHVSNGPGPIIGSKTGKNSGKKRQNELNNLPVISNMTAALDICSATDSNLTAEMPKLEAEGLIDKKSLGDKEKGKKANNCKMDKNLSKLKSARPIAPAPAPTPPQLIAIPTAAFTSTTTGTIPGLPSLTTTVVQATPKSPPLKPIQPKPTIMGEPITVNPALVSLKDRKKKEKRKLKDKEGKETGGPKMDAKLGKLEEAKAASKDLSGHFLKDHLGKSEGLANGLSESQESRMASIKAEADKVYTFTDNAPSPSIGSASRMECSTLVNGQAPMAPLHVLTQNGAESAAAKTSSPAYSDISDAADDGGSDSRSEGMRSKASSPSDTFSNKDGVVKGHPSTSAQPSQLKESHSPYYHGYEPYYSPSYMHPGQVGAPAAGNGGSTQGMKIKKESEEDAEKKDKAEQLESKKVDHTSAPLQPQHQSVITQRHPAQSLYYGQYAYGMDQKSLMATSPAYRQQYEKYYEDQRLAEQKMAQSGRGDCERKAELPLKELGKEDNKQKNMPSATISKAPSTPEPNKNHSKLGPSVPNKTEETGKSQLLSSHQQQLQADSFKAKQMENHQLIKEAVEMKSVMDSMKQTGVDPTSRFKQDPESRTWHHYVYQPKYLDQQKPEELDREKKLKEDSPRKTPNKESGVSSLPVSLTNIKEEPKEGKRPDSQSVEENKLKNDDRKTPVNWKDSRGTRVAVSSPMSQHQSYIQYLHAYPYPQMYDPSHPAYRAVSPVLMHSYPGAYLSPGFHYPVYGKMSGREEAEKVNTSPSINTKTASEAKALDLLQHHANQYRSKSPAPVEKASTEREREAERERDRHSPFSQRHLHTHHHTHVGMGYPLIPGQYDPFQGLTSAALVASQQVAAQASASGMFPAQRRE

(The sequence listing continues in the following parts.)
